United States Patent Application Publication US 2026/0265762 A1 - sequence listing, part 2

SEQ ID NO: 1082 - protein, 2094 aa, synthetic construct
MPAAKRVKLDGGDKKYSIGLDIGTNSVGWAVITDEYKVPSKKFKVLGNTDRHSIKKNLIGALLFDSGETAEATRLKRTARRRYTRRKNRICYLQEIFSNEMAKVDDSFFHRLEESFLVEEDKKHERHPIFGNIVDEVAYHEKYPTIYHLRKKLVDSTDKADLRLIYLALAHMIKFRGHFLIEGDLNPDNSDVDKLFIQLVQTYNQLFEENPINASGVDAKAILSARLSKSRRLENLIAQLPGEKKNGLFGNLIALSLGLTPNFKSNFDLAEDAKLQLSKDTYDDDLDNLLAQIGDQYADLFLAAKNLSDAILLSDILRVNTEITKAPLSASMIKRYDEHHQDLTLLKALVRQQLPEKYKEIFFDQSKNGYAGYIDGGASQEEFYKFIKPILEKMDGTEELLVKLNREDLLRKQRTFDNGSIPHQIHLGELHAILRRQEDFYPFLKDNREKIEKILTFRIPYYVGPLARGNSRFAWMTRKSEETITPWNFEEVVDKGASAQSFIERMTNFDKNLPNEKVLPKHSLLYEYFTVYNELTKVKYVTEGMRKPAFLSGEQKKAIVDLLFKTNRKVTVKQLKEDYFKKIECFDSVEISGVEDRFNASLGTYHDLLKIIKDKDFLDNEENEDILEDIVLTLTLFEDREMIEERLKTYAHLFDDKVMKQLKRRRYTGWGRLSRKLINGIRDKQSGKTILDFLKSDGFANRNFMQLIHDDSLTFKEDIQKAQVSGQGDSLHEHIANLAGSPAIKKGILQTVKVVDELVKVMGRHKPENIVIEMARENQTTQKGQKNSRERMKRIEEGIKELGSQILKEHPVENTQLQNEKLYLYYLQNGRDMYVDQELDINRLSDYDVDHIVPQSFLKDDSIDNKVLTRSDKARGKSDNVPSEEVVKKMKNYWRQLLNAKLITQRKFDNLTKAERGGLSELDKAGFIKRQLVETRQITKHVAQILDSRMNTKYDENDKLIREVKVITLKSKLVSDFRKDFQFYKVREINNYHHAHDAYLNAVVGTALIKKYPKLESEFVYGDYKVYDVRKMIAKSEQEIGKATAKYFFYSNIMNFFKTEITLANGEIRKRPLIETNGETGEIVWDKGRDFATVRKVLSMPQVNIVKKTEVQTGGFSKESILPKRNSDKLIARKKDWDPKKYGGFDSPTVAYSVLVVAKVEKGKSKKLKSVKELLGITIMERSSFEKNPIDFLEAKGYKEVKKDLIIKLPKYSLFELENGRKRMLASAGELQKGNELALPSKYVNFLYLASHYEKLKGSPEDNEQKQLFVEQHKHYLDEIIEQISEFSKRVILADANLDKVLSAYNKHRDKPIREQAENIIHLFTLTNLGAPAAFKYFDTTIDRKRYTSTKEVLDATLIHQSITGLYETRIDLSQLGGDGGGSSGGSGGGGGTLNIEDEYRLHETSKEPDVPLGSTWLSDFPQAWAETGGMGLAVRQAPLIIPLKATSTPVSIKQYPMSQEARLGIKPHIQRLLDQGILVPCQSPWNTPLLPVKKPGTNDYRPVQDLREVNKRVEDIHPTVPNPYNLLSGLPPSHQWYTVLDLKDAFFCLRLHPTSQPLFAFEWRDPEMGISGQLTWTRLPQGFKNSPTLFNEALHRDLADFRIQHPDLILLQYVDDLLLAATSEQDCQRGTRALLQTLGNLGYRASAKKAQICQKQVKYLGYLLKEGQRWLTEARKETVMGQPTPKTPRQLREFLGKAGFCRLFIPGFAEMAAPLYPLTKPGTLFNWGPDQQKAYQEIKQALLTAPALGLPDLTKPFELFVDEKQGYAKGVLTQKLGPWRRPVAYLSKKLDPVAAGWPPCLRMVAAIAVLTKDAGKLTMGQPLVILAPHAVEALVKQPPDRWLSNARMTHYQAMLLDTDRVQFGPVVALNPATLLPLPEKEAPHDCLEILAETHGTRPDLTDQPIPDADYTWYTDGSSFLQEGQRRAGAAVTTETEVIWARALPAGTSAQRAELIALTQALKMAEGKKLNVYTDSRYAFATAHVHGEIYRRRGWLTSEGREIKNKNEILALLKALFLPKRLSIIHCPGHQKGNSAEARGNRMADQAAREAAMKAVLETSTLLAGKRTADGSEFEKRTADGSEFESPKKKAKVE

SEQ ID NO: 1083 - protein, 2093 aa, synthetic construct
MPAAKRVKLDGGDKKYSIGLDIGTNSVGWAVITDEYKVPSKKFKVLGNTDRHSIKKNLIGALLFDSGETAEATRLKRTARRRYTRRKNRICYLQEIFSNEMAKVDDSFFHRLEESFLVEEDKKHERHPIFGNIVDEVAYHEKYPTIYHLRKKLVDSTDKADLRLIYLALAHMIKFRGHFLIEGDLNPDNSDVDKLFIQLVQTYNQLFEENPINASGVDAKAILSARLSKSRRLENLIAQLPGEKKNGLFGNLIALSLGLTPNFKSNFDLAEDAKLQLSKDTYDDDLDNLLAQIGDQYADLFLAAKNLSDAILLSDILRVNTEITKAPLSASMIKRYDEHHQDLTLLKALVRQQLPEKYKEIFFDQSKNGYAGYIDGGASQEEFYKFIKPILEKMDGTEELLVKLNREDLLRKQRTFDNGSIPHQIHLGELHAILRRQEDFYPFLKDNREKIEKILTFRIPYYVGPLARGNSRFAWMTRKSEETITPWNFEEVVDKGASAQSFIERMTNFDKNLPNEKVLPKHSLLYEYFTVYNELTKVKYVTEGMRKPAFLSGEQKKAIVDLLFKTNRKVTVKQLKEDYFKKIECFDSVEISGVEDRFNASLGTYHDLLKIIKDKDFLDNEENEDILEDIVLTLTLFEDREMIEERLKTYAHLFDDKVMKQLKRRRYTGWGRLSRKLINGIRDKQSGKTILDFLKSDGFANRNFMQLIHDDSLTFKEDIQKAQVSGQGDSLHEHIANLAGSPAIKKGILQTVKVVDELVKVMGRHKPENIVIEMARENQTTQKGQKNSRERMKRIEEGIKELGSQILKEHPVENTQLQNEKLYLYYLQNGRDMYVDQELDINRLSDYDVDHIVPQSFLKDDSIDNKVLTRSDKARGKSDNVPSEEVVKKMKNYWRQLLNAKLITQRKFDNLTKAERGGLSELDKAGFIKRQLVETRQITKHVAQILDSRMNTKYDENDKLIREVKVITLKSKLVSDFRKDFQFYKVREINNYHHAHDAYLNAVVGTALIKKYPKLESEFVYGDYKVYDVRKMIAKSEQEIGKATAKYFFYSNIMNFFKTEITLANGEIRKRPLIETNGETGEIVWDKGRDFATVRKVLSMPQVNIVKKTEVQTGGFSKESILPKRNSDKLIARKKDWDPKKYGGFDSPTVAYSVLVVAKVEKGKSKKLKSVKELLGITIMERSSFEKNPIDFLEAKGYKEVKKDLIIKLPKYSLFELENGRKRMLASAGELQKGNELALPSKYVNFLYLASHYEKLKGSPEDNEQKQLFVEQHKHYLDEIIEQISEFSKRVILADANLDKVLSAYNKHRDKPIREQAENIIHLFTLTNLGAPAAFKYFDTTIDRKRYTSTKEVLDATLIHQSITGLYETRIDLSQLGGDGGGGSEAAAKGGTLNIEDEYRLHETSKEPDVPLGSTWLSDFPQAWAETGGMGLAVRQAPLIIPLKATSTPVSIKQYPMSQEARLGIKPHIQRLLDQGILVPCQSPWNTPLLPVKKPGTNDYRPVQDLREVNKRVEDIHPTVPNPYNLLSGLPPSHQWYTVLDLKDAFFCLRLHPTSQPLFAFEWRDPEMGISGQLTWTRLPQGFKNSPTLFNEALHRDLADFRIQHPDLILLQYVDDLLLAATSEQDCQRGTRALLQTLGNLGYRASAKKAQICQKQVKYLGYLLKEGQRWLTEARKETVMGQPTPKTPRQLREFLGKAGFCRLFIPGFAEMAAPLYPLTKPGTLFNWGPDQQKAYQEIKQALLTAPALGLPDLTKPFELFVDEKQGYAKGVLTQKLGPWRRPVAYLSKKLDPVAAGWPPCLRMVAAIAVLTKDAGKLTMGQPLVILAPHAVEALVKQPPDRWLSNARMTHYQAMLLDTDRVQFGPVVALNPATLLPLPEKEAPHDCLEILAETHGTRPDLTDQPIPDADYTWYTDGSSFLQEGQRRAGAAVTTETEVIWARALPAGTSAQRAELIALTQALKMAEGKKLNVYTDSRYAFATAHVHGEIYRRRGWLTSEGREIKNKNEILALLKALFLPKRLSIIHCPGHQKGNSAEARGNRMADQAAREAAMKAVLETSTLLAGKRTADGSEFEKRTADGSEFESPKKKAKVE

SEQ ID NO: 1084 - protein, 2094 aa, synthetic construct
MPAAKRVKLDGGDKKYSIGLDIGTNSVGWAVITDEYKVPSKKFKVLGNTDRHSIKKNLIGALLFDSGETAEATRLKRTARRRYTRRKNRICYLQEIFSNEMAKVDDSFFHRLEESFLVEEDKKHERHPIFGNIVDEVAYHEKYPTIYHLRKKLVDSTDKADLRLIYLALAHMIKFRGHFLIEGDLNPDNSDVDKLFIQLVQTYNQLFEENPINASGVDAKAILSARLSKSRRLENLIAQLPGEKKNGLFGNLIALSLGLTPNFKSNFDLAEDAKLQLSKDTYDDDLDNLLAQIGDQYADLFLAAKNLSDAILLSDILRVNTEITKAPLSASMIKRYDEHHQDLTLLKALVRQQLPEKYKEIFFDQSKNGYAGYIDGGASQEEFYKFIKPILEKMDGTEELLVKLNREDLLRKQRTFDNGSIPHQIHLGELHAILRRQEDFYPFLKDNREKIEKILTFRIPYYVGPLARGNSRFAWMTRKSEETITPWNFEEVVDKGASAQSFIERMTNFDKNLPNEKVLPKHSLLYEYFTVYNELTKVKYVTEGMRKPAFLSGEQKKAIVDLLFKTNRKVTVKQLKEDYFKKIECFDSVEISGVEDRFNASLGTYHDLLKIIKDKDFLDNEENEDILEDIVLTLTLFEDREMIEERLKTYAHLFDDKVMKQLKRRRYTGWGRLSRKLINGIRDKQSGKTILDFLKSDGFANRNFMQLIHDDSLTFKEDIQKAQVSGQGDSLHEHIANLAGSPAIKKGILQTVKVVDELVKVMGRHKPENIVIEMARENQTTQKGQKNSRERMKRIEEGIKELGSQILKEHPVENTQLQNEKLYLYYLQNGRDMYVDQELDINRLSDYDVDHIVPQSFLKDDSIDNKVLTRSDKARGKSDNVPSEEVVKKMKNYWRQLLNAKLITQRKFDNLTKAERGGLSELDKAGFIKRQLVETRQITKHVAQILDSRMNTKYDENDKLIREVKVITLKSKLVSDFRKDFQFYKVREINNYHHAHDAYLNAVVGTALIKKYPKLESEFVYGDYKVYDVRKMIAKSEQEIGKATAKYFFYSNIMNFFKTEITLANGEIRKRPLIETNGETGEIVWDKGRDFATVRKVLSMPQVNIVKKTEVQTGGFSKESILPKRNSDKLIARKKDWDPKKYGGFDSPTVAYSVLVVAKVEKGKSKKLKSVKELLGITIMERSSFEKNPIDFLEAKGYKEVKKDLIIKLPKYSLFELENGRKRMLASAGELQKGNELALPSKYVNFLYLASHYEKLKGSPEDNEQKQLFVEQHKHYLDEIIEQISEFSKRVILADANLDKVLSAYNKHRDKPIREQAENIIHLFTLTNLGAPAAFKYFDTTIDRKRYTSTKEVLDATLIHQSITGLYETRIDLSQLGGDGGGSSGGGPAPGGTLNIEDEYRLHETSKEPDVPLGSTWLSDFPQAWAETGGMGLAVRQAPLIIPLKATSTPVSIKQYPMSQEARLGIKPHIQRLLDQGILVPCQSPWNTPLLPVKKPGTNDYRPVQDLREVNKRVEDIHPTVPNPYNLLSGLPPSHQWYTVLDLKDAFFCLRLHPTSQPLFAFEWRDPEMGISGQLTWTRLPQGFKNSPTLFNEALHRDLADFRIQHPDLILLQYVDDLLLAATSEQDCQRGTRALLQTLGNLGYRASAKKAQICQKQVKYLGYLLKEGQRWLTEARKETVMGQPTPKTPRQLREFLGKAGFCRLFIPGFAEMAAPLYPLTKPGTLFNWGPDQQKAYQEIKQALLTAPALGLPDLTKPFELFVDEKQGYAKGVLTQKLGPWRRPVAYLSKKLDPVAAGWPPCLRMVAAIAVLTKDAGKLTMGQPLVILAPHAVEALVKQPPDRWLSNARMTHYQAMLLDTDRVQFGPVVALNPATLLPLPEKEAPHDCLEILAETHGTRPDLTDQPIPDADYTWYTDGSSFLQEGQRRAGAAVTTETEVIWARALPAGTSAQRAELIALTQALKMAEGKKLNVYTDSRYAFATAHVHGEIYRRRGWLTSEGREIKNKNEILALLKALFLPKRLSIIHCPGHQKGNSAEARGNRMADQAAREAAMKAVLETSTLLAGKRTADGSEFEKRTADGSEFESPKKKAKVE

SEQ ID NO: 1085 - protein, 2094 aa, synthetic construct
MPAAKRVKLDGGDKKYSIGLDIGTNSVGWAVITDEYKVPSKKFKVLGNTDRHSIKKNLIGALLFDSGETAEATRLKRTARRRYTRRKNRICYLQEIFSNEMAKVDDSFFHRLEESFLVEEDKKHERHPIFGNIVDEVAYHEKYPTIYHLRKKLVDSTDKADLRLIYLALAHMIKFRGHFLIEGDLNPDNSDVDKLFIQLVQTYNQLFEENPINASGVDAKAILSARLSKSRRLENLIAQLPGEKKNGLFGNLIALSLGLTPNFKSNFDLAEDAKLQLSKDTYDDDLDNLLAQIGDQYADLFLAAKNLSDAILLSDILRVNTEITKAPLSASMIKRYDEHHQDLTLLKALVRQQLPEKYKEIFFDQSKNGYAGYIDGGASQEEFYKFIKPILEKMDGTEELLVKLNREDLLRKQRTFDNGSIPHQIHLGELHAILRRQEDFYPFLKDNREKIEKILTFRIPYYVGPLARGNSRFAWMTRKSEETITPWNFEEVVDKGASAQSFIERMTNFDKNLPNEKVLPKHSLLYEYFTVYNELTKVKYVTEGMRKPAFLSGEQKKAIVDLLFKTNRKVTVKQLKEDYFKKIECFDSVEISGVEDRFNASLGTYHDLLKIIKDKDFLDNEENEDILEDIVLTLTLFEDREMIEERLKTYAHLFDDKVMKQLKRRRYTGWGRLSRKLINGIRDKQSGKTILDFLKSDGFANRNFMQLIHDDSLTFKEDIQKAQVSGQGDSLHEHIANLAGSPAIKKGILQTVKVVDELVKVMGRHKPENIVIEMARENQTTQKGQKNSRERMKRIEEGIKELGSQILKEHPVENTQLQNEKLYLYYLQNGRDMYVDQELDINRLSDYDVDHIVPQSFLKDDSIDNKVLTRSDKARGKSDNVPSEEVVKKMKNYWRQLLNAKLITQRKFDNLTKAERGGLSELDKAGFIKRQLVETRQITKHVAQILDSRMNTKYDENDKLIREVKVITLKSKLVSDFRKDFQFYKVREINNYHHAHDAYLNAVVGTALIKKYPKLESEFVYGDYKVYDVRKMIAKSEQEIGKATAKYFFYSNIMNFFKTEITLANGEIRKRPLIETNGETGEIVWDKGRDFATVRKVLSMPQVNIVKKTEVQTGGFSKESILPKRNSDKLIARKKDWDPKKYGGFDSPTVAYSVLVVAKVEKGKSKKLKSVKELLGITIMERSSFEKNPIDFLEAKGYKEVKKDLIIKLPKYSLFELENGRKRMLASAGELQKGNELALPSKYVNFLYLASHYEKLKGSPEDNEQKQLFVEQHKHYLDEIIEQISEFSKRVILADANLDKVLSAYNKHRDKPIREQAENIIHLFTLTNLGAPAAFKYFDTTIDRKRYTSTKEVLDATLIHQSITGLYETRIDLSQLGGDGGGGSGGGPAPGGTLNIEDEYRLHETSKEPDVPLGSTWLSDFPQAWAETGGMGLAVRQAPLIIPLKATSTPVSIKQYPMSQEARLGIKPHIQRLLDQGILVPCQSPWNTPLLPVKKPGTNDYRPVQDLREVNKRVEDIHPTVPNPYNLLSGLPPSHQWYTVLDLKDAFFCLRLHPTSQPLFAFEWRDPEMGISGQLTWTRLPQGFKNSPTLFNEALHRDLADFRIQHPDLILLQYVDDLLLAATSEQDCQRGTRALLQTLGNLGYRASAKKAQICQKQVKYLGYLLKEGQRWLTEARKETVMGQPTPKTPRQLREFLGKAGFCRLFIPGFAEMAAPLYPLTKPGTLFNWGPDQQKAYQEIKQALLTAPALGLPDLTKPFELFVDEKQGYAKGVLTQKLGPWRRPVAYLSKKLDPVAAGWPPCLRMVAAIAVLTKDAGKLTMGQPLVILAPHAVEALVKQPPDRWLSNARMTHYQAMLLDTDRVQFGPVVALNPATLLPLPEKEAPHDCLEILAETHGTRPDLTDQPIPDADYTWYTDGSSFLQEGQRRAGAAVTTETEVIWARALPAGTSAQRAELIALTQALKMAEGKKLNVYTDSRYAFATAHVHGEIYRRRGWLTSEGREIKNKNEILALLKALFLPKRLSIIHCPGHQKGNSAEARGNRMADQAAREAAMKAVLETSTLLAGKRTADGSEFEKRTADGSEFESPKKKAKVE

SEQ ID NO: 1086 - protein, 2091 aa, synthetic construct
MPAAKRVKLDGGDKKYSIGLDIGTNSVGWAVITDEYKVPSKKFKVLGNTDRHSIKKNLIGALLFDSGETAEATRLKRTARRRYTRRKNRICYLQEIFSNEMAKVDDSFFHRLEESFLVEEDKKHERHPIFGNIVDEVAYHEKYPTIYHLRKKLVDSTDKADLRLIYLALAHMIKFRGHFLIEGDLNPDNSDVDKLFIQLVQTYNQLFEENPINASGVDAKAILSARLSKSRRLENLIAQLPGEKKNGLFGNLIALSLGLTPNFKSNFDLAEDAKLQLSKDTYDDDLDNLLAQIGDQYADLFLAAKNLSDAILLSDILRVNTEITKAPLSASMIKRYDEHHQDLTLLKALVRQQLPEKYKEIFFDQSKNGYAGYIDGGASQEEFYKFIKPILEKMDGTEELLVKLNREDLLRKQRTFDNGSIPHQIHLGELHAILRRQEDFYPFLKDNREKIEKILTFRIPYYVGPLARGNSRFAWMTRKSEETITPWNFEEVVDKGASAQSFIERMTNFDKNLPNEKVLPKHSLLYEYFTVYNELTKVKYVTEGMRKPAFLSGEQKKAIVDLLFKTNRKVTVKQLKEDYFKKIECFDSVEISGVEDRFNASLGTYHDLLKIIKDKDFLDNEENEDILEDIVLTLTLFEDREMIEERLKTYAHLFDDKVMKQLKRRRYTGWGRLSRKLINGIRDKQSGKTILDFLKSDGFANRNFMQLIHDDSLTFKEDIQKAQVSGQGDSLHEHIANLAGSPAIKKGILQTVKVVDELVKVMGRHKPENIVIEMARENQTTQKGQKNSRERMKRIEEGIKELGSQILKEHPVENTQLQNEKLYLYYLQNGRDMYVDQELDINRLSDYDVDHIVPQSFLKDDSIDNKVLTRSDKARGKSDNVPSEEVVKKMKNYWRQLLNAKLITQRKFDNLTKAERGGLSELDKAGFIKRQLVETRQITKHVAQILDSRMNTKYDENDKLIREVKVITLKSKLVSDFRKDFQFYKVREINNYHHAHDAYLNAVVGTALIKKYPKLESEFVYGDYKVYDVRKMIAKSEQEIGKATAKYFFYSNIMNFFKTEITLANGEIRKRPLIETNGETGEIVWDKGRDFATVRKVLSMPQVNIVKKTEVQTGGFSKESILPKRNSDKLIARKKDWDPKKYGGFDSPTVAYSVLVVAKVEKGKSKKLKSVKELLGITIMERSSFEKNPIDFLEAKGYKEVKKDLIIKLPKYSLFELENGRKRMLASAGELQKGNELALPSKYVNFLYLASHYEKLKGSPEDNEQKQLFVEQHKHYLDEIIEQISEFSKRVILADANLDKVLSAYNKHRDKPIREQAENIIHLFTLTNLGAPAAFKYFDTTIDRKRYTSTKEVLDATLIHQSITGLYETRIDLSQLGGDGGGSSPAPGGTLNIEDEYRLHETSKEPDVPLGSTWLSDFPQAWAETGGMGLAVRQAPLIIPLKATSTPVSIKQYPMSQEARLGIKPHIQRLLDQGILVPCQSPWNTPLLPVKKPGTNDYRPVQDLREVNKRVEDIHPTVPNPYNLLSGLPPSHQWYTVLDLKDAFFCLRLHPTSQPLFAFEWRDPEMGISGQLTWTRLPQGFKNSPTLFNEALHRDLADFRIQHPDLILLQYVDDLLLAATSEQDCQRGTRALLQTLGNLGYRASAKKAQICQKQVKYLGYLLKEGQRWLTEARKETVMGQPTPKTPRQLREFLGKAGFCRLFIPGFAEMAAPLYPLTKPGTLFNWGPDQQKAYQEIKQALLTAPALGLPDLTKPFELFVDEKQGYAKGVLTQKLGPWRRPVAYLSKKLDPVAAGWPPCLRMVAAIAVLTKDAGKLTMGQPLVILAPHAVEALVKQPPDRWLSNARMTHYQAMLLDTDRVQFGPVVALNPATLLPLPEKEAPHDCLEILAETHGTRPDLTDQPIPDADYTWYTDGSSFLQEGQRRAGAAVTTETEVIWARALPAGTSAQRAELIALTQALKMAEGKKLNVYTDSRYAFATAHVHGEIYRRRGWLTSEGREIKNKNEILALLKALFLPKRLSIIHCPGHQKGNSAEARGNRMADQAAREAAMKAVLETSTLLAGKRTADGSEFEKRTADGSEFESPKKKAKVE

SEQ ID NO: 1087 - protein, 2094 aa, synthetic construct
MPAAKRVKLDGGDKKYSIGLDIGTNSVGWAVITDEYKVPSKKFKVLGNTDRHSIKKNLIGALLFDSGETAEATRLKRTARRRYTRRKNRICYLQEIFSNEMAKVDDSFFHRLEESFLVEEDKKHERHPIFGNIVDEVAYHEKYPTIYHLRKKLVDSTDKADLRLIYLALAHMIKFRGHFLIEGDLNPDNSDVDKLFIQLVQTYNQLFEENPINASGVDAKAILSARLSKSRRLENLIAQLPGEKKNGLFGNLIALSLGLTPNFKSNFDLAEDAKLQLSKDTYDDDLDNLLAQIGDQYADLFLAAKNLSDAILLSDILRVNTEITKAPLSASMIKRYDEHHQDLTLLKALVRQQLPEKYKEIFFDQSKNGYAGYIDGGASQEEFYKFIKPILEKMDGTEELLVKLNREDLLRKQRTFDNGSIPHQIHLGELHAILRRQEDFYPFLKDNREKIEKILTFRIPYYVGPLARGNSRFAWMTRKSEETITPWNFEEVVDKGASAQSFIERMTNFDKNLPNEKVLPKHSLLYEYFTVYNELTKVKYVTEGMRKPAFLSGEQKKAIVDLLFKTNRKVTVKQLKEDYFKKIECFDSVEISGVEDRFNASLGTYHDLLKIIKDKDFLDNEENEDILEDIVLTLTLFEDREMIEERLKTYAHLFDDKVMKQLKRRRYTGWGRLSRKLINGIRDKQSGKTILDFLKSDGFANRNFMQLIHDDSLTFKEDIQKAQVSGQGDSLHEHIANLAGSPAIKKGILQTVKVVDELVKVMGRHKPENIVIEMARENQTTQKGQKNSRERMKRIEEGIKELGSQILKEHPVENTQLQNEKLYLYYLQNGRDMYVDQELDINRLSDYDVDHIVPQSFLKDDSIDNKVLTRSDKARGKSDNVPSEEVVKKMKNYWRQLLNAKLITQRKFDNLTKAERGGLSELDKAGFIKRQLVETRQITKHVAQILDSRMNTKYDENDKLIREVKVITLKSKLVSDFRKDFQFYKVREINNYHHAHDAYLNAVVGTALIKKYPKLESEFVYGDYKVYDVRKMIAKSEQEIGKATAKYFFYSNIMNFFKTEITLANGEIRKRPLIETNGETGEIVWDKGRDFATVRKVLSMPQVNIVKKTEVQTGGFSKESILPKRNSDKLIARKKDWDPKKYGGFDSPTVAYSVLVVAKVEKGKSKKLKSVKELLGITIMERSSFEKNPIDFLEAKGYKEVKKDLIIKLPKYSLFELENGRKRMLASAGELQKGNELALPSKYVNFLYLASHYEKLKGSPEDNEQKQLFVEQHKHYLDEIIEQISEFSKRVILADANLDKVLSAYNKHRDKPIREQAENIIHLFTLTNLGAPAAFKYFDTTIDRKRYTSTKEVLDATLIHQSITGLYETRIDLSQLGGDGGGGGGSSGGSGGTLNIEDEYRLHETSKEPDVPLGSTWLSDFPQAWAETGGMGLAVRQAPLIIPLKATSTPVSIKQYPMSQEARLGIKPHIQRLLDQGILVPCQSPWNTPLLPVKKPGTNDYRPVQDLREVNKRVEDIHPTVPNPYNLLSGLPPSHQWYTVLDLKDAFFCLRLHPTSQPLFAFEWRDPEMGISGQLTWTRLPQGFKNSPTLFNEALHRDLADFRIQHPDLILLQYVDDLLLAATSEQDCQRGTRALLQTLGNLGYRASAKKAQICQKQVKYLGYLLKEGQRWLTEARKETVMGQPTPKTPRQLREFLGKAGFCRLFIPGFAEMAAPLYPLTKPGTLFNWGPDQQKAYQEIKQALLTAPALGLPDLTKPFELFVDEKQGYAKGVLTQKLGPWRRPVAYLSKKLDPVAAGWPPCLRMVAAIAVLTKDAGKLTMGQPLVILAPHAVEALVKQPPDRWLSNARMTHYQAMLLDTDRVQFGPVVALNPATLLPLPEKEAPHDCLEILAETHGTRPDLTDQPIPDADYTWYTDGSSFLQEGQRRAGAAVTTETEVIWARALPAGTSAQRAELIALTQALKMAEGKKLNVYTDSRYAFATAHVHGEIYRRRGWLTSEGREIKNKNEILALLKALFLPKRLSIIHCPGHQKGNSAEARGNRMADQAAREAAMKAVLETSTLLAGKRTADGSEFEKRTADGSEFESPKKKAKVE

SEQ ID NO: 1088 - protein, 2096 aa, synthetic construct
MPAAKRVKLDGGDKKYSIGLDIGTNSVGWAVITDEYKVPSKKFKVLGNTDRHSIKKNLIGALLFDSGETAEATRLKRTARRRYTRRKNRICYLQEIFSNEMAKVDDSFFHRLEESFLVEEDKKHERHPIFGNIVDEVAYHEKYPTIYHLRKKLVDSTDKADLRLIYLALAHMIKFRGHFLIEGDLNPDNSDVDKLFIQLVQTYNQLFEENPINASGVDAKAILSARLSKSRRLENLIAQLPGEKKNGLFGNLIALSLGLTPNFKSNFDLAEDAKLQLSKDTYDDDLDNLLAQIGDQYADLFLAAKNLSDAILLSDILRVNTEITKAPLSASMIKRYDEHHQDLTLLKALVRQQLPEKYKEIFFDQSKNGYAGYIDGGASQEEFYKFIKPILEKMDGTEELLVKLNREDLLRKQRTFDNGSIPHQIHLGELHAILRRQEDFYPFLKDNREKIEKILTFRIPYYVGPLARGNSRFAWMTRKSEETITPWNFEEVVDKGASAQSFIERMTNFDKNLPNEKVLPKHSLLYEYFTVYNELTKVKYVTEGMRKPAFLSGEQKKAIVDLLFKTNRKVTVKQLKEDYFKKIECFDSVEISGVEDRFNASLGTYHDLLKIIKDKDFLDNEENEDILEDIVLTLTLFEDREMIEERLKTYAHLFDDKVMKQLKRRRYTGWGRLSRKLINGIRDKQSGKTILDFLKSDGFANRNFMQLIHDDSLTFKEDIQKAQVSGQGDSLHEHIANLAGSPAIKKGILQTVKVVDELVKVMGRHKPENIVIEMARENQTTQKGQKNSRERMKRIEEGIKELGSQILKEHPVENTQLQNEKLYLYYLQNGRDMYVDQELDINRLSDYDVDHIVPQSFLKDDSIDNKVLTRSDKARGKSDNVPSEEVVKKMKNYWRQLLNAKLITQRKFDNLTKAERGGLSELDKAGFIKRQLVETRQITKHVAQILDSRMNTKYDENDKLIREVKVITLKSKLVSDFRKDFQFYKVREINNYHHAHDAYLNAVVGTALIKKYPKLESEFVYGDYKVYDVRKMIAKSEQEIGKATAKYFFYSNIMNFFKTEITLANGEIRKRPLIETNGETGEIVWDKGRDFATVRKVLSMPQVNIVKKTEVQTGGFSKESILPKRNSDKLIARKKDWDPKKYGGFDSPTVAYSVLVVAKVEKGKSKKLKSVKELLGITIMERSSFEKNPIDFLEAKGYKEVKKDLIIKLPKYSLFELENGRKRMLASAGELQKGNELALPSKYVNFLYLASHYEKLKGSPEDNEQKQLFVEQHKHYLDEIIEQISEFSKRVILADANLDKVLSAYNKHRDKPIREQAENIIHLFTLTNLGAPAAFKYFDTTIDRKRYTSTKEVLDATLIHQSITGLYETRIDLSQLGGDGGGGGEAAAKGSSGGTLNIEDEYRLHETSKEPDVPLGSTWLSDFPQAWAETGGMGLAVRQAPLIIPLKATSTPVSIKQYPMSQEARLGIKPHIQRLLDQGILVPCQSPWNTPLLPVKKPGTNDYRPVQDLREVNKRVEDIHPTVPNPYNLLSGLPPSHQWYTVLDLKDAFFCLRLHPTSQPLFAFEWRDPEMGISGQLTWTRLPQGFKNSPTLFNEALHRDLADFRIQHPDLILLQYVDDLLLAATSEQDCQRGTRALLQTLGNLGYRASAKKAQICQKQVKYLGYLLKEGQRWLTEARKETVMGQPTPKTPRQLREFLGKAGFCRLFIPGFAEMAAPLYPLTKPGTLFNWGPDQQKAYQEIKQALLTAPALGLPDLTKPFELFVDEKQGYAKGVLTQKLGPWRRPVAYLSKKLDPVAAGWPPCLRMVAAIAVLTKDAGKLTMGQPLVILAPHAVEALVKQPPDRWLSNARMTHYQAMLLDTDRVQFGPVVALNPATLLPLPEKEAPHDCLEILAETHGTRPDLTDQPIPDADYTWYTDGSSFLQEGQRRAGAAVTTETEVIWARALPAGTSAQRAELIALTQALKMAEGKKLNVYTDSRYAFATAHVHGEIYRRRGWLTSEGREIKNKNEILALLKALFLPKRLSIIHCPGHQKGNSAEARGNRMADQAAREAAMKAVLETSTLLAGKRTADGSEFEKRTADGSEFESPKKKAKVE

SEQ ID NO: 1089 - protein, 2094 aa, synthetic construct
MPAAKRVKLDGGDKKYSIGLDIGTNSVGWAVITDEYKVPSKKFKVLGNTDRHSIKKNLIGALLFDSGETAEATRLKRTARRRYTRRKNRICYLQEIFSNEMAKVDDSFFHRLEESFLVEEDKKHERHPIFGNIVDEVAYHEKYPTIYHLRKKLVDSTDKADLRLIYLALAHMIKFRGHFLIEGDLNPDNSDVDKLFIQLVQTYNQLFEENPINASGVDAKAILSARLSKSRRLENLIAQLPGEKKNGLFGNLIALSLGLTPNFKSNFDLAEDAKLQLSKDTYDDDLDNLLAQIGDQYADLFLAAKNLSDAILLSDILRVNTEITKAPLSASMIKRYDEHHQDLTLLKALVRQQLPEKYKEIFFDQSKNGYAGYIDGGASQEEFYKFIKPILEKMDGTEELLVKLNREDLLRKQRTFDNGSIPHQIHLGELHAILRRQEDFYPFLKDNREKIEKILTFRIPYYVGPLARGNSRFAWMTRKSEETITPWNFEEVVDKGASAQSFIERMTNFDKNLPNEKVLPKHSLLYEYFTVYNELTKVKYVTEGMRKPAFLSGEQKKAIVDLLFKTNRKVTVKQLKEDYFKKIECFDSVEISGVEDRFNASLGTYHDLLKIIKDKDFLDNEENEDILEDIVLTLTLFEDREMIEERLKTYAHLFDDKVMKQLKRRRYTGWGRLSRKLINGIRDKQSGKTILDFLKSDGFANRNFMQLIHDDSLTFKEDIQKAQVSGQGDSLHEHIANLAGSPAIKKGILQTVKVVDELVKVMGRHKPENIVIEMARENQTTQKGQKNSRERMKRIEEGIKELGSQILKEHPVENTQLQNEKLYLYYLQNGRDMYVDQELDINRLSDYDVDHIVPQSFLKDDSIDNKVLTRSDKARGKSDNVPSEEVVKKMKNYWRQLLNAKLITQRKFDNLTKAERGGLSELDKAGFIKRQLVETRQITKHVAQILDSRMNTKYDENDKLIREVKVITLKSKLVSDFRKDFQFYKVREINNYHHAHDAYLNAVVGTALIKKYPKLESEFVYGDYKVYDVRKMIAKSEQEIGKATAKYFFYSNIMNFFKTEITLANGEIRKRPLIETNGETGEIVWDKGRDFATVRKVLSMPQVNIVKKTEVQTGGFSKESILPKRNSDKLIARKKDWDPKKYGGFDSPTVAYSVLVVAKVEKGKSKKLKSVKELLGITIMERSSFEKNPIDFLEAKGYKEVKKDLIIKLPKYSLFELENGRKRMLASAGELQKGNELALPSKYVNFLYLASHYEKLKGSPEDNEQKQLFVEQHKHYLDEIIEQISEFSKRVILADANLDKVLSAYNKHRDKPIREQAENIIHLFTLTNLGAPAAFKYFDTTIDRKRYTSTKEVLDATLIHQSITGLYETRIDLSQLGGDGGGSSGSSGSSGGTLNIEDEYRLHETSKEPDVPLGSTWLSDFPQAWAETGGMGLAVRQAPLIIPLKATSTPVSIKQYPMSQEARLGIKPHIQRLLDQGILVPCQSPWNTPLLPVKKPGTNDYRPVQDLREVNKRVEDIHPTVPNPYNLLSGLPPSHQWYTVLDLKDAFFCLRLHPTSQPLFAFEWRDPEMGISGQLTWTRLPQGFKNSPTLFNEALHRDLADFRIQHPDLILLQYVDDLLLAATSEQDCQRGTRALLQTLGNLGYRASAKKAQICQKQVKYLGYLLKEGQRWLTEARKETVMGQPTPKTPRQLREFLGKAGFCRLFIPGFAEMAAPLYPLTKPGTLFNWGPDQQKAYQEIKQALLTAPALGLPDLTKPFELFVDEKQGYAKGVLTQKLGPWRRPVAYLSKKLDPVAAGWPPCLRMVAAIAVLTKDAGKLTMGQPLVILAPHAVEALVKQPPDRWLSNARMTHYQAMLLDTDRVQFGPVVALNPATLLPLPEKEAPHDCLEILAETHGTRPDLTDQPIPDADYTWYTDGSSFLQEGQRRAGAAVTTETEVIWARALPAGTSAQRAELIALTQALKMAEGKKLNVYTDSRYAFATAHVHGEIYRRRGWLTSEGREIKNKNEILALLKALFLPKRLSIIHCPGHQKGNSAEARGNRMADQAAREAAMKAVLETSTLLAGKRTADGSEFEKRTADGSEFESPKKKAKVE

SEQ ID NO: 1090 - protein, 2096 aa, synthetic construct
MPAAKRVKLDGGDKKYSIGLDIGTNSVGWAVITDEYKVPSKKFKVLGNTDRHSIKKNLIGALLFDSGETAEATRLKRTARRRYTRRKNRICYLQEIFSNEMAKVDDSFFHRLEESFLVEEDKKHERHPIFGNIVDEVAYHEKYPTIYHLRKKLVDSTDKADLRLIYLALAHMIKFRGHFLIEGDLNPDNSDVDKLFIQLVQTYNQLFEENPINASGVDAKAILSARLSKSRRLENLIAQLPGEKKNGLFGNLIALSLGLTPNFKSNFDLAEDAKLQLSKDTYDDDLDNLLAQIGDQYADLFLAAKNLSDAILLSDILRVNTEITKAPLSASMIKRYDEHHQDLTLLKALVRQQLPEKYKEIFFDQSKNGYAGYIDGGASQEEFYKFIKPILEKMDGTEELLVKLNREDLLRKQRTFDNGSIPHQIHLGELHAILRRQEDFYPFLKDNREKIEKILTFRIPYYVGPLARGNSRFAWMTRKSEETITPWNFEEVVDKGASAQSFIERMTNFDKNLPNEKVLPKHSLLYEYFTVYNELTKVKYVTEGMRKPAFLSGEQKKAIVDLLFKTNRKVTVKQLKEDYFKKIECFDSVEISGVEDRFNASLGTYHDLLKIIKDKDFLDNEENEDILEDIVLTLTLFEDREMIEERLKTYAHLFDDKVMKQLKRRRYTGWGRLSRKLINGIRDKQSGKTILDFLKSDGFANRNFMQLIHDDSLTFKEDIQKAQVSGQGDSLHEHIANLAGSPAIKKGILQTVKVVDELVKVMGRHKPENIVIEMARENQTTQKGQKNSRERMKRIEEGIKELGSQILKEHPVENTQLQNEKLYLYYLQNGRDMYVDQELDINRLSDYDVDHIVPQSFLKDDSIDNKVLTRSDKARGKSDNVPSEEVVKKMKNYWRQLLNAKLITQRKFDNLTKAERGGLSELDKAGFIKRQLVETRQITKHVAQILDSRMNTKYDENDKLIREVKVITLKSKLVSDFRKDFQFYKVREINNYHHAHDAYLNAVVGTALIKKYPKLESEFVYGDYKVYDVRKMIAKSEQEIGKATAKYFFYSNIMNFFKTEITLANGEIRKRPLIETNGETGEIVWDKGRDFATVRKVLSMPQVNIVKKTEVQTGGFSKESILPKRNSDKLIARKKDWDPKKYGGFDSPTVAYSVLVVAKVEKGKSKKLKSVKELLGITIMERSSFEKNPIDFLEAKGYKEVKKDLIIKLPKYSLFELENGRKRMLASAGELQKGNELALPSKYVNFLYLASHYEKLKGSPEDNEQKQLFVEQHKHYLDEIIEQISEFSKRVILADANLDKVLSAYNKHRDKPIREQAENIIHLFTLTNLGAPAAFKYFDTTIDRKRYTSTKEVLDATLIHQSITGLYETRIDLSQLGGDGGGGSPAPEAAAKGGTLNIEDEYRLHETSKEPDVPLGSTWLSDFPQAWAETGGMGLAVRQAPLIIPLKATSTPVSIKQYPMSQEARLGIKPHIQRLLDQGILVPCQSPWNTPLLPVKKPGTNDYRPVQDLREVNKRVEDIHPTVPNPYNLLSGLPPSHQWYTVLDLKDAFFCLRLHPTSQPLFAFEWRDPEMGISGQLTWTRLPQGFKNSPTLFNEALHRDLADFRIQHPDLILLQYVDDLLLAATSEQDCQRGTRALLQTLGNLGYRASAKKAQICQKQVKYLGYLLKEGQRWLTEARKETVMGQPTPKTPRQLREFLGKAGFCRLFIPGFAEMAAPLYPLTKPGTLFNWGPDQQKAYQEIKQALLTAPALGLPDLTKPFELFVDEKQGYAKGVLTQKLGPWRRPVAYLSKKLDPVAAGWPPCLRMVAAIAVLTKDAGKLTMGQPLVILAPHAVEALVKQPPDRWLSNARMTHYQAMLLDTDRVQFGPVVALNPATLLPLPEKEAPHDCLEILAETHGTRPDLTDQPIPDADYTWYTDGSSFLQEGQRRAGAAVTTETEVIWARALPAGTSAQRAELIALTQALKMAEGKKLNVYTDSRYAFATAHVHGEIYRRRGWLTSEGREIKNKNEILALLKALFLPKRLSIIHCPGHQKGNSAEARGNRMADQAAREAAMKAVLETSTLLAGKRTADGSEFEKRTADGSEFESPKKKAKVE

SEQ ID NO: 1091 - protein, 2096 aa, synthetic construct
MPAAKRVKLDGGDKKYSIGLDIGTNSVGWAVITDEYKVPSKKFKVLGNTDRHSIKKNLIGALLFDSGETAEATRLKRTARRRYTRRKNRICYLQEIFSNEMAKVDDSFFHRLEESFLVEEDKKHERHPIFGNIVDEVAYHEKYPTIYHLRKKLVDSTDKADLRLIYLALAHMIKFRGHFLIEGDLNPDNSDVDKLFIQLVQTYNQLFEENPINASGVDAKAILSARLSKSRRLENLIAQLPGEKKNGLFGNLIALSLGLTPNFKSNFDLAEDAKLQLSKDTYDDDLDNLLAQIGDQYADLFLAAKNLSDAILLSDILRVNTEITKAPLSASMIKRYDEHHQDLTLLKALVRQQLPEKYKEIFFDQSKNGYAGYIDGGASQEEFYKFIKPILEKMDGTEELLVKLNREDLLRKQRTFDNGSIPHQIHLGELHAILRRQEDFYPFLKDNREKIEKILTFRIPYYVGPLARGNSRFAWMTRKSEETITPWNFEEVVDKGASAQSFIERMTNFDKNLPNEKVLPKHSLLYEYFTVYNELTKVKYVTEGMRKPAFLSGEQKKAIVDLLFKTNRKVTVKQLKEDYFKKIECFDSVEISGVEDRFNASLGTYHDLLKIIKDKDFLDNEENEDILEDIVLTLTLFEDREMIEERLKTYAHLFDDKVMKQLKRRRYTGWGRLSRKLINGIRDKQSGKTILDFLKSDGFANRNFMQLIHDDSLTFKEDIQKAQVSGQGDSLHEHIANLAGSPAIKKGILQTVKVVDELVKVMGRHKPENIVIEMARENQTTQKGQKNSRERMKRIEEGIKELGSQILKEHPVENTQLQNEKLYLYYLQNGRDMYVDQELDINRLSDYDVDHIVPQSFLKDDSIDNKVLTRSDKARGKSDNVPSEEVVKKMKNYWRQLLNAKLITQRKFDNLTKAERGGLSELDKAGFIKRQLVETRQITKHVAQILDSRMNTKYDENDKLIREVKVITLKSKLVSDFRKDFQFYKVREINNYHHAHDAYLNAVVGTALIKKYPKLESEFVYGDYKVYDVRKMIAKSEQEIGKATAKYFFYSNIMNFFKTEITLANGEIRKRPLIETNGETGEIVWDKGRDFATVRKVLSMPQVNIVKKTEVQTGGFSKESILPKRNSDKLIARKKDWDPKKYGGFDSPTVAYSVLVVAKVEKGKSKKLKSVKELLGITIMERSSFEKNPIDFLEAKGYKEVKKDLIIKLPKYSLFELENGRKRMLASAGELQKGNELALPSKYVNFLYLASHYEKLKGSPEDNEQKQLFVEQHKHYLDEIIEQISEFSKRVILADANLDKVLSAYNKHRDKPIREQAENIIHLFTLTNLGAPAAFKYFDTTIDRKRYTSTKEVLDATLIHQSITGLYETRIDLSQLGGDGGEAAAKGGGGGSGGTLNIEDEYRLHETSKEPDVPLGSTWLSDFPQAWAETGGMGLAVRQAPLIIPLKATSTPVSIKQYPMSQEARLGIKPHIQRLLDQGILVPCQSPWNTPLLPVKKPGTNDYRPVQDLREVNKRVEDIHPTVPNPYNLLSGLPPSHQWYTVLDLKDAFFCLRLHPTSQPLFAFEWRDPEMGISGQLTWTRLPQGFKNSPTLFNEALHRDLADFRIQHPDLILLQYVDDLLLAATSEQDCQRGTRALLQTLGNLGYRASAKKAQICQKQVKYLGYLLKEGQRWLTEARKETVMGQPTPKTPRQLREFLGKAGFCRLFIPGFAEMAAPLYPLTKPGTLFNWGPDQQKAYQEIKQALLTAPALGLPDLTKPFELFVDEKQGYAKGVLTQKLGPWRRPVAYLSKKLDPVAAGWPPCLRMVAAIAVLTKDAGKLTMGQPLVILAPHAVEALVKQPPDRWLSNARMTHYQAMLLDTDRVQFGPVVALNPATLLPLPEKEAPHDCLEILAETHGTRPDLTDQPIPDADYTWYTDGSSFLQEGQRRAGAAVTTETEVIWARALPAGTSAQRAELIALTQALKMAEGKKLNVYTDSRYAFATAHVHGEIYRRRGWLTSEGREIKNKNEILALLKALFLPKRLSIIHCPGHQKGNSAEARGNRMADQAAREAAMKAVLETSTLLAGKRTADGSEFEKRTADGSEFESPKKKAKVE

SEQ ID NO: 1092 - protein, 2109 aa, synthetic construct
MPAAKRVKLDGGDKKYSIGLDIGTNSVGWAVITDEYKVPSKKFKVLGNTDRHSIKKNLIGALLFDSGETAEATRLKRTARRRYTRRKNRICYLQEIFSNEMAKVDDSFFHRLEESFLVEEDKKHERHPIFGNIVDEVAYHEKYPTIYHLRKKLVDSTDKADLRLIYLALAHMIKFRGHFLIEGDLNPDNSDVDKLFIQLVQTYNQLFEENPINASGVDAKAILSARLSKSRRLENLIAQLPGEKKNGLFGNLIALSLGLTPNFKSNFDLAEDAKLQLSKDTYDDDLDNLLAQIGDQYADLFLAAKNLSDAILLSDILRVNTEITKAPLSASMIKRYDEHHQDLTLLKALVRQQLPEKYKEIFFDQSKNGYAGYIDGGASQEEFYKFIKPILEKMDGTEELLVKLNREDLLRKQRTFDNGSIPHQIHLGELHAILRRQEDFYPFLKDNREKIEKILTFRIPYYVGPLARGNSRFAWMTRKSEETITPWNFEEVVDKGASAQSFIERMTNFDKNLPNEKVLPKHSLLYEYFTVYNELTKVKYVTEGMRKPAFLSGEQKKAIVDLLFKTNRKVTVKQLKEDYFKKIECFDSVEISGVEDRFNASLGTYHDLLKIIKDKDFLDNEENEDILEDIVLTLTLFEDREMIEERLKTYAHLFDDKVMKQLKRRRYTGWGRLSRKLINGIRDKQSGKTILDFLKSDGFANRNFMQLIHDDSLTFKEDIQKAQVSGQGDSLHEHIANLAGSPAIKKGILQTVKVVDELVKVMGRHKPENIVIEMARENQTTQKGQKNSRERMKRIEEGIKELGSQILKEHPVENTQLQNEKLYLYYLQNGRDMYVDQELDINRLSDYDVDHIVPQSFLKDDSIDNKVLTRSDKARGKSDNVPSEEVVKKMKNYWRQLLNAKLITQRKFDNLTKAERGGLSELDKAGFIKRQLVETRQITKHVAQILDSRMNTKYDENDKLIREVKVITLKSKLVSDFRKDFQFYKVREINNYHHAHDAYLNAVVGTALIKKYPKLESEFVYGDYKVYDVRKMIAKSEQEIGKATAKYFFYSNIMNFFKTEITLANGEIRKRPLIETNGETGEIVWDKGRDFATVRKVLSMPQVNIVKKTEVQTGGFSKESILPKRNSDKLIARKKDWDPKKYGGFDSPTVAYSVLVVAKVEKGKSKKLKSVKELLGITIMERSSFEKNPIDFLEAKGYKEVKKDLIIKLPKYSLFELENGRKRMLASAGELQKGNELALPSKYVNFLYLASHYEKLKGSPEDNEQKQLFVEQHKHYLDEIIEQISEFSKRVILADANLDKVLSAYNKHRDKPIREQAENIIHLFTLTNLGAPAAFKYFDTTIDRKRYTSTKEVLDATLIHQSITGLYETRIDLSQLGGDGGSGGSSGGSSGSETPGTSESATPESSGGSSGGSSGGVPWILKKPLELTIKLDLEEQQGTLLNNSILSKKGKEELKQLFEKYSALWQSWENQVGHRRIRPHKIATGTVKPTPQKQYHINPKAKPDIQIVINDLLKQGVLIQKESTMNTPVYPVPKPNGRWRMVLDYRAVNKVTPLIAVQNQHSYGILGSLFKGRYKTTIDLSNGFWAHPIVPEDYWITAFTWQGKQYCWTVLPQGFLNSPGLFNGDVVDLLQGIPNVEVYVDDVYISHDSEKEHLEYLDILFNRLKEAGYIISLKKSNIANSIVDFLGFQITNEGRGLTDTFKEKLENITAPTTLKQLQSILGLLNFARNFIPDFTELIAPLYALIPKSPKNYVPWQIEHSTTLETLITKLNGAEYLQGRKGDKTLIMKVNASYTTGYIRYYNEGEKKPISYVSIVFSKTELKFTELEKLLTTVHKGLLKALDLSMGQNIHVYSPIVSMQNIQKTPQTAKKALASRWLSWLSYLEDPRIRFFYDPQMPALKDLPAVDTGKDNKKHPSNFQHIFYTDGSAITSPTKEGHLNAGMGIVYFINKDGNLQKQQEWSISLGNHTAQFAEIAAFEFALKKCLPLGGNILVVTDSNYVAKAYNEELDVWASNGFVNNRKKPLKHISKWKSVADLKRLRPDVVVTHEPGHQKLDSSPHAYGNNLADQLATQASFKVHAGKRTADGSEFEKRTADGSEFESPKKKAKVE

SEQ ID NO: 1093 - protein, 2122 aa, synthetic construct
MPAAKRVKLDGGDKKYSIGLDIGTNSVGWAVITDEYKVPSKKFKVLGNTDRHSIKKNLIGALLFDSGETAEATRLKRTARRRYTRRKNRICYLQEIFSNEMAKVDDSFFHRLEESFLVEEDKKHERHPIFGNIVDEVAYHEKYPTIYHLRKKLVDSTDKADLRLIYLALAHMIKFRGHFLIEGDLNPDNSDVDKLFIQLVQTYNQLFEENPINASGVDAKAILSARLSKSRRLENLIAQLPGEKKNGLFGNLIALSLGLTPNFKSNFDLAEDAKLQLSKDTYDDDLDNLLAQIGDQYADLFLAAKNLSDAILLSDILRVNTEITKAPLSASMIKRYDEHHQDLTLLKALVRQQLPEKYKEIFFDQSKNGYAGYIDGGASQEEFYKFIKPILEKMDGTEELLVKLNREDLLRKQRTFDNGSIPHQIHLGELHAILRRQEDFYPFLKDNREKIEKILTFRIPYYVGPLARGNSRFAWMTRKSEETITPWNFEEVVDKGASAQSFIERMTNFDKNLPNEKVLPKHSLLYEYFTVYNELTKVKYVTEGMRKPAFLSGEQKKAIVDLLFKTNRKVTVKQLKEDYFKKIECFDSVEISGVEDRFNASLGTYHDLLKIIKDKDFLDNEENEDILEDIVLTLTLFEDREMIEERLKTYAHLFDDKVMKQLKRRRYTGWGRLSRKLINGIRDKQSGKTILDFLKSDGFANRNFMQLIHDDSLTFKEDIQKAQVSGQGDSLHEHIANLAGSPAIKKGILQTVKVVDELVKVMGRHKPENIVIEMARENQTTQKGQKNSRERMKRIEEGIKELGSQILKEHPVENTQLQNEKLYLYYLQNGRDMYVDQELDINRLSDYDVDHIVPQSFLKDDSIDNKVLTRSDKARGKSDNVPSEEVVKKMKNYWRQLLNAKLITQRKFDNLTKAERGGLSELDKAGFIKRQLVETRQITKHVAQILDSRMNTKYDENDKLIREVKVITLKSKLVSDFRKDFQFYKVREINNYHHAHDAYLNAVVGTALIKKYPKLESEFVYGDYKVYDVRKMIAKSEQEIGKATAKYFFYSNIMNFFKTEITLANGEIRKRPLIETNGETGEIVWDKGRDFATVRKVLSMPQVNIVKKTEVQTGGFSKESILPKRNSDKLIARKKDWDPKKYGGFDSPTVAYSVLVVAKVEKGKSKKLKSVKELLGITIMERSSFEKNPIDFLEAKGYKEVKKDLIIKLPKYSLFELENGRKRMLASAGELQKGNELALPSKYVNFLYLASHYEKLKGSPEDNEQKQLFVEQHKHYLDEIIEQISEFSKRVILADANLDKVLSAYNKHRDKPIREQAENIIHLFTLTNLGAPAAFKYFDTTIDRKRYTSTKEVLDATLIHQSITGLYETRIDLSQLGGDGGAEAAAKEAAAKEAAAKEAAAKALEAEAAAKEAAAKEAAAKEAAAKAGGVPWILKKPLELTIKLDLEEQQGTLLNNSILSKKGKEELKQLFEKYSALWQSWENQVGHRRIRPHKIATGTVKPTPQKQYHINPKAKPDIQIVINDLLKQGVLIQKESTMNTPVYPVPKPNGRWRMVLDYRAVNKVTPLIAVQNQHSYGILGSLFKGRYKTTIDLSNGFWAHPIVPEDYWITAFTWQGKQYCWTVLPQGFLNSPGLFNGDVVDLLQGIPNVEVYVDDVYISHDSEKEHLEYLDILFNRLKEAGYIISLKKSNIANSIVDFLGFQITNEGRGLTDTFKEKLENITAPTTLKQLQSILGLLNFARNFIPDFTELIAPLYALIPKSPKNYVPWQIEHSTTLETLITKLNGAEYLQGRKGDKTLIMKVNASYTTGYIRYYNEGEKKPISYVSIVFSKTELKFTELEKLLTTVHKGLLKALDLSMGQNIHVYSPIVSMQNIQKTPQTAKKALASRWLSWLSYLEDPRIRFFYDPQMPALKDLPAVDTGKDNKKHPSNFQHIFYTDGSAITSPTKEGHLNAGMGIVYFINKDGNLQKQQEWSISLGNHTAQFAEIAAFEFALKKCLPLGGNILVVTDSNYVAKAYNEELDVWASNGFVNNRKKPLKHISKWKSVADLKRLRPDVVVTHEPGHQKLDSSPHAYGNNLADQLATQASFKVHAGKRTADGSEFEKRTADGSEFESPKKKAKVE

SEQ ID NO: 1094 - protein, 2106 aa, synthetic construct
MPAAKRVKLDGGDKKYSIGLDIGTNSVGWAVITDEYKVPSKKFKVLGNTDRHSIKKNLIGALLFDSGETAEATRLKRTARRRYTRRKNRICYLQEIFSNEMAKVDDSFFHRLEESFLVEEDKKHERHPIFGNIVDEVAYHEKYPTIYHLRKKLVDSTDKADLRLIYLALAHMIKFRGHFLIEGDLNPDNSDVDKLFIQLVQTYNQLFEENPINASGVDAKAILSARLSKSRRLENLIAQLPGEKKNGLFGNLIALSLGLTPNFKSNFDLAEDAKLQLSKDTYDDDLDNLLAQIGDQYADLFLAAKNLSDAILLSDILRVNTEITKAPLSASMIKRYDEHHQDLTLLKALVRQQLPEKYKEIFFDQSKNGYAGYIDGGASQEEFYKFIKPILEKMDGTEELLVKLNREDLLRKQRTFDNGSIPHQIHLGELHAILRRQEDFYPFLKDNREKIEKILTFRIPYYVGPLARGNSRFAWMTRKSEETITPWNFEEVVDKGASAQSFIERMTNFDKNLPNEKVLPKHSLLYEYFTVYNELTKVKYVTEGMRKPAFLSGEQKKAIVDLLFKTNRKVTVKQLKEDYFKKIECFDSVEISGVEDRFNASLGTYHDLLKIIKDKDFLDNEENEDILEDIVLTLTLFEDREMIEERLKTYAHLFDDKVMKQLKRRRYTGWGRLSRKLINGIRDKQSGKTILDFLKSDGFANRNFMQLIHDDSLTFKEDIQKAQVSGQGDSLHEHIANLAGSPAIKKGILQTVKVVDELVKVMGRHKPENIVIEMARENQTTQKGQKNSRERMKRIEEGIKELGSQILKEHPVENTQLQNEKLYLYYLQNGRDMYVDQELDINRLSDYDVDHIVPQSFLKDDSIDNKVLTRSDKARGKSDNVPSEEVVKKMKNYWRQLLNAKLITQRKFDNLTKAERGGLSELDKAGFIKRQLVETRQITKHVAQILDSRMNTKYDENDKLIREVKVITLKSKLVSDFRKDFQFYKVREINNYHHAHDAYLNAVVGTALIKKYPKLESEFVYGDYKVYDVRKMIAKSEQEIGKATAKYFFYSNIMNFFKTEITLANGEIRKRPLIETNGETGEIVWDKGRDFATVRKVLSMPQVNIVKKTEVQTGGFSKESILPKRNSDKLIARKKDWDPKKYGGFDSPTVAYSVLVVAKVEKGKSKKLKSVKELLGITIMERSSFEKNPIDFLEAKGYKEVKKDLIIKLPKYSLFELENGRKRMLASAGELQKGNELALPSKYVNFLYLASHYEKLKGSPEDNEQKQLFVEQHKHYLDEIIEQISEFSKRVILADANLDKVLSAYNKHRDKPIREQAENIIHLFTLTNLGAPAAFKYFDTTIDRKRYTSTKEVLDATLIHQSITGLYETRIDLSQLGGDGGEAAAKEAAAKEAAAKEAAAKEAAAKEAAAKGGVPWILKKPLELTIKLDLEEQQGTLLNNSILSKKGKEELKQLFEKYSALWQSWENQVGHRRIRPHKIATGTVKPTPQKQYHINPKAKPDIQIVINDLLKQGVLIQKESTMNTPVYPVPKPNGRWRMVLDYRAVNKVTPLIAVQNQHSYGILGSLFKGRYKTTIDLSNGFWAHPIVPEDYWITAFTWQGKQYCWTVLPQGFLNSPGLFNGDVVDLLQGIPNVEVYVDDVYISHDSEKEHLEYLDILFNRLKEAGYIISLKKSNIANSIVDFLGFQITNEGRGLTDTFKEKLENITAPTTLKQLQSILGLLNFARNFIPDFTELIAPLYALIPKSPKNYVPWQIEHSTTLETLITKLNGAEYLQGRKGDKTLIMKVNASYTTGYIRYYNEGEKKPISYVSIVFSKTELKFTELEKLLTTVHKGLLKALDLSMGQNIHVYSPIVSMQNIQKTPQTAKKALASRWLSWLSYLEDPRIRFFYDPQMPALKDLPAVDTGKDNKKHPSNFQHIFYTDGSAITSPTKEGHLNAGMGIVYFINKDGNLQKQQEWSISLGNHTAQFAEIAAFEFALKKCLPLGGNILVVTDSNYVAKAYNEELDVWASNGFVNNRKKPLKHISKWKSVADLKRLRPDVVVTHEPGHQKLDSSPHAYGNNLADQLATQASFKVHAGKRTADGSEFEKRTADGSEFESPKKKAKVE

SEQ ID NO: 1095 - protein, 2094 aa, synthetic construct
MPAAKRVKLDGGDKKYSIGLDIGTNSVGWAVITDEYKVPSKKFKVLGNTDRHSIKKNLIGALLFDSGETAEATRLKRTARRRYTRRKNRICYLQEIFSNEMAKVDDSFFHRLEESFLVEEDKKHERHPIFGNIVDEVAYHEKYPTIYHLRKKLVDSTDKADLRLIYLALAHMIKFRGHFLIEGDLNPDNSDVDKLFIQLVQTYNQLFEENPINASGVDAKAILSARLSKSRRLENLIAQLPGEKKNGLFGNLIALSLGLTPNFKSNFDLAEDAKLQLSKDTYDDDLDNLLAQIGDQYADLFLAAKNLSDAILLSDILRVNTEITKAPLSASMIKRYDEHHQDLTLLKALVRQQLPEKYKEIFFDQSKNGYAGYIDGGASQEEFYKFIKPILEKMDGTEELLVKLNREDLLRKQRTFDNGSIPHQIHLGELHAILRRQEDFYPFLKDNREKIEKILTFRIPYYVGPLARGNSRFAWMTRKSEETITPWNFEEVVDKGASAQSFIERMTNFDKNLPNEKVLPKHSLLYEYFTVYNELTKVKYVTEGMRKPAFLSGEQKKAIVDLLFKTNRKVTVKQLKEDYFKKIECFDSVEISGVEDRFNASLGTYHDLLKIIKDKDFLDNEENEDILEDIVLTLTLFEDREMIEERLKTYAHLFDDKVMKQLKRRRYTGWGRLSRKLINGIRDKQSGKTILDFLKSDGFANRNFMQLIHDDSLTFKEDIQKAQVSGQGDSLHEHIANLAGSPAIKKGILQTVKVVDELVKVMGRHKPENIVIEMARENQTTQKGQKNSRERMKRIEEGIKELGSQILKEHPVENTQLQNEKLYLYYLQNGRDMYVDQELDINRLSDYDVDHIVPQSFLKDDSIDNKVLTRSDKARGKSDNVPSEEVVKKMKNYWRQLLNAKLITQRKFDNLTKAERGGLSELDKAGFIKRQLVETRQITKHVAQILDSRMNTKYDENDKLIREVKVITLKSKLVSDFRKDFQFYKVREINNYHHAHDAYLNAVVGTALIKKYPKLESEFVYGDYKVYDVRKMIAKSEQEIGKATAKYFFYSNIMNFFKTEITLANGEIRKRPLIETNGETGEIVWDKGRDFATVRKVLSMPQVNIVKKTEVQTGGFSKESILPKRNSDKLIARKKDWDPKKYGGFDSPTVAYSVLVVAKVEKGKSKKLKSVKELLGITIMERSSFEKNPIDFLEAKGYKEVKKDLIIKLPKYSLFELENGRKRMLASAGELQKGNELALPSKYVNFLYLASHYEKLKGSPEDNEQKQLFVEQHKHYLDEIIEQISEFSKRVILADANLDKVLSAYNKHRDKPIREQAENIIHLFTLTNLGAPAAFKYFDTTIDRKRYTSTKEVLDATLIHQSITGLYETRIDLSQLGGDGGGSSGSSGSSGSSGSSGSSGGVPWILKKPLELTIKLDLEEQQGTLLNNSILSKKGKEELKQLFEKYSALWQSWENQVGHRRIRPHKIATGTVKPTPQKQYHINPKAKPDIQIVINDLLKQGVLIQKESTMNTPVYPVPKPNGRWRMVLDYRAVNKVTPLIAVQNQHSYGILGSLFKGRYKTTIDLSNGFWAHPIVPEDYWITAFTWQGKQYCWTVLPQGFLNSPGLFNGDVVDLLQGIPNVEVYVDDVYISHDSEKEHLEYLDILFNRLKEAGYIISLKKSNIANSIVDFLGFQITNEGRGLTDTFKEKLENITAPTTLKQLQSILGLLNFARNFIPDFTELIAPLYALIPKSPKNYVPWQIEHSTTLETLITKLNGAEYLQGRKGDKTLIMKVNASYTTGYIRYYNEGEKKPISYVSIVFSKTELKFTELEKLLTTVHKGLLKALDLSMGQNIHVYSPIVSMQNIQKTPQTAKKALASRWLSWLSYLEDPRIRFFYDPQMPALKDLPAVDTGKDNKKHPSNFQHIFYTDGSAITSPTKEGHLNAGMGIVYFINKDGNLQKQQEWSISLGNHTAQFAEIAAFEFALKKCLPLGGNILVVTDSNYVAKAYNEELDVWASNGFVNNRKKPLKHISKWKSVADLKRLRPDVVVTHEPGHQKLDSSPHAYGNNLADQLATQASFKVHAGKRTADGSEFEKRTADGSEFESPKKKAKVE

SEQ ID NO: 1096 - protein, 2087 aa, synthetic construct
MPAAKRVKLDGGDKKYSIGLDIGTNSVGWAVITDEYKVPSKKFKVLGNTDRHSIKKNLIGALLFDSGETAEATRLKRTARRRYTRRKNRICYLQEIFSNEMAKVDDSFFHRLEESFLVEEDKKHERHPIFGNIVDEVAYHEKYPTIYHLRKKLVDSTDKADLRLIYLALAHMIKFRGHFLIEGDLNPDNSDVDKLFIQLVQTYNQLFEENPINASGVDAKAILSARLSKSRRLENLIAQLPGEKKNGLFGNLIALSLGLTPNFKSNFDLAEDAKLQLSKDTYDDDLDNLLAQIGDQYADLFLAAKNLSDAILLSDILRVNTEITKAPLSASMIKRYDEHHQDLTLLKALVRQQLPEKYKEIFFDQSKNGYAGYIDGGASQEEFYKFIKPILEKMDGTEELLVKLNREDLLRKQRTFDNGSIPHQIHLGELHAILRRQEDFYPFLKDNREKIEKILTFRIPYYVGPLARGNSRFAWMTRKSEETITPWNFEEVVDKGASAQSFIERMTNFDKNLPNEKVLPKHSLLYEYFTVYNELTKVKYVTEGMRKPAFLSGEQKKAIVDLLFKTNRKVTVKQLKEDYFKKIECFDSVEISGVEDRFNASLGTYHDLLKIIKDKDFLDNEENEDILEDIVLTLTLFEDREMIEERLKTYAHLFDDKVMKQLKRRRYTGWGRLSRKLINGIRDKQSGKTILDFLKSDGFANRNFMQLIHDDSLTFKEDIQKAQVSGQGDSLHEHIANLAGSPAIKKGILQTVKVVDELVKVMGRHKPENIVIEMARENQTTQKGQKNSRERMKRIEEGIKELGSQILKEHPVENTQLQNEKLYLYYLQNGRDMYVDQELDINRLSDYDVDHIVPQSFLKDDSIDNKVLTRSDKARGKSDNVPSEEVVKKMKNYWRQLLNAKLITQRKFDNLTKAERGGLSELDKAGFIKRQLVETRQITKHVAQILDSRMNTKYDENDKLIREVKVITLKSKLVSDFRKDFQFYKVREINNYHHAHDAYLNAVVGTALIKKYPKLESEFVYGDYKVYDVRKMIAKSEQEIGKATAKYFFYSNIMNFFKTEITLANGEIRKRPLIETNGETGEIVWDKGRDFATVRKVLSMPQVNIVKKTEVQTGGFSKESILPKRNSDKLIARKKDWDPKKYGGFDSPTVAYSVLVVAKVEKGKSKKLKSVKELLGITIMERSSFEKNPIDFLEAKGYKEVKKDLIIKLPKYSLFELENGRKRMLASAGELQKGNELALPSKYVNFLYLASHYEKLKGSPEDNEQKQLFVEQHKHYLDEIIEQISEFSKRVILADANLDKVLSAYNKHRDKPIREQAENIIHLFTLTNLGAPAAFKYFDTTIDRKRYTSTKEVLDATLIHQSITGLYETRIDLSQLGGDGGPAPGGGEAAAKGGVPWILKKPLELTIKLDLEEQQGTLLNNSILSKKGKEELKQLFEKYSALWQSWENQVGHRRIRPHKIATGTVKPTPQKQYHINPKAKPDIQIVINDLLKQGVLIQKESTMNTPVYPVPKPNGRWRMVLDYRAVNKVTPLIAVQNQHSYGILGSLFKGRYKTTIDLSNGFWAHPIVPEDYWITAFTWQGKQYCWTVLPQGFLNSPGLFNGDVVDLLQGIPNVEVYVDDVYISHDSEKEHLEYLDILFNRLKEAGYIISLKKSNIANSIVDFLGFQITNEGRGLTDTFKEKLENITAPTTLKQLQSILGLLNFARNFIPDFTELIAPLYALIPKSPKNYVPWQIEHSTTLETLITKLNGAEYLQGRKGDKTLIMKVNASYTTGYIRYYNEGEKKPISYVSIVFSKTELKFTELEKLLTTVHKGLLKALDLSMGQNIHVYSPIVSMQNIQKTPQTAKKALASRWLSWLSYLEDPRIRFFYDPQMPALKDLPAVDTGKDNKKHPSNFQHIFYTDGSAITSPTKEGHLNAGMGIVYFINKDGNLQKQQEWSISLGNHTAQFAEIAAFEFALKKCLPLGGNILVVTDSNYVAKAYNEELDVWASNGFVNNRKKPLKHISKWKSVADLKRLRPDVVVTHEPGHQKLDSSPHAYGNNLADQLATQASFKVHAGKRTADGSEFEKRTADGSEFESPKKKAKVE

SEQ ID NO: 1097 - protein, 2087 aa, synthetic construct
MPAAKRVKLDGGDKKYSIGLDIGTNSVGWAVITDEYKVPSKKFKVLGNTDRHSIKKNLIGALLFDSGETAEATRLKRTARRRYTRRKNRICYLQEIFSNEMAKVDDSFFHRLEESFLVEEDKKHERHPIFGNIVDEVAYHEKYPTIYHLRKKLVDSTDKADLRLIYLALAHMIKFRGHFLIEGDLNPDNSDVDKLFIQLVQTYNQLFEENPINASGVDAKAILSARLSKSRRLENLIAQLPGEKKNGLFGNLIALSLGLTPNFKSNFDLAEDAKLQLSKDTYDDDLDNLLAQIGDQYADLFLAAKNLSDAILLSDILRVNTEITKAPLSASMIKRYDEHHQDLTLLKALVRQQLPEKYKEIFFDQSKNGYAGYIDGGASQEEFYKFIKPILEKMDGTEELLVKLNREDLLRKQRTFDNGSIPHQIHLGELHAILRRQEDFYPFLKDNREKIEKILTFRIPYYVGPLARGNSRFAWMTRKSEETITPWNFEEVVDKGASAQSFIERMTNFDKNLPNEKVLPKHSLLYEYFTVYNELTKVKYVTEGMRKPAFLSGEQKKAIVDLLFKTNRKVTVKQLKEDYFKKIECFDSVEISGVEDRFNASLGTYHDLLKIIKDKDFLDNEENEDILEDIVLTLTLFEDREMIEERLKTYAHLFDDKVMKQLKRRRYTGWGRLSRKLINGIRDKQSGKTILDFLKSDGFANRNFMQLIHDDSLTFKEDIQKAQVSGQGDSLHEHIANLAGSPAIKKGILQTVKVVDELVKVMGRHKPENIVIEMARENQTTQKGQKNSRERMKRIEEGIKELGSQILKEHPVENTQLQNEKLYLYYLQNGRDMYVDQELDINRLSDYDVDHIVPQSFLKDDSIDNKVLTRSDKARGKSDNVPSEEVVKKMKNYWRQLLNAKLITQRKFDNLTKAERGGLSELDKAGFIKRQLVETRQITKHVAQILDSRMNTKYDENDKLIREVKVITLKSKLVSDFRKDFQFYKVREINNYHHAHDAYLNAVVGTALIKKYPKLESEFVYGDYKVYDVRKMIAKSEQEIGKATAKYFFYSNIMNFFKTEITLANGEIRKRPLIETNGETGEIVWDKGRDFATVRKVLSMPQVNIVKKTEVQTGGFSKESILPKRNSDKLIARKKDWDPKKYGGFDSPTVAYSVLVVAKVEKGKSKKLKSVKELLGITIMERSSFEKNPIDFLEAKGYKEVKKDLIIKLPKYSLFELENGRKRMLASAGELQKGNELALPSKYVNFLYLASHYEKLKGSPEDNEQKQLFVEQHKHYLDEIIEQISEFSKRVILADANLDKVLSAYNKHRDKPIREQAENIIHLFTLTNLGAPAAFKYFDTTIDRKRYTSTKEVLDATLIHQSITGLYETRIDLSQLGGDGGGGSEAAAKPAPGGVPWILKKPLELTIKLDLEEQQGTLLNNSILSKKGKEELKQLFEKYSALWQSWENQVGHRRIRPHKIATGTVKPTPQKQYHINPKAKPDIQIVINDLLKQGVLIQKESTMNTPVYPVPKPNGRWRMVLDYRAVNKVTPLIAVQNQHSYGILGSLFKGRYKTTIDLSNGFWAHPIVPEDYWITAFTWQGKQYCWTVLPQGFLNSPGLFNGDVVDLLQGIPNVEVYVDDVYISHDSEKEHLEYLDILFNRLKEAGYIISLKKSNIANSIVDFLGFQITNEGRGLTDTFKEKLENITAPTTLKQLQSILGLLNFARNFIPDFTELIAPLYALIPKSPKNYVPWQIEHSTTLETLITKLNGAEYLQGRKGDKTLIMKVNASYTTGYIRYYNEGEKKPISYVSIVFSKTELKFTELEKLLTTVHKGLLKALDLSMGQNIHVYSPIVSMQNIQKTPQTAKKALASRWLSWLSYLEDPRIRFFYDPQMPALKDLPAVDTGKDNKKHPSNFQHIFYTDGSAITSPTKEGHLNAGMGIVYFINKDGNLQKQQEWSISLGNHTAQFAEIAAFEFALKKCLPLGGNILVVTDSNYVAKAYNEELDVWASNGFVNNRKKPLKHISKWKSVADLKRLRPDVVVTHEPGHQKLDSSPHAYGNNLADQLATQASFKVHAGKRTADGSEFEKRTADGSEFESPKKKAKVE

SEQ ID NO: 1098 - protein, 2085 aa, synthetic construct
MPAAKRVKLDGGDKKYSIGLDIGTNSVGWAVITDEYKVPSKKFKVLGNTDRHSIKKNLIGALLFDSGETAEATRLKRTARRRYTRRKNRICYLQEIFSNEMAKVDDSFFHRLEESFLVEEDKKHERHPIFGNIVDEVAYHEKYPTIYHLRKKLVDSTDKADLRLIYLALAHMIKFRGHFLIEGDLNPDNSDVDKLFIQLVQTYNQLFEENPINASGVDAKAILSARLSKSRRLENLIAQLPGEKKNGLFGNLIALSLGLTPNFKSNFDLAEDAKLQLSKDTYDDDLDNLLAQIGDQYADLFLAAKNLSDAILLSDILRVNTEITKAPLSASMIKRYDEHHQDLTLLKALVRQQLPEKYKEIFFDQSKNGYAGYIDGGASQEEFYKFIKPILEKMDGTEELLVKLNREDLLRKQRTFDNGSIPHQIHLGELHAILRRQEDFYPFLKDNREKIEKILTFRIPYYVGPLARGNSRFAWMTRKSEETITPWNFEEVVDKGASAQSFIERMTNFDKNLPNEKVLPKHSLLYEYFTVYNELTKVKYVTEGMRKPAFLSGEQKKAIVDLLFKTNRKVTVKQLKEDYFKKIECFDSVEISGVEDRFNASLGTYHDLLKIIKDKDFLDNEENEDILEDIVLTLTLFEDREMIEERLKTYAHLFDDKVMKQLKRRRYTGWGRLSRKLINGIRDKQSGKTILDFLKSDGFANRNFMQLIHDDSLTFKEDIQKAQVSGQGDSLHEHIANLAGSPAIKKGILQTVKVVDELVKVMGRHKPENIVIEMARENQTTQKGQKNSRERMKRIEEGIKELGSQILKEHPVENTQLQNEKLYLYYLQNGRDMYVDQELDINRLSDYDVDHIVPQSFLKDDSIDNKVLTRSDKARGKSDNVPSEEVVKKMKNYWRQLLNAKLITQRKFDNLTKAERGGLSELDKAGFIKRQLVETRQITKHVAQILDSRMNTKYDENDKLIREVKVITLKSKLVSDFRKDFQFYKVREINNYHHAHDAYLNAVVGTALIKKYPKLESEFVYGDYKVYDVRKMIAKSEQEIGKATAKYFFYSNIMNFFKTEITLANGEIRKRPLIETNGETGEIVWDKGRDFATVRKVLSMPQVNIVKKTEVQTGGFSKESILPKRNSDKLIARKKDWDPKKYGGFDSPTVAYSVLVVAKVEKGKSKKLKSVKELLGITIMERSSFEKNPIDFLEAKGYKEVKKDLIIKLPKYSLFELENGRKRMLASAGELQKGNELALPSKYVNFLYLASHYEKLKGSPEDNEQKQLFVEQHKHYLDEIIEQISEFSKRVILADANLDKVLSAYNKHRDKPIREQAENIIHLFTLTNLGAPAAFKYFDTTIDRKRYTSTKEVLDATLIHQSITGLYETRIDLSQLGGDGGPAPGGSGGGGGVPWILKKPLELTIKLDLEEQQGTLLNNSILSKKGKEELKQLFEKYSALWQSWENQVGHRRIRPHKIATGTVKPTPQKQYHINPKAKPDIQIVINDLLKQGVLIQKESTMNTPVYPVPKPNGRWRMVLDYRAVNKVTPLIAVQNQHSYGILGSLFKGRYKTTIDLSNGFWAHPIVPEDYWITAFTWQGKQYCWTVLPQGFLNSPGLFNGDVVDLLQGIPNVEVYVDDVYISHDSEKEHLEYLDILFNRLKEAGYIISLKKSNIANSIVDFLGFQITNEGRGLTDTFKEKLENITAPTTLKQLQSILGLLNFARNFIPDFTELIAPLYALIPKSPKNYVPWQIEHSTTLETLITKLNGAEYLQGRKGDKTLIMKVNASYTTGYIRYYNEGEKKPISYVSIVFSKTELKFTELEKLLTTVHKGLLKALDLSMGQNIHVYSPIVSMQNIQKTPQTAKKALASRWLSWLSYLEDPRIRFFYDPQMPALKDLPAVDTGKDNKKHPSNFQHIFYTDGSAITSPTKEGHLNAGMGIVYFINKDGNLQKQQEWSISLGNHTAQFAEIAAFEFALKKCLPLGGNILVVTDSNYVAKAYNEELDVWASNGFVNNRKKPLKHISKWKSVADLKRLRPDVVVTHEPGHQKLDSSPHAYGNNLADQLATQASFKVHAGKRTADGSEFEKRTADGSEFESPKKKAKVE

SEQ ID NO: 1099 - protein, 2087 aa, synthetic construct
MPAAKRVKLDGGDKKYSIGLDIGTNSVGWAVITDEYKVPSKKFKVLGNTDRHSIKKNLIGALLFDSGETAEATRLKRTARRRYTRRKNRICYLQEIFSNEMAKVDDSFFHRLEESFLVEEDKKHERHPIFGNIVDEVAYHEKYPTIYHLRKKLVDSTDKADLRLIYLALAHMIKFRGHFLIEGDLNPDNSDVDKLFIQLVQTYNQLFEENPINASGVDAKAILSARLSKSRRLENLIAQLPGEKKNGLFGNLIALSLGLTPNFKSNFDLAEDAKLQLSKDTYDDDLDNLLAQIGDQYADLFLAAKNLSDAILLSDILRVNTEITKAPLSASMIKRYDEHHQDLTLLKALVRQQLPEKYKEIFFDQSKNGYAGYIDGGASQEEFYKFIKPILEKMDGTEELLVKLNREDLLRKQRTFDNGSIPHQIHLGELHAILRRQEDFYPFLKDNREKIEKILTFRIPYYVGPLARGNSRFAWMTRKSEETITPWNFEEVVDKGASAQSFIERMTNFDKNLPNEKVLPKHSLLYEYFTVYNELTKVKYVTEGMRKPAFLSGEQKKAIVDLLFKTNRKVTVKQLKEDYFKKIECFDSVEISGVEDRFNASLGTYHDLLKIIKDKDFLDNEENEDILEDIVLTLTLFEDREMIEERLKTYAHLFDDKVMKQLKRRRYTGWGRLSRKLINGIRDKQSGKTILDFLKSDGFANRNFMQLIHDDSLTFKEDIQKAQVSGQGDSLHEHIANLAGSPAIKKGILQTVKVVDELVKVMGRHKPENIVIEMARENQTTQKGQKNSRERMKRIEEGIKELGSQILKEHPVENTQLQNEKLYLYYLQNGRDMYVDQELDINRLSDYDVDHIVPQSFLKDDSIDNKVLTRSDKARGKSDNVPSEEVVKKMKNYWRQLLNAKLITQRKFDNLTKAERGGLSELDKAGFIKRQLVETRQITKHVAQILDSRMNTKYDENDKLIREVKVITLKSKLVSDFRKDFQFYKVREINNYHHAHDAYLNAVVGTALIKKYPKLESEFVYGDYKVYDVRKMIAKSEQEIGKATAKYFFYSNIMNFFKTEITLANGEIRKRPLIETNGETGEIVWDKGRDFATVRKVLSMPQVNIVKKTEVQTGGFSKESILPKRNSDKLIARKKDWDPKKYGGFDSPTVAYSVLVVAKVEKGKSKKLKSVKELLGITIMERSSFEKNPIDFLEAKGYKEVKKDLIIKLPKYSLFELENGRKRMLASAGELQKGNELALPSKYVNFLYLASHYEKLKGSPEDNEQKQLFVEQHKHYLDEIIEQISEFSKRVILADANLDKVLSAYNKHRDKPIREQAENIIHLFTLTNLGAPAAFKYFDTTIDRKRYTSTKEVLDATLIHQSITGLYETRIDLSQLGGDGGGGSPAPEAAAKGGVPWILKKPLELTIKLDLEEQQGTLLNNSILSKKGKEELKQLFEKYSALWQSWENQVGHRRIRPHKIATGTVKPTPQKQYHINPKAKPDIQIVINDLLKQGVLIQKESTMNTPVYPVPKPNGRWRMVLDYRAVNKVTPLIAVQNQHSYGILGSLFKGRYKTTIDLSNGFWAHPIVPEDYWITAFTWQGKQYCWTVLPQGFLNSPGLFNGDVVDLLQGIPNVEVYVDDVYISHDSEKEHLEYLDILFNRLKEAGYIISLKKSNIANSIVDFLGFQITNEGRGLTDTFKEKLENITAPTTLKQLQSILGLLNFARNFIPDFTELIAPLYALIPKSPKNYVPWQIEHSTTLETLITKLNGAEYLQGRKGDKTLIMKVNASYTTGYIRYYNEGEKKPISYVSIVFSKTELKFTELEKLLTTVHKGLLKALDLSMGQNIHVYSPIVSMQNIQKTPQTAKKALASRWLSWLSYLEDPRIRFFYDPQMPALKDLPAVDTGKDNKKHPSNFQHIFYTDGSAITSPTKEGHLNAGMGIVYFINKDGNLQKQQEWSISLGNHTAQFAEIAAFEFALKKCLPLGGNILVVTDSNYVAKAYNEELDVWASNGFVNNRKKPLKHISKWKSVADLKRLRPDVVVTHEPGHQKLDSSPHAYGNNLADQLATQASFKVHAGKRTADGSEFEKRTADGSEFESPKKKAKVE

SEQ ID NO: 1100 - protein, 2087 aa, synthetic construct
MPAAKRVKLDGGDKKYSIGLDIGTNSVGWAVITDEYKVPSKKFKVLGNTDRHSIKKNLIGALLFDSGETAEATRLKRTARRRYTRRKNRICYLQEIFSNEMAKVDDSFFHRLEESFLVEEDKKHERHPIFGNIVDEVAYHEKYPTIYHLRKKLVDSTDKADLRLIYLALAHMIKFRGHFLIEGDLNPDNSDVDKLFIQLVQTYNQLFEENPINASGVDAKAILSARLSKSRRLENLIAQLPGEKKNGLFGNLIALSLGLTPNFKSNFDLAEDAKLQLSKDTYDDDLDNLLAQIGDQYADLFLAAKNLSDAILLSDILRVNTEITKAPLSASMIKRYDEHHQDLTLLKALVRQQLPEKYKEIFFDQSKNGYAGYIDGGASQEEFYKFIKPILEKMDGTEELLVKLNREDLLRKQRTFDNGSIPHQIHLGELHAILRRQEDFYPFLKDNREKIEKILTFRIPYYVGPLARGNSRFAWMTRKSEETITPWNFEEVVDKGASAQSFIERMTNFDKNLPNEKVLPKHSLLYEYFTVYNELTKVKYVTEGMRKPAFLSGEQKKAIVDLLFKTNRKVTVKQLKEDYFKKIECFDSVEISGVEDRFNASLGTYHDLLKIIKDKDFLDNEENEDILEDIVLTLTLFEDREMIEERLKTYAHLFDDKVMKQLKRRRYTGWGRLSRKLINGIRDKQSGKTILDFLKSDGFANRNFMQLIHDDSLTFKEDIQKAQVSGQGDSLHEHIANLAGSPAIKKGILQTVKVVDELVKVMGRHKPENIVIEMARENQTTQKGQKNSRERMKRIEEGIKELGSQILKEHPVENTQLQNEKLYLYYLQNGRDMYVDQELDINRLSDYDVDHIVPQSFLKDDSIDNKVLTRSDKARGKSDNVPSEEVVKKMKNYWRQLLNAKLITQRKFDNLTKAERGGLSELDKAGFIKRQLVETRQITKHVAQILDSRMNTKYDENDKLIREVKVITLKSKLVSDFRKDFQFYKVREINNYHHAHDAYLNAVVGTALIKKYPKLESEFVYGDYKVYDVRKMIAKSEQEIGKATAKYFFYSNIMNFFKTEITLANGEIRKRPLIETNGETGEIVWDKGRDFATVRKVLSMPQVNIVKKTEVQTGGFSKESILPKRNSDKLIARKKDWDPKKYGGFDSPTVAYSVLVVAKVEKGKSKKLKSVKELLGITIMERSSFEKNPIDFLEAKGYKEVKKDLIIKLPKYSLFELENGRKRMLASAGELQKGNELALPSKYVNFLYLASHYEKLKGSPEDNEQKQLFVEQHKHYLDEIIEQISEFSKRVILADANLDKVLSAYNKHRDKPIREQAENIIHLFTLTNLGAPAAFKYFDTTIDRKRYTSTKEVLDATLIHQSITGLYETRIDLSQLGGDGGGSSEAAAKGGGGGVPWILKKPLELTIKLDLEEQQGTLLNNSILSKKGKEELKQLFEKYSALWQSWENQVGHRRIRPHKIATGTVKPTPQKQYHINPKAKPDIQIVINDLLKQGVLIQKESTMNTPVYPVPKPNGRWRMVLDYRAVNKVTPLIAVQNQHSYGILGSLFKGRYKTTIDLSNGFWAHPIVPEDYWITAFTWQGKQYCWTVLPQGFLNSPGLFNGDVVDLLQGIPNVEVYVDDVYISHDSEKEHLEYLDILFNRLKEAGYIISLKKSNIANSIVDFLGFQITNEGRGLTDTFKEKLENITAPTTLKQLQSILGLLNFARNFIPDFTELIAPLYALIPKSPKNYVPWQIEHSTTLETLITKLNGAEYLQGRKGDKTLIMKVNASYTTGYIRYYNEGEKKPISYVSIVFSKTELKFTELEKLLTTVHKGLLKALDLSMGQNIHVYSPIVSMQNIQKTPQTAKKALASRWLSWLSYLEDPRIRFFYDPQMPALKDLPAVDTGKDNKKHPSNFQHIFYTDGSAITSPTKEGHLNAGMGIVYFINKDGNLQKQQEWSISLGNHTAQFAEIAAFEFALKKCLPLGGNILVVTDSNYVAKAYNEELDVWASNGFVNNRKKPLKHISKWKSVADLKRLRPDVVVTHEPGHQKLDSSPHAYGNNLADQLATQASFKVHAGKRTADGSEFEKRTADGSEFESPKKKAKVE

SEQ ID NO: 1101 - protein, 2091 aa, synthetic construct
MPAAKRVKLDGGDKKYSIGLDIGTNSVGWAVITDEYKVPSKKFKVLGNTDRHSIKKNLIGALLFDSGETAEATRLKRTARRRYTRRKNRICYLQEIFSNEMAKVDDSFFHRLEESFLVEEDKKHERHPIFGNIVDEVAYHEKYPTIYHLRKKLVDSTDKADLRLIYLALAHMIKFRGHFLIEGDLNPDNSDVDKLFIQLVQTYNQLFEENPINASGVDAKAILSARLSKSRRLENLIAQLPGEKKNGLFGNLIALSLGLTPNFKSNFDLAEDAKLQLSKDTYDDDLDNLLAQIGDQYADLFLAAKNLSDAILLSDILRVNTEITKAPLSASMIKRYDEHHQDLTLLKALVRQQLPEKYKEIFFDQSKNGYAGYIDGGASQEEFYKFIKPILEKMDGTEELLVKLNREDLLRKQRTFDNGSIPHQIHLGELHAILRRQEDFYPFLKDNREKIEKILTFRIPYYVGPLARGNSRFAWMTRKSEETITPWNFEEVVDKGASAQSFIERMTNFDKNLPNEKVLPKHSLLYEYFTVYNELTKVKYVTEGMRKPAFLSGEQKKAIVDLLFKTNRKVTVKQLKEDYFKKIECFDSVEISGVEDRFNASLGTYHDLLKIIKDKDFLDNEENEDILEDIVLTLTLFEDREMIEERLKTYAHLFDDKVMKQLKRRRYTGWGRLSRKLINGIRDKQSGKTILDFLKSDGFANRNFMQLIHDDSLTFKEDIQKAQVSGQGDSLHEHIANLAGSPAIKKGILQTVKVVDELVKVMGRHKPENIVIEMARENQTTQKGQKNSRERMKRIEEGIKELGSQILKEHPVENTQLQNEKLYLYYLQNGRDMYVDQELDINRLSDYDVDHIVPQSFLKDDSIDNKVLTRSDKARGKSDNVPSEEVVKKMKNYWRQLLNAKLITQRKFDNLTKAERGGLSELDKAGFIKRQLVETRQITKHVAQILDSRMNTKYDENDKLIREVKVITLKSKLVSDFRKDFQFYKVREINNYHHAHDAYLNAVVGTALIKKYPKLESEFVYGDYKVYDVRKMIAKSEQEIGKATAKYFFYSNIMNFFKTEITLANGEIRKRPLIETNGETGEIVWDKGRDFATVRKVLSMPQVNIVKKTEVQTGGFSKESILPKRNSDKLIARKKDWDPKKYGGFDSPTVAYSVLVVAKVEKGKSKKLKSVKELLGITIMERSSFEKNPIDFLEAKGYKEVKKDLIIKLPKYSLFELENGRKRMLASAGELQKGNELALPSKYVNFLYLASHYEKLKGSPEDNEQKQLFVEQHKHYLDEIIEQISEFSKRVILADANLDKVLSAYNKHRDKPIREQAENIIHLFTLTNLGAPAAFKYFDTTIDRKRYTSTKEVLDATLIHQSITGLYETRIDLSQLGGDGGGSSGSSGSSGSSGSSGGVPWILKKPLELTIKLDLEEQQGTLLNNSILSKKGKEELKQLFEKYSALWQSWENQVGHRRIRPHKIATGTVKPTPQKQYHINPKAKPDIQIVINDLLKQGVLIQKESTMNTPVYPVPKPNGRWRMVLDYRAVNKVTPLIAVQNQHSYGILGSLFKGRYKTTIDLSNGFWAHPIVPEDYWITAFTWQGKQYCWTVLPQGFLNSPGLFNGDVVDLLQGIPNVEVYVDDVYISHDSEKEHLEYLDILFNRLKEAGYIISLKKSNIANSIVDFLGFQITNEGRGLTDTFKEKLENITAPTTLKQLQSILGLLNFARNFIPDFTELIAPLYALIPKSPKNYVPWQIEHSTTLETLITKLNGAEYLQGRKGDKTLIMKVNASYTTGYIRYYNEGEKKPISYVSIVFSKTELKFTELEKLLTTVHKGLLKALDLSMGQNIHVYSPIVSMQNIQKTPQTAKKALASRWLSWLSYLEDPRIRFFYDPQMPALKDLPAVDTGKDNKKHPSNFQHIFYTDGSAITSPTKEGHLNAGMGIVYFINKDGNLQKQQEWSISLGNHTAQFAEIAAFEFALKKCLPLGGNILVVTDSNYVAKAYNEELDVWASNGFVNNRKKPLKHISKWKSVADLKRLRPDVVVTHEPGHQKLDSSPHAYGNNLADQLATQASFKVHAGKRTADGSEFEKRTADGSEFESPKKKAKVE

SEQ ID NO: 1102 - protein, 2081 aa, synthetic construct
MPAAKRVKLDGGDKKYSIGLDIGTNSVGWAVITDEYKVPSKKFKVLGNTDRHSIKKNLIGALLFDSGETAEATRLKRTARRRYTRRKNRICYLQEIFSNEMAKVDDSFFHRLEESFLVEEDKKHERHPIFGNIVDEVAYHEKYPTIYHLRKKLVDSTDKADLRLIYLALAHMIKFRGHFLIEGDLNPDNSDVDKLFIQLVQTYNQLFEENPINASGVDAKAILSARLSKSRRLENLIAQLPGEKKNGLFGNLIALSLGLTPNFKSNFDLAEDAKLQLSKDTYDDDLDNLLAQIGDQYADLFLAAKNLSDAILLSDILRVNTEITKAPLSASMIKRYDEHHQDLTLLKALVRQQLPEKYKEIFFDQSKNGYAGYIDGGASQEEFYKFIKPILEKMDGTEELLVKLNREDLLRKQRTFDNGSIPHQIHLGELHAILRRQEDFYPFLKDNREKIEKILTFRIPYYVGPLARGNSRFAWMTRKSEETITPWNFEEVVDKGASAQSFIERMTNFDKNLPNEKVLPKHSLLYEYFTVYNELTKVKYVTEGMRKPAFLSGEQKKAIVDLLFKTNRKVTVKQLKEDYFKKIECFDSVEISGVEDRFNASLGTYHDLLKIIKDKDFLDNEENEDILEDIVLTLTLFEDREMIEERLKTYAHLFDDKVMKQLKRRRYTGWGRLSRKLINGIRDKQSGKTILDFLKSDGFANRNFMQLIHDDSLTFKEDIQKAQVSGQGDSLHEHIANLAGSPAIKKGILQTVKVVDELVKVMGRHKPENIVIEMARENQTTQKGQKNSRERMKRIEEGIKELGSQILKEHPVENTQLQNEKLYLYYLQNGRDMYVDQELDINRLSDYDVDHIVPQSFLKDDSIDNKVLTRSDKARGKSDNVPSEEVVKKMKNYWRQLLNAKLITQRKFDNLTKAERGGLSELDKAGFIKRQLVETRQITKHVAQILDSRMNTKYDENDKLIREVKVITLKSKLVSDFRKDFQFYKVREINNYHHAHDAYLNAVVGTALIKKYPKLESEFVYGDYKVYDVRKMIAKSEQEIGKATAKYFFYSNIMNFFKTEITLANGEIRKRPLIETNGETGEIVWDKGRDFATVRKVLSMPQVNIVKKTEVQTGGFSKESILPKRNSDKLIARKKDWDPKKYGGFDSPTVAYSVLVVAKVEKGKSKKLKSVKELLGITIMERSSFEKNPIDFLEAKGYKEVKKDLIIKLPKYSLFELENGRKRMLASAGELQKGNELALPSKYVNFLYLASHYEKLKGSPEDNEQKQLFVEQHKHYLDEIIEQISEFSKRVILADANLDKVLSAYNKHRDKPIREQAENIIHLFTLTNLGAPAAFKYFDTTIDRKRYTSTKEVLDATLIHQSITGLYETRIDLSQLGGDGGPAPAPGGVPWILKKPLELTIKLDLEEQQGTLLNNSILSKKGKEELKQLFEKYSALWQSWENQVGHRRIRPHKIATGTVKPTPQKQYHINPKAKPDIQIVINDLLKQGVLIQKESTMNTPVYPVPKPNGRWRMVLDYRAVNKVTPLIAVQNQHSYGILGSLFKGRYKTTIDLSNGFWAHPIVPEDYWITAFTWQGKQYCWTVLPQGFLNSPGLFNGDVVDLLQGIPNVEVYVDDVYISHDSEKEHLEYLDILFNRLKEAGYIISLKKSNIANSIVDFLGFQITNEGRGLTDTFKEKLENITAPTTLKQLQSILGLLNFARNFIPDFTELIAPLYALIPKSPKNYVPWQIEHSTTLETLITKLNGAEYLQGRKGDKTLIMKVNASYTTGYIRYYNEGEKKPISYVSIVFSKTELKFTELEKLLTTVHKGLLKALDLSMGQNIHVYSPIVSMQNIQKTPQTAKKALASRWLSWLSYLEDPRIRFFYDPQMPALKDLPAVDTGKDNKKHPSNFQHIFYTDGSAITSPTKEGHLNAGMGIVYFINKDGNLQKQQEWSISLGNHTAQFAEIAAFEFALKKCLPLGGNILVVTDSNYVAKAYNEELDVWASNGFVNNRKKPLKHISKWKSVADLKRLRPDVVVTHEPGHQKLDSSPHAYGNNLADQLATQASFKVHAGKRTADGSEFEKRTADGSEFESPKKKAKVE

SEQ ID NO: 1103 - protein, 2085 aa, synthetic construct
MPAAKRVKLDGGDKKYSIGLDIGTNSVGWAVITDEYKVPSKKFKVLGNTDRHSIKKNLIGALLFDSGETAEATRLKRTARRRYTRRKNRICYLQEIFSNEMAKVDDSFFHRLEESFLVEEDKKHERHPIFGNIVDEVAYHEKYPTIYHLRKKLVDSTDKADLRLIYLALAHMIKFRGHFLIEGDLNPDNSDVDKLFIQLVQTYNQLFEENPINASGVDAKAILSARLSKSRRLENLIAQLPGEKKNGLFGNLIALSLGLTPNFKSNFDLAEDAKLQLSKDTYDDDLDNLLAQIGDQYADLFLAAKNLSDAILLSDILRVNTEITKAPLSASMIKRYDEHHQDLTLLKALVRQQLPEKYKEIFFDQSKNGYAGYIDGGASQEEFYKFIKPILEKMDGTEELLVKLNREDLLRKQRTFDNGSIPHQIHLGELHAILRRQEDFYPFLKDNREKIEKILTFRIPYYVGPLARGNSRFAWMTRKSEETITPWNFEEVVDKGASAQSFIERMTNFDKNLPNEKVLPKHSLLYEYFTVYNELTKVKYVTEGMRKPAFLSGEQKKAIVDLLFKTNRKVTVKQLKEDYFKKIECFDSVEISGVEDRFNASLGTYHDLLKIIKDKDFLDNEENEDILEDIVLTLTLFEDREMIEERLKTYAHLFDDKVMKQLKRRRYTGWGRLSRKLINGIRDKQSGKTILDFLKSDGFANRNFMQLIHDDSLTFKEDIQKAQVSGQGDSLHEHIANLAGSPAIKKGILQTVKVVDELVKVMGRHKPENIVIEMARENQTTQKGQKNSRERMKRIEEGIKELGSQILKEHPVENTQLQNEKLYLYYLQNGRDMYVDQELDINRLSDYDVDHIVPQSFLKDDSIDNKVLTRSDKARGKSDNVPSEEVVKKMKNYWRQLLNAKLITQRKFDNLTKAERGGLSELDKAGFIKRQLVETRQITKHVAQILDSRMNTKYDENDKLIREVKVITLKSKLVSDFRKDFQFYKVREINNYHHAHDAYLNAVVGTALIKKYPKLESEFVYGDYKVYDVRKMIAKSEQEIGKATAKYFFYSNIMNFFKTEITLANGEIRKRPLIETNGETGEIVWDKGRDFATVRKVLSMPQVNIVKKTEVQTGGFSKESILPKRNSDKLIARKKDWDPKKYGGFDSPTVAYSVLVVAKVEKGKSKKLKSVKELLGITIMERSSFEKNPIDFLEAKGYKEVKKDLIIKLPKYSLFELENGRKRMLASAGELQKGNELALPSKYVNFLYLASHYEKLKGSPEDNEQKQLFVEQHKHYLDEIIEQISEFSKRVILADANLDKVLSAYNKHRDKPIREQAENIIHLFTLTNLGAPAAFKYFDTTIDRKRYTSTKEVLDATLIHQSITGLYETRIDLSQLGGDGGGSSGSSGSSGGVPWILKKPLELTIKLDLEEQQGTLLNNSILSKKGKEELKQLFEKYSALWQSWENQVGHRRIRPHKIATGTVKPTPQKQYHINPKAKPDIQIVINDLLKQGVLIQKESTMNTPVYPVPKPNGRWRMVLDYRAVNKVTPLIAVQNQHSYGILGSLFKGRYKTTIDLSNGFWAHPIVPEDYWITAFTWQGKQYCWTVLPQGFLNSPGLFNGDVVDLLQGIPNVEVYVDDVYISHDSEKEHLEYLDILFNRLKEAGYIISLKKSNIANSIVDFLGFQITNEGRGLTDTFKEKLENITAPTTLKQLQSILGLLNFARNFIPDFTELIAPLYALIPKSPKNYVPWQIEHSTTLETLITKLNGAEYLQGRKGDKTLIMKVNASYTTGYIRYYNEGEKKPISYVSIVFSKTELKFTELEKLLTTVHKGLLKALDLSMGQNIHVYSPIVSMQNIQKTPQTAKKALASRWLSWLSYLEDPRIRFFYDPQMPALKDLPAVDTGKDNKKHPSNFQHIFYTDGSAITSPTKEGHLNAGMGIVYFINKDGNLQKQQEWSISLGNHTAQFAEIAAFEFALKKCLPLGGNILVVTDSNYVAKAYNEELDVWASNGFVNNRKKPLKHISKWKSVADLKRLRPDVVVTHEPGHQKLDSSPHAYGNNLADQLATQASFKVHAGKRTADGSEFEKRTADGSEFESPKKKAKVE

SEQ ID NO: 1104 - protein, 2087 aa, synthetic construct
MPAAKRVKLDGGDKKYSIGLDIGTNSVGWAVITDEYKVPSKKFKVLGNTDRHSIKKNLIGALLFDSGETAEATRLKRTARRRYTRRKNRICYLQEIFSNEMAKVDDSFFHRLEESFLVEEDKKHERHPIFGNIVDEVAYHEKYPTIYHLRKKLVDSTDKADLRLIYLALAHMIKFRGHFLIEGDLNPDNSDVDKLFIQLVQTYNQLFEENPINASGVDAKAILSARLSKSRRLENLIAQLPGEKKNGLFGNLIALSLGLTPNFKSNFDLAEDAKLQLSKDTYDDDLDNLLAQIGDQYADLFLAAKNLSDAILLSDILRVNTEITKAPLSASMIKRYDEHHQDLTLLKALVRQQLPEKYKEIFFDQSKNGYAGYIDGGASQEEFYKFIKPILEKMDGTEELLVKLNREDLLRKQRTFDNGSIPHQIHLGELHAILRRQEDFYPFLKDNREKIEKILTFRIPYYVGPLARGNSRFAWMTRKSEETITPWNFEEVVDKGASAQSFIERMTNFDKNLPNEKVLPKHSLLYEYFTVYNELTKVKYVTEGMRKPAFLSGEQKKAIVDLLFKTNRKVTVKQLKEDYFKKIECFDSVEISGVEDRFNASLGTYHDLLKIIKDKDFLDNEENEDILEDIVLTLTLFEDREMIEERLKTYAHLFDDKVMKQLKRRRYTGWGRLSRKLINGIRDKQSGKTILDFLKSDGFANRNFMQLIHDDSLTFKEDIQKAQVSGQGDSLHEHIANLAGSPAIKKGILQTVKVVDELVKVMGRHKPENIVIEMARENQTTQKGQKNSRERMKRIEEGIKELGSQILKEHPVENTQLQNEKLYLYYLQNGRDMYVDQELDINRLSDYDVDHIVPQSFLKDDSIDNKVLTRSDKARGKSDNVPSEEVVKKMKNYWRQLLNAKLITQRKFDNLTKAERGGLSELDKAGFIKRQLVETRQITKHVAQILDSRMNTKYDENDKLIREVKVITLKSKLVSDFRKDFQFYKVREINNYHHAHDAYLNAVVGTALIKKYPKLESEFVYGDYKVYDVRKMIAKSEQEIGKATAKYFFYSNIMNFFKTEITLANGEIRKRPLIETNGETGEIVWDKGRDFATVRKVLSMPQVNIVKKTEVQTGGFSKESILPKRNSDKLIARKKDWDPKKYGGFDSPTVAYSVLVVAKVEKGKSKKLKSVKELLGITIMERSSFEKNPIDFLEAKGYKEVKKDLIIKLPKYSLFELENGRKRMLASAGELQKGNELALPSKYVNFLYLASHYEKLKGSPEDNEQKQLFVEQHKHYLDEIIEQISEFSKRVILADANLDKVLSAYNKHRDKPIREQAENIIHLFTLTNLGAPAAFKYFDTTIDRKRYTSTKEVLDATLIHQSITGLYETRIDLSQLGGDGGPAPGSSEAAAKGGVPWILKKPLELTIKLDLEEQQGTLLNNSILSKKGKEELKQLFEKYSALWQSWENQVGHRRIRPHKIATGTVKPTPQKQYHINPKAKPDIQIVINDLLKQGVLIQKESTMNTPVYPVPKPNGRWRMVLDYRAVNKVTPLIAVQNQHSYGILGSLFKGRYKTTIDLSNGFWAHPIVPEDYWITAFTWQGKQYCWTVLPQGFLNSPGLFNGDVVDLLQGIPNVEVYVDDVYISHDSEKEHLEYLDILFNRLKEAGYIISLKKSNIANSIVDFLGFQITNEGRGLTDTFKEKLENITAPTTLKQLQSILGLLNFARNFIPDFTELIAPLYALIPKSPKNYVPWQIEHSTTLETLITKLNGAEYLQGRKGDKTLIMKVNASYTTGYIRYYNEGEKKPISYVSIVFSKTELKFTELEKLLTTVHKGLLKALDLSMGQNIHVYSPIVSMQNIQKTPQTAKKALASRWLSWLSYLEDPRIRFFYDPQMPALKDLPAVDTGKDNKKHPSNFQHIFYTDGSAITSPTKEGHLNAGMGIVYFINKDGNLQKQQEWSISLGNHTAQFAEIAAFEFALKKCLPLGGNILVVTDSNYVAKAYNEELDVWASNGFVNNRKKPLKHISKWKSVADLKRLRPDVVVTHEPGHQKLDSSPHAYGNNLADQLATQASFKVHAGKRTADGSEFEKRTADGSEFESPKKKAKVE

SEQ ID NO: 1105 - protein, 2087 aa, synthetic construct
MPAAKRVKLDGGDKKYSIGLDIGTNSVGWAVITDEYKVPSKKFKVLGNTDRHSIKKNLIGALLFDSGETAEATRLKRTARRRYTRRKNRICYLQEIFSNEMAKVDDSFFHRLEESFLVEEDKKHERHPIFGNIVDEVAYHEKYPTIYHLRKKLVDSTDKADLRLIYLALAHMIKFRGHFLIEGDLNPDNSDVDKLFIQLVQTYNQLFEENPINASGVDAKAILSARLSKSRRLENLIAQLPGEKKNGLFGNLIALSLGLTPNFKSNFDLAEDAKLQLSKDTYDDDLDNLLAQIGDQYADLFLAAKNLSDAILLSDILRVNTEITKAPLSASMIKRYDEHHQDLTLLKALVRQQLPEKYKEIFFDQSKNGYAGYIDGGASQEEFYKFIKPILEKMDGTEELLVKLNREDLLRKQRTFDNGSIPHQIHLGELHAILRRQEDFYPFLKDNREKIEKILTFRIPYYVGPLARGNSRFAWMTRKSEETITPWNFEEVVDKGASAQSFIERMTNFDKNLPNEKVLPKHSLLYEYFTVYNELTKVKYVTEGMRKPAFLSGEQKKAIVDLLFKTNRKVTVKQLKEDYFKKIECFDSVEISGVEDRFNASLGTYHDLLKIIKDKDFLDNEENEDILEDIVLTLTLFEDREMIEERLKTYAHLFDDKVMKQLKRRRYTGWGRLSRKLINGIRDKQSGKTILDFLKSDGFANRNFMQLIHDDSLTFKEDIQKAQVSGQGDSLHEHIANLAGSPAIKKGILQTVKVVDELVKVMGRHKPENIVIEMARENQTTQKGQKNSRERMKRIEEGIKELGSQILKEHPVENTQLQNEKLYLYYLQNGRDMYVDQELDINRLSDYDVDHIVPQSFLKDDSIDNKVLTRSDKARGKSDNVPSEEVVKKMKNYWRQLLNAKLITQRKFDNLTKAERGGLSELDKAGFIKRQLVETRQITKHVAQILDSRMNTKYDENDKLIREVKVITLKSKLVSDFRKDFQFYKVREINNYHHAHDAYLNAVVGTALIKKYPKLESEFVYGDYKVYDVRKMIAKSEQEIGKATAKYFFYSNIMNFFKTEITLANGEIRKRPLIETNGETGEIVWDKGRDFATVRKVLSMPQVNIVKKTEVQTGGFSKESILPKRNSDKLIARKKDWDPKKYGGFDSPTVAYSVLVVAKVEKGKSKKLKSVKELLGITIMERSSFEKNPIDFLEAKGYKEVKKDLIIKLPKYSLFELENGRKRMLASAGELQKGNELALPSKYVNFLYLASHYEKLKGSPEDNEQKQLFVEQHKHYLDEIIEQISEFSKRVILADANLDKVLSAYNKHRDKPIREQAENIIHLFTLTNLGAPAAFKYFDTTIDRKRYTSTKEVLDATLIHQSITGLYETRIDLSQLGGDGGEAAAKPAPGGGGGVPWILKKPLELTIKLDLEEQQGTLLNNSILSKKGKEELKQLFEKYSALWQSWENQVGHRRIRPHKIATGTVKPTPQKQYHINPKAKPDIQIVINDLLKQGVLIQKESTMNTPVYPVPKPNGRWRMVLDYRAVNKVTPLIAVQNQHSYGILGSLFKGRYKTTIDLSNGFWAHPIVPEDYWITAFTWQGKQYCWTVLPQGFLNSPGLFNGDVVDLLQGIPNVEVYVDDVYISHDSEKEHLEYLDILFNRLKEAGYIISLKKSNIANSIVDFLGFQITNEGRGLTDTFKEKLENITAPTTLKQLQSILGLLNFARNFIPDFTELIAPLYALIPKSPKNYVPWQIEHSTTLETLITKLNGAEYLQGRKGDKTLIMKVNASYTTGYIRYYNEGEKKPISYVSIVFSKTELKFTELEKLLTTVHKGLLKALDLSMGQNIHVYSPIVSMQNIQKTPQTAKKALASRWLSWLSYLEDPRIRFFYDPQMPALKDLPAVDTGKDNKKHPSNFQHIFYTDGSAITSPTKEGHLNAGMGIVYFINKDGNLQKQQEWSISLGNHTAQFAEIAAFEFALKKCLPLGGNILVVTDSNYVAKAYNEELDVWASNGFVNNRKKPLKHISKWKSVADLKRLRPDVVVTHEPGHQKLDSSPHAYGNNLADQLATQASFKVHAGKRTADGSEFEKRTADGSEFESPKKKAKVE

SEQ ID NO: 1106 - protein, 2087 aa, synthetic construct
MPAAKRVKLDGGDKKYSIGLDIGTNSVGWAVITDEYKVPSKKFKVLGNTDRHSIKKNLIGALLFDSGETAEATRLKRTARRRYTRRKNRICYLQEIFSNEMAKVDDSFFHRLEESFLVEEDKKHERHPIFGNIVDEVAYHEKYPTIYHLRKKLVDSTDKADLRLIYLALAHMIKFRGHFLIEGDLNPDNSDVDKLFIQLVQTYNQLFEENPINASGVDAKAILSARLSKSRRLENLIAQLPGEKKNGLFGNLIALSLGLTPNFKSNFDLAEDAKLQLSKDTYDDDLDNLLAQIGDQYADLFLAAKNLSDAILLSDILRVNTEITKAPLSASMIKRYDEHHQDLTLLKALVRQQLPEKYKEIFFDQSKNGYAGYIDGGASQEEFYKFIKPILEKMDGTEELLVKLNREDLLRKQRTFDNGSIPHQIHLGELHAILRRQEDFYPFLKDNREKIEKILTFRIPYYVGPLARGNSRFAWMTRKSEETITPWNFEEVVDKGASAQSFIERMTNFDKNLPNEKVLPKHSLLYEYFTVYNELTKVKYVTEGMRKPAFLSGEQKKAIVDLLFKTNRKVTVKQLKEDYFKKIECFDSVEISGVEDRFNASLGTYHDLLKIIKDKDFLDNEENEDILEDIVLTLTLFEDREMIEERLKTYAHLFDDKVMKQLKRRRYTGWGRLSRKLINGIRDKQSGKTILDFLKSDGFANRNFMQLIHDDSLTFKEDIQKAQVSGQGDSLHEHIANLAGSPAIKKGILQTVKVVDELVKVMGRHKPENIVIEMARENQTTQKGQKNSRERMKRIEEGIKELGSQILKEHPVENTQLQNEKLYLYYLQNGRDMYVDQELDINRLSDYDVDHIVPQSFLKDDSIDNKVLTRSDKARGKSDNVPSEEVVKKMKNYWRQLLNAKLITQRKFDNLTKAERGGLSELDKAGFIKRQLVETRQITKHVAQILDSRMNTKYDENDKLIREVKVITLKSKLVSDFRKDFQFYKVREINNYHHAHDAYLNAVVGTALIKKYPKLESEFVYGDYKVYDVRKMIAKSEQEIGKATAKYFFYSNIMNFFKTEITLANGEIRKRPLIETNGETGEIVWDKGRDFATVRKVLSMPQVNIVKKTEVQTGGFSKESILPKRNSDKLIARKKDWDPKKYGGFDSPTVAYSVLVVAKVEKGKSKKLKSVKELLGITIMERSSFEKNPIDFLEAKGYKEVKKDLIIKLPKYSLFELENGRKRMLASAGELQKGNELALPSKYVNFLYLASHYEKLKGSPEDNEQKQLFVEQHKHYLDEIIEQISEFSKRVILADANLDKVLSAYNKHRDKPIREQAENIIHLFTLTNLGAPAAFKYFDTTIDRKRYTSTKEVLDATLIHQSITGLYETRIDLSQLGGDGGGGSGGGEAAAKGGVPWILKKPLELTIKLDLEEQQGTLLNNSILSKKGKEELKQLFEKYSALWQSWENQVGHRRIRPHKIATGTVKPTPQKQYHINPKAKPDIQIVINDLLKQGVLIQKESTMNTPVYPVPKPNGRWRMVLDYRAVNKVTPLIAVQNQHSYGILGSLFKGRYKTTIDLSNGFWAHPIVPEDYWITAFTWQGKQYCWTVLPQGFLNSPGLFNGDVVDLLQGIPNVEVYVDDVYISHDSEKEHLEYLDILFNRLKEAGYIISLKKSNIANSIVDFLGFQITNEGRGLTDTFKEKLENITAPTTLKQLQSILGLLNFARNFIPDFTELIAPLYALIPKSPKNYVPWQIEHSTTLETLITKLNGAEYLQGRKGDKTLIMKVNASYTTGYIRYYNEGEKKPISYVSIVFSKTELKFTELEKLLTTVHKGLLKALDLSMGQNIHVYSPIVSMQNIQKTPQTAKKALASRWLSWLSYLEDPRIRFFYDPQMPALKDLPAVDTGKDNKKHPSNFQHIFYTDGSAITSPTKEGHLNAGMGIVYFINKDGNLQKQQEWSISLGNHTAQFAEIAAFEFALKKCLPLGGNILVVTDSNYVAKAYNEELDVWASNGFVNNRKKPLKHISKWKSVADLKRLRPDVVVTHEPGHQKLDSSPHAYGNNLADQLATQASFKVHAGKRTADGSEFEKRTADGSEFESPKKKAKVE

SEQ ID NO: 1107 - protein, 2082 aa, synthetic construct
MPAAKRVKLDGGDKKYSIGLDIGTNSVGWAVITDEYKVPSKKFKVLGNTDRHSIKKNLIGALLFDSGETAEATRLKRTARRRYTRRKNRICYLQEIFSNEMAKVDDSFFHRLEESFLVEEDKKHERHPIFGNIVDEVAYHEKYPTIYHLRKKLVDSTDKADLRLIYLALAHMIKFRGHFLIEGDLNPDNSDVDKLFIQLVQTYNQLFEENPINASGVDAKAILSARLSKSRRLENLIAQLPGEKKNGLFGNLIALSLGLTPNFKSNFDLAEDAKLQLSKDTYDDDLDNLLAQIGDQYADLFLAAKNLSDAILLSDILRVNTEITKAPLSASMIKRYDEHHQDLTLLKALVRQQLPEKYKEIFFDQSKNGYAGYIDGGASQEEFYKFIKPILEKMDGTEELLVKLNREDLLRKQRTFDNGSIPHQIHLGELHAILRRQEDFYPFLKDNREKIEKILTFRIPYYVGPLARGNSRFAWMTRKSEETITPWNFEEVVDKGASAQSFIERMTNFDKNLPNEKVLPKHSLLYEYFTVYNELTKVKYVTEGMRKPAFLSGEQKKAIVDLLFKTNRKVTVKQLKEDYFKKIECFDSVEISGVEDRFNASLGTYHDLLKIIKDKDFLDNEENEDILEDIVLTLTLFEDREMIEERLKTYAHLFDDKVMKQLKRRRYTGWGRLSRKLINGIRDKQSGKTILDFLKSDGFANRNFMQLIHDDSLTFKEDIQKAQVSGQGDSLHEHIANLAGSPAIKKGILQTVKVVDELVKVMGRHKPENIVIEMARENQTTQKGQKNSRERMKRIEEGIKELGSQILKEHPVENTQLQNEKLYLYYLQNGRDMYVDQELDINRLSDYDVDHIVPQSFLKDDSIDNKVLTRSDKARGKSDNVPSEEVVKKMKNYWRQLLNAKLITQRKFDNLTKAERGGLSELDKAGFIKRQLVETRQITKHVAQILDSRMNTKYDENDKLIREVKVITLKSKLVSDFRKDFQFYKVREINNYHHAHDAYLNAVVGTALIKKYPKLESEFVYGDYKVYDVRKMIAKSEQEIGKATAKYFFYSNIMNFFKTEITLANGEIRKRPLIETNGETGEIVWDKGRDFATVRKVLSMPQVNIVKKTEVQTGGFSKESILPKRNSDKLIARKKDWDPKKYGGFDSPTVAYSVLVVAKVEKGKSKKLKSVKELLGITIMERSSFEKNPIDFLEAKGYKEVKKDLIIKLPKYSLFELENGRKRMLASAGELQKGNELALPSKYVNFLYLASHYEKLKGSPEDNEQKQLFVEQHKHYLDEIIEQISEFSKRVILADANLDKVLSAYNKHRDKPIREQAENIIHLFTLTNLGAPAAFKYFDTTIDRKRYTSTKEVLDATLIHQSITGLYETRIDLSQLGGDGGPAPGGSGGVPWILKKPLELTIKLDLEEQQGTLLNNSILSKKGKEELKQLFEKYSALWQSWENQVGHRRIRPHKIATGTVKPTPQKQYHINPKAKPDIQIVINDLLKQGVLIQKESTMNTPVYPVPKPNGRWRMVLDYRAVNKVTPLIAVQNQHSYGILGSLFKGRYKTTIDLSNGFWAHPIVPEDYWITAFTWQGKQYCWTVLPQGFLNSPGLFNGDVVDLLQGIPNVEVYVDDVYISHDSEKEHLEYLDILFNRLKEAGYIISLKKSNIANSIVDFLGFQITNEGRGLTDTFKEKLENITAPTTLKQLQSILGLLNFARNFIPDFTELIAPLYALIPKSPKNYVPWQIEHSTTLETLITKLNGAEYLQGRKGDKTLIMKVNASYTTGYIRYYNEGEKKPISYVSIVFSKTELKFTELEKLLTTVHKGLLKALDLSMGQNIHVYSPIVSMQNIQKTPQTAKKALASRWLSWLSYLEDPRIRFFYDPQMPALKDLPAVDTGKDNKKHPSNFQHIFYTDGSAITSPTKEGHLNAGMGIVYFINKDGNLQKQQEWSISLGNHTAQFAEIAAFEFALKKCLPLGGNILVVTDSNYVAKAYNEELDVWASNGFVNNRKKPLKHISKWKSVADLKRLRPDVVVTHEPGHQKLDSSPHAYGNNLADQLATQASFKVHAGKRTADGSEFEKRTADGSEFESPKKKAKVE

SEQ ID NO: 1108 - protein, 2084 aa, synthetic construct
MPAAKRVKLDGGDKKYSIGLDIGTNSVGWAVITDEYKVPSKKFKVLGNTDRHSIKKNLIGALLFDSGETAEATRLKRTARRRYTRRKNRICYLQEIFSNEMAKVDDSFFHRLEESFLVEEDKKHERHPIFGNIVDEVAYHEKYPTIYHLRKKLVDSTDKADLRLIYLALAHMIKFRGHFLIEGDLNPDNSDVDKLFIQLVQTYNQLFEENPINASGVDAKAILSARLSKSRRLENLIAQLPGEKKNGLFGNLIALSLGLTPNFKSNFDLAEDAKLQLSKDTYDDDLDNLLAQIGDQYADLFLAAKNLSDAILLSDILRVNTEITKAPLSASMIKRYDEHHQDLTLLKALVRQQLPEKYKEIFFDQSKNGYAGYIDGGASQEEFYKFIKPILEKMDGTEELLVKLNREDLLRKQRTFDNGSIPHQIHLGELHAILRRQEDFYPFLKDNREKIEKILTFRIPYYVGPLARGNSRFAWMTRKSEETITPWNFEEVVDKGASAQSFIERMTNFDKNLPNEKVLPKHSLLYEYFTVYNELTKVKYVTEGMRKPAFLSGEQKKAIVDLLFKTNRKVTVKQLKEDYFKKIECFDSVEISGVEDRFNASLGTYHDLLKIIKDKDFLDNEENEDILEDIVLTLTLFEDREMIEERLKTYAHLFDDKVMKQLKRRRYTGWGRLSRKLINGIRDKQSGKTILDFLKSDGFANRNFMQLIHDDSLTFKEDIQKAQVSGQGDSLHEHIANLAGSPAIKKGILQTVKVVDELVKVMGRHKPENIVIEMARENQTTQKGQKNSRERMKRIEEGIKELGSQILKEHPVENTQLQNEKLYLYYLQNGRDMYVDQELDINRLSDYDVDHIVPQSFLKDDSIDNKVLTRSDKARGKSDNVPSEEVVKKMKNYWRQLLNAKLITQRKFDNLTKAERGGLSELDKAGFIKRQLVETRQITKHVAQILDSRMNTKYDENDKLIREVKVITLKSKLVSDFRKDFQFYKVREINNYHHAHDAYLNAVVGTALIKKYPKLESEFVYGDYKVYDVRKMIAKSEQEIGKATAKYFFYSNIMNFFKTEITLANGEIRKRPLIETNGETGEIVWDKGRDFATVRKVLSMPQVNIVKKTEVQTGGFSKESILPKRNSDKLIARKKDWDPKKYGGFDSPTVAYSVLVVAKVEKGKSKKLKSVKELLGITIMERSSFEKNPIDFLEAKGYKEVKKDLIIKLPKYSLFELENGRKRMLASAGELQKGNELALPSKYVNFLYLASHYEKLKGSPEDNEQKQLFVEQHKHYLDEIIEQISEFSKRVILADANLDKVLSAYNKHRDKPIREQAENIIHLFTLTNLGAPAAFKYFDTTIDRKRYTSTKEVLDATLIHQSITGLYETRIDLSQLGGDGGGGGEAAAKGGVPWILKKPLELTIKLDLEEQQGTLLNNSILSKKGKEELKQLFEKYSALWQSWENQVGHRRIRPHKIATGTVKPTPQKQYHINPKAKPDIQIVINDLLKQGVLIQKESTMNTPVYPVPKPNGRWRMVLDYRAVNKVTPLIAVQNQHSYGILGSLFKGRYKTTIDLSNGFWAHPIVPEDYWITAFTWQGKQYCWTVLPQGFLNSPGLFNGDVVDLLQGIPNVEVYVDDVYISHDSEKEHLEYLDILFNRLKEAGYIISLKKSNIANSIVDFLGFQITNEGRGLTDTFKEKLENITAPTTLKQLQSILGLLNFARNFIPDFTELIAPLYALIPKSPKNYVPWQIEHSTTLETLITKLNGAEYLQGRKGDKTLIMKVNASYTTGYIRYYNEGEKKPISYVSIVFSKTELKFTELEKLLTTVHKGLLKALDLSMGQNIHVYSPIVSMQNIQKTPQTAKKALASRWLSWLSYLEDPRIRFFYDPQMPALKDLPAVDTGKDNKKHPSNFQHIFYTDGSAITSPTKEGHLNAGMGIVYFINKDGNLQKQQEWSISLGNHTAQFAEIAAFEFALKKCLPLGGNILVVTDSNYVAKAYNEELDVWASNGFVNNRKKPLKHISKWKSVADLKRLRPDVVVTHEPGHQKLDSSPHAYGNNLADQLATQASFKVHAGKRTADGSEFEKRTADGSEFESPKKKAKVE

SEQ ID NO: 1109 - protein, 2085 aa, synthetic construct
MPAAKRVKLDGGDKKYSIGLDIGTNSVGWAVITDEYKVPSKKFKVLGNTDRHSIKKNLIGALLFDSGETAEATRLKRTARRRYTRRKNRICYLQEIFSNEMAKVDDSFFHRLEESFLVEEDKKHERHPIFGNIVDEVAYHEKYPTIYHLRKKLVDSTDKADLRLIYLALAHMIKFRGHFLIEGDLNPDNSDVDKLFIQLVQTYNQLFEENPINASGVDAKAILSARLSKSRRLENLIAQLPGEKKNGLFGNLIALSLGLTPNFKSNFDLAEDAKLQLSKDTYDDDLDNLLAQIGDQYADLFLAAKNLSDAILLSDILRVNTEITKAPLSASMIKRYDEHHQDLTLLKALVRQQLPEKYKEIFFDQSKNGYAGYIDGGASQEEFYKFIKPILEKMDGTEELLVKLNREDLLRKQRTFDNGSIPHQIHLGELHAILRRQEDFYPFLKDNREKIEKILTFRIPYYVGPLARGNSRFAWMTRKSEETITPWNFEEVVDKGASAQSFIERMTNFDKNLPNEKVLPKHSLLYEYFTVYNELTKVKYVTEGMRKPAFLSGEQKKAIVDLLFKTNRKVTVKQLKEDYFKKIECFDSVEISGVEDRFNASLGTYHDLLKIIKDKDFLDNEENEDILEDIVLTLTLFEDREMIEERLKTYAHLFDDKVMKQLKRRRYTGWGRLSRKLINGIRDKQSGKTILDFLKSDGFANRNFMQLIHDDSLTFKEDIQKAQVSGQGDSLHEHIANLAGSPAIKKGILQTVKVVDELVKVMGRHKPENIVIEMARENQTTQKGQKNSRERMKRIEEGIKELGSQILKEHPVENTQLQNEKLYLYYLQNGRDMYVDQELDINRLSDYDVDHIVPQSFLKDDSIDNKVLTRSDKARGKSDNVPSEEVVKKMKNYWRQLLNAKLITQRKFDNLTKAERGGLSELDKAGFIKRQLVETRQITKHVAQILDSRMNTKYDENDKLIREVKVITLKSKLVSDFRKDFQFYKVREINNYHHAHDAYLNAVVGTALIKKYPKLESEFVYGDYKVYDVRKMIAKSEQEIGKATAKYFFYSNIMNFFKTEITLANGEIRKRPLIETNGETGEIVWDKGRDFATVRKVLSMPQVNIVKKTEVQTGGFSKESILPKRNSDKLIARKKDWDPKKYGGFDSPTVAYSVLVVAKVEKGKSKKLKSVKELLGITIMERSSFEKNPIDFLEAKGYKEVKKDLIIKLPKYSLFELENGRKRMLASAGELQKGNELALPSKYVNFLYLASHYEKLKGSPEDNEQKQLFVEQHKHYLDEIIEQISEFSKRVILADANLDKVLSAYNKHRDKPIREQAENIIHLFTLTNLGAPAAFKYFDTTIDRKRYTSTKEVLDATLIHQSITGLYETRIDLSQLGGDGGGGGGSSPAPGGVPWILKKPLELTIKLDLEEQQGTLLNNSILSKKGKEELKQLFEKYSALWQSWENQVGHRRIRPHKIATGTVKPTPQKQYHINPKAKPDIQIVINDLLKQGVLIQKESTMNTPVYPVPKPNGRWRMVLDYRAVNKVTPLIAVQNQHSYGILGSLFKGRYKTTIDLSNGFWAHPIVPEDYWITAFTWQGKQYCWTVLPQGFLNSPGLFNGDVVDLLQGIPNVEVYVDDVYISHDSEKEHLEYLDILFNRLKEAGYIISLKKSNIANSIVDFLGFQITNEGRGLTDTFKEKLENITAPTTLKQLQSILGLLNFARNFIPDFTELIAPLYALIPKSPKNYVPWQIEHSTTLETLITKLNGAEYLQGRKGDKTLIMKVNASYTTGYIRYYNEGEKKPISYVSIVFSKTELKFTELEKLLTTVHKGLLKALDLSMGQNIHVYSPIVSMQNIQKTPQTAKKALASRWLSWLSYLEDPRIRFFYDPQMPALKDLPAVDTGKDNKKHPSNFQHIFYTDGSAITSPTKEGHLNAGMGIVYFINKDGNLQKQQEWSISLGNHTAQFAEIAAFEFALKKCLPLGGNILVVTDSNYVAKAYNEELDVWASNGFVNNRKKPLKHISKWKSVADLKRLRPDVVVTHEPGHQKLDSSPHAYGNNLADQLATQASFKVHAGKRTADGSEFEKRTADGSEFESPKKKAKVE

SEQ ID NO: 1110 - protein, 2085 aa, synthetic construct
MPAAKRVKLDGGDKKYSIGLDIGTNSVGWAVITDEYKVPSKKFKVLGNTDRHSIKKNLIGALLFDSGETAEATRLKRTARRRYTRRKNRICYLQEIFSNEMAKVDDSFFHRLEESFLVEEDKKHERHPIFGNIVDEVAYHEKYPTIYHLRKKLVDSTDKADLRLIYLALAHMIKFRGHFLIEGDLNPDNSDVDKLFIQLVQTYNQLFEENPINASGVDAKAILSARLSKSRRLENLIAQLPGEKKNGLFGNLIALSLGLTPNFKSNFDLAEDAKLQLSKDTYDDDLDNLLAQIGDQYADLFLAAKNLSDAILLSDILRVNTEITKAPLSASMIKRYDEHHQDLTLLKALVRQQLPEKYKEIFFDQSKNGYAGYIDGGASQEEFYKFIKPILEKMDGTEELLVKLNREDLLRKQRTFDNGSIPHQIHLGELHAILRRQEDFYPFLKDNREKIEKILTFRIPYYVGPLARGNSRFAWMTRKSEETITPWNFEEVVDKGASAQSFIERMTNFDKNLPNEKVLPKHSLLYEYFTVYNELTKVKYVTEGMRKPAFLSGEQKKAIVDLLFKTNRKVTVKQLKEDYFKKIECFDSVEISGVEDRFNASLGTYHDLLKIIKDKDFLDNEENEDILEDIVLTLTLFEDREMIEERLKTYAHLFDDKVMKQLKRRRYTGWGRLSRKLINGIRDKQSGKTILDFLKSDGFANRNFMQLIHDDSLTFKEDIQKAQVSGQGDSLHEHIANLAGSPAIKKGILQTVKVVDELVKVMGRHKPENIVIEMARENQTTQKGQKNSRERMKRIEEGIKELGSQILKEHPVENTQLQNEKLYLYYLQNGRDMYVDQELDINRLSDYDVDHIVPQSFLKDDSIDNKVLTRSDKARGKSDNVPSEEVVKKMKNYWRQLLNAKLITQRKFDNLTKAERGGLSELDKAGFIKRQLVETRQITKHVAQILDSRMNTKYDENDKLIREVKVITLKSKLVSDFRKDFQFYKVREINNYHHAHDAYLNAVVGTALIKKYPKLESEFVYGDYKVYDVRKMIAKSEQEIGKATAKYFFYSNIMNFFKTEITLANGEIRKRPLIETNGETGEIVWDKGRDFATVRKVLSMPQVNIVKKTEVQTGGFSKESILPKRNSDKLIARKKDWDPKKYGGFDSPTVAYSVLVVAKVEKGKSKKLKSVKELLGITIMERSSFEKNPIDFLEAKGYKEVKKDLIIKLPKYSLFELENGRKRMLASAGELQKGNELALPSKYVNFLYLASHYEKLKGSPEDNEQKQLFVEQHKHYLDEIIEQISEFSKRVILADANLDKVLSAYNKHRDKPIREQAENIIHLFTLTNLGAPAAFKYFDTTIDRKRYTSTKEVLDATLIHQSITGLYETRIDLSQLGGDGGPAPGGSGSSGGVPWILKKPLELTIKLDLEEQQGTLLNNSILSKKGKEELKQLFEKYSALWQSWENQVGHRRIRPHKIATGTVKPTPQKQYHINPKAKPDIQIVINDLLKQGVLIQKESTMNTPVYPVPKPNGRWRMVLDYRAVNKVTPLIAVQNQHSYGILGSLFKGRYKTTIDLSNGFWAHPIVPEDYWITAFTWQGKQYCWTVLPQGFLNSPGLFNGDVVDLLQGIPNVEVYVDDVYISHDSEKEHLEYLDILFNRLKEAGYIISLKKSNIANSIVDFLGFQITNEGRGLTDTFKEKLENITAPTTLKQLQSILGKLNFARNFIPDFTELIAPLYALIPKSPKNYVPWQIEHSTTLETLITKLNGAEYLQGRKGDKTLIMKVNASYTTGYIRYYNEGEKKPISYVSIVFSKTELKFTELEKLLTTVHKGLLKALDLSMGQNIHVYSPIVSMQNIQKTPQTAKKALASRWLSWLSYLEDPRIRFFYDPQMPALKDLPAVDTGKDNKKHPSNFQHIFYTDGSAITSPTKEGHLNAGMGIVYFINKDGNLQKQQEWSISLGNHTAQFAEIAAFEFALKKCLPLGGNILVVTDSNYVAKAYNEELDVWASNGFVNNRKKPLKHISKWKSVADLKRLRPDVVVTHEPGHQKLDSSPHAYGNNLADQLATQASFKVHAGKRTADGSEFEKRTADGSEFESPKKKAKVE

SEQ ID NO: 1111 - protein, 2087 aa, synthetic construct
MPAAKRVKLDGGDKKYSIGLDIGTNSVGWAVITDEYKVPSKKFKVLGNTDRHSIKKNLIGALLFDSGETAEATRLKRTARRRYTRRKNRICYLQEIFSNEMAKVDDSFFHRLEESFLVEEDKKHERHPIFGNIVDEVAYHEKYPTIYHLRKKLVDSTDKADLRLIYLALAHMIKFRGHFLIEGDLNPDNSDVDKLFIQLVQTYNQLFEENPINASGVDAKAILSARLSKSRRLENLIAQLPGEKKNGLFGNLIALSLGLTPNFKSNFDLAEDAKLQLSKDTYDDDLDNLLAQIGDQYADLFLAAKNLSDAILLSDILRVNTEITKAPLSASMIKRYDEHHQDLTLLKALVRQQLPEKYKEIFFDQSKNGYAGYIDGGASQEEFYKFIKPILEKMDGTEELLVKLNREDLLRKQRTFDNGSIPHQIHLGELHAILRRQEDFYPFLKDNREKIEKILTFRIPYYVGPLARGNSRFAWMTRKSEETITPWNFEEVVDKGASAQSFIERMTNFDKNLPNEKVLPKHSLLYEYFTVYNELTKVKYVTEGMRKPAFLSGEQKKAIVDLLFKTNRKVTVKQLKEDYFKKIECFDSVEISGVEDRFNASLGTYHDLLKIIKDKDFLDNEENEDILEDIVLTLTLFEDREMIEERLKTYAHLFDDKVMKQLKRRRYTGWGRLSRKLINGIRDKQSGKTILDFLKSDGFANRNFMQLIHDDSLTFKEDIQKAQVSGQGDSLHEHIANLAGSPAIKKGILQTVKVVDELVKVMGRHKPENIVIEMARENQTTQKGQKNSRERMKRIEEGIKELGSQILKEHPVENTQLQNEKLYLYYLQNGRDMYVDQELDINRLSDYDVDHIVPQSFLKDDSIDNKVLTRSDKARGKSDNVPSEEVVKKMKNYWRQLLNAKLITQRKFDNLTKAERGGLSELDKAGFIKRQLVETRQITKHVAQILDSRMNTKYDENDKLIREVKVITLKSKLVSDFRKDFQFYKVREINNYHHAHDAYLNAVVGTALIKKYPKLESEFVYGDYKVYDVRKMIAKSEQEIGKATAKYFFYSNIMNFFKTEITLANGEIRKRPLIETNGETGEIVWDKGRDFATVRKVLSMPQVNIVKKTEVQTGGFSKESILPKRNSDKLIARKKDWDPKKYGGFDSPTVAYSVLVVAKVEKGKSKKLKSVKELLGITIMERSSFEKNPIDFLEAKGYKEVKKDLIIKLPKYSLFELENGRKRMLASAGELQKGNELALPSKYVNFLYLASHYEKLKGSPEDNEQKQLFVEQHKHYLDEIIEQISEFSKRVILADANLDKVLSAYNKHRDKPIREQAENIIHLFTLTNLGAPAAFKYFDTTIDRKRYTSTKEVLDATLIHQSITGLYETRIDLSQLGGDGGGSSEAAAKGGGGGVPWILKKPLELTIKLDLEEQQGTLLNNSILSKKGKEELKQLFEKYSALWQSWENQVGHRRIRPHKIATGTVKPTPQKQYHINPKAKPDIQIVINDLLKQGVLIQKESTMNTPVYPVPKPNGRWRMVLDYRAVNKVTPLIAVQNQHSYGILGSLFKGRYKTTIDLSNGFWAHPIVPEDYWITAFTWQGKQYCWTVLPQGFLNSPGLFNGDVVDLLQGIPNVEVYVDDVYISHDSEKEHLEYLDILFNRLKEAGYIISLKKSNIANSIVDFLGFQITNEGRGLTDTFKEKLENITAPTTLKQLQSILGKLNFARNFIPDFTELIAPLYALIPKSPKNYVPWQIEHSTTLETLITKLNGAEYLQGRKGDKTLIMKVNASYTTGYIRYYNEGEKKPISYVSIVFSKTELKFTELEKLLTTVHKGLLKALDLSMGQNIHVYSPIVSMQNIQKTPQTAKKALASRWLSWLSYLEDPRIRFFYDPQMPALKDLPAVDTGKDNKKHPSNFQHIFYTDGSAITSPTKEGHLNAGMGIVYFINKDGNLQKQQEWSISLGNHTAQFAEIAAFEFALKKCLPLGGNILVVTDSNYVAKAYNEELDVWASNGFVNNRKKPLKHISKWKSVADLKRLRPDVVVTHEPGHQKLDSSPHAYGNNLADQLATQASFKVHAGKRTADGSEFEKRTADGSEFESPKKKAKVE

SEQ ID NO: 1112 - protein, 2091 aa, synthetic construct
MPAAKRVKLDGGDKKYSIGLDIGTNSVGWAVITDEYKVPSKKFKVLGNTDRHSIKKNLIGALLFDSGETAEATRLKRTARRRYTRRKNRICYLQEIFSNEMAKVDDSFFHRLEESFLVEEDKKHERHPIFGNIVDEVAYHEKYPTIYHLRKKLVDSTDKADLRLIYLALAHMIKFRGHFLIEGDLNPDNSDVDKLFIQLVQTYNQLFEENPINASGVDAKAILSARLSKSRRLENLIAQLPGEKKNGLFGNLIALSLGLTPNFKSNFDLAEDAKLQLSKDTYDDDLDNLLAQIGDQYADLFLAAKNLSDAILLSDILRVNTEITKAPLSASMIKRYDEHHQDLTLLKALVRQQLPEKYKEIFFDQSKNGYAGYIDGGASQEEFYKFIKPILEKMDGTEELLVKLNREDLLRKQRTFDNGSIPHQIHLGELHAILRRQEDFYPFLKDNREKIEKILTFRIPYYVGPLARGNSRFAWMTRKSEETITPWNFEEVVDKGASAQSFIERMTNFDKNLPNEKVLPKHSLLYEYFTVYNELTKVKYVTEGMRKPAFLSGEQKKAIVDLLFKTNRKVTVKQLKEDYFKKIECFDSVEISGVEDRFNASLGTYHDLLKIIKDKDFLDNEENEDILEDIVLTLTLFEDREMIEERLKTYAHLFDDKVMKQLKRRRYTGWGRLSRKLINGIRDKQSGKTILDFLKSDGFANRNFMQLIHDDSLTFKEDIQKAQVSGQGDSLHEHIANLAGSPAIKKGILQTVKVVDELVKVMGRHKPENIVIEMARENQTTQKGQKNSRERMKRIEEGIKELGSQILKEHPVENTQLQNEKLYLYYLQNGRDMYVDQELDINRLSDYDVDHIVPQSFLKDDSIDNKVLTRSDKARGKSDNVPSEEVVKKMKNYWRQLLNAKLITQRKFDNLTKAERGGLSELDKAGFIKRQLVETRQITKHVAQILDSRMNTKYDENDKLIREVKVITLKSKLVSDFRKDFQFYKVREINNYHHAHDAYLNAVVGTALIKKYPKLESEFVYGDYKVYDVRKMIAKSEQEIGKATAKYFFYSNIMNFFKTEITLANGEIRKRPLIETNGETGEIVWDKGRDFATVRKVLSMPQVNIVKKTEVQTGGFSKESILPKRNSDKLIARKKDWDPKKYGGFDSPTVAYSVLVVAKVEKGKSKKLKSVKELLGITIMERSSFEKNPIDFLEAKGYKEVKKDLIIKLPKYSLFELENGRKRMLASAGELQKGNELALPSKYVNFLYLASHYEKLKGSPEDNEQKQLFVEQHKHYLDEIIEQISEFSKRVILADANLDKVLSAYNKHRDKPIREQAENIIHLFTLTNLGAPAAFKYFDTTIDRKRYTSTKEVLDATLIHQSITGLYETRIDLSQLGGDGGGSSGSSGSSGSSGSSGGVPWILKKPLELTIKLDLEEQQGTLLNNSILSKKGKEELKQLFEKYSALWQSWENQVGHRRIRPHKIATGTVKPTPQKQYHINPKAKPDIQIVINDLLKQGVLIQKESTMNTPVYPVPKPNGRWRMVLDYRAVNKVTPLIAVQNQHSYGILGSLFKGRYKTTIDLSNGFWAHPIVPEDYWITAFTWQGKQYCWTVLPQGFLNSPGLFNGDVVDLLQGIPNVEVYVDDVYISHDSEKEHLEYLDILFNRLKEAGYIISLKKSNIANSIVDFLGFQITNEGRGLTDTFKEKLENITAPTTLKQLQSILGKLNFARNFIPDFTELIAPLYALIPKSPKNYVPWQIEHSTTLETLITKLNGAEYLQGRKGDKTLIMKVNASYTTGYIRYYNEGEKKPISYVSIVFSKTELKFTELEKLLTTVHKGLLKALDLSMGQNIHVYSPIVSMQNIQKTPQTAKKALASRWLSWLSYLEDPRIRFFYDPQMPALKDLPAVDTGKDNKKHPSNFQHIFYTDGSAITSPTKEGHLNAGMGIVYFINKDGNLQKQQEWSISLGNHTAQFAEIAAFEFALKKCLPLGGNILVVTDSNYVAKAYNEELDVWASNGFVNNRKKPLKHISKWKSVADLKRLRPDVVVTHEPGHQKLDSSPHAYGNNLADQLATQASFKVHAGKRTADGSEFEKRTADGSEFESPKKKAKVE

SEQ ID NO: 1113 - protein, 2087 aa, synthetic construct
MPAAKRVKLDGGDKKYSIGLDIGTNSVGWAVITDEYKVPSKKFKVLGNTDRHSIKKNLIGALLFDSGETAEATRLKRTARRRYTRRKNRICYLQEIFSNEMAKVDDSFFHRLEESFLVEEDKKHERHPIFGNIVDEVAYHEKYPTIYHLRKKLVDSTDKADLRLIYLALAHMIKFRGHFLIEGDLNPDNSDVDKLFIQLVQTYNQLFEENPINASGVDAKAILSARLSKSRRLENLIAQLPGEKKNGLFGNLIALSLGLTPNFKSNFDLAEDAKLQLSKDTYDDDLDNLLAQIGDQYADLFLAAKNLSDAILLSDILRVNTEITKAPLSASMIKRYDEHHQDLTLLKALVRQQLPEKYKEIFFDQSKNGYAGYIDGGASQEEFYKFIKPILEKMDGTEELLVKLNREDLLRKQRTFDNGSIPHQIHLGELHAILRRQEDFYPFLKDNREKIEKILTFRIPYYVGPLARGNSRFAWMTRKSEETITPWNFEEVVDKGASAQSFIERMTNFDKNLPNEKVLPKHSLLYEYFTVYNELTKVKYVTEGMRKPAFLSGEQKKAIVDLLFKTNRKVTVKQLKEDYFKKIECFDSVEISGVEDRFNASLGTYHDLLKIIKDKDFLDNEENEDILEDIVLTLTLFEDREMIEERLKTYAHLFDDKVMKQLKRRRYTGWGRLSRKLINGIRDKQSGKTILDFLKSDGFANRNFMQLIHDDSLTFKEDIQKAQVSGQGDSLHEHIANLAGSPAIKKGILQTVKVVDELVKVMGRHKPENIVIEMARENQTTQKGQKNSRERMKRIEEGIKELGSQILKEHPVENTQLQNEKLYLYYLQNGRDMYVDQELDINRLSDYDVDHIVPQSFLKDDSIDNKVLTRSDKARGKSDNVPSEEVVKKMKNYWRQLLNAKLITQRKFDNLTKAERGGLSELDKAGFIKRQLVETRQITKHVAQILDSRMNTKYDENDKLIREVKVITLKSKLVSDFRKDFQFYKVREINNYHHAHDAYLNAVVGTALIKKYPKLESEFVYGDYKVYDVRKMIAKSEQEIGKATAKYFFYSNIMNFFKTEITLANGEIRKRPLIETNGETGEIVWDKGRDFATVRKVLSMPQVNIVKKTEVQTGGFSKESILPKRNSDKLIARKKDWDPKKYGGFDSPTVAYSVLVVAKVEKGKSKKLKSVKELLGITIMERSSFEKNPIDFLEAKGYKEVKKDLIIKLPKYSLFELENGRKRMLASAGELQKGNELALPSKYVNFLYLASHYEKLKGSPEDNEQKQLFVEQHKHYLDEIIEQISEFSKRVILADANLDKVLSAYNKHRDKPIREQAENIIHLFTLTNLGAPAAFKYFDTTIDRKRYTSTKEVLDATLIHQSITGLYETRIDLSQLGGDGGGGSEAAAKGGGGGVPWILKKPLELTIKLDLEEQQGTLLNNSILSKKGKEELKQLFEKYSALWQSWENQVGHRRIRPHKIATGTVKPTPQKQYHINPKAKPDIQIVINDLLKQGVLIQKESTMNTPVYPVPKPNGRWRMVLDYRAVNKVTPLIAVQNQHSYGILGSLFKGRYKTTIDLSNGFWAHPIVPEDYWITAFTWQGKQYCWTVLPQGFLNSPGLFNGDVVDLLQGIPNVEVYVDDVYISHDSEKEHLEYLDILFNRLKEAGYIISLKKSNIANSIVDFLGFQITNEGRGLTDTFKEKLENITAPTTLKQLQSILGKLNFARNFIPDFTELIAPLYALIPKSPKNYVPWQIEHSTTLETLITKLNGAEYLQGRKGDKTLIMKVNASYTTGYIRYYNEGEKKPISYVSIVFSKTELKFTELEKLLTTVHKGLLKALDLSMGQNIHVYSPIVSMQNIQKTPQTAKKALASRWLSWLSYLEDPRIRFFYDPQMPALKDLPAVDTGKDNKKHPSNFQHIFYTDGSAITSPTKEGHLNAGMGIVYFINKDGNLQKQQEWSISLGNHTAQFAEIAAFEFALKKCLPLGGNILVVTDSNYVAKAYNEELDVWASNGFVNNRKKPLKHISKWKSVADLKRLRPDVVVTHEPGHQKLDSSPHAYGNNLADQLATQASFKVHAGKRTADGSEFEKRTADGSEFESPKKKAKVE

SEQ ID NO: 1114 - protein, 2087 aa, synthetic construct
MPAAKRVKLDGGDKKYSIGLDIGTNSVGWAVITDEYKVPSKKFKVLGNTDRHSIKKNLIGALLFDSGETAEATRLKRTARRRYTRRKNRICYLQEIFSNEMAKVDDSFFHRLEESFLVEEDKKHERHPIFGNIVDEVAYHEKYPTIYHLRKKLVDSTDKADLRLIYLALAHMIKFRGHFLIEGDLNPDNSDVDKLFIQLVQTYNQLFEENPINASGVDAKAILSARLSKSRRLENLIAQLPGEKKNGLFGNLIALSLGLTPNFKSNFDLAEDAKLQLSKDTYDDDLDNLLAQIGDQYADLFLAAKNLSDAILLSDILRVNTEITKAPLSASMIKRYDEHHQDLTLLKALVRQQLPEKYKEIFFDQSKNGYAGYIDGGASQEEFYKFIKPILEKMDGTEELLVKLNREDLLRKQRTFDNGSIPHQIHLGELHAILRRQEDFYPFLKDNREKIEKILTFRIPYYVGPLARGNSRFAWMTRKSEETITPWNFEEVVDKGASAQSFIERMTNFDKNLPNEKVLPKHSLLYEYFTVYNELTKVKYVTEGMRKPAFLSGEQKKAIVDLLFKTNRKVTVKQLKEDYFKKIECFDSVEISGVEDRFNASLGTYHDLLKIIKDKDFLDNEENEDILEDIVLTLTLFEDREMIEERLKTYAHLFDDKVMKQLKRRRYTGWGRLSRKLINGIRDKQSGKTILDFLKSDGFANRNFMQLIHDDSLTFKEDIQKAQVSGQGDSLHEHIANLAGSPAIKKGILQTVKVVDELVKVMGRHKPENIVIEMARENQTTQKGQKNSRERMKRIEEGIKELGSQILKEHPVENTQLQNEKLYLYYLQNGRDMYVDQELDINRLSDYDVDHIVPQSFLKDDSIDNKVLTRSDKARGKSDNVPSEEVVKKMKNYWRQLLNAKLITQRKFDNLTKAERGGLSELDKAGFIKRQLVETRQITKHVAQILDSRMNTKYDENDKLIREVKVITLKSKLVSDFRKDFQFYKVREINNYHHAHDAYLNAVVGTALIKKYPKLESEFVYGDYKVYDVRKMIAKSEQEIGKATAKYFFYSNIMNFFKTEITLANGEIRKRPLIETNGETGEIVWDKGRDFATVRKVLSMPQVNIVKKTEVQTGGFSKESILPKRNSDKLIARKKDWDPKKYGGFDSPTVAYSVLVVAKVEKGKSKKLKSVKELLGITIMERSSFEKNPIDFLEAKGYKEVKKDLIIKLPKYSLFELENGRKRMLASAGELQKGNELALPSKYVNFLYLASHYEKLKGSPEDNEQKQLFVEQHKHYLDEIIEQISEFSKRVILADANLDKVLSAYNKHRDKPIREQAENIIHLFTLTNLGAPAAFKYFDTTIDRKRYTSTKEVLDATLIHQSITGLYETRIDLSQLGGDGGGGGEAAAKGGSGGVPWILKKPLELTIKLDLEEQQGTLLNNSILSKKGKEELKQLFEKYSALWQSWENQVGHRRIRPHKIATGTVKPTPQKQYHINPKAKPDIQIVINDLLKQGVLIQKESTMNTPVYPVPKPNGRWRMVLDYRAVNKVTPLIAVQNQHSYGILGSLFKGRYKTTIDLSNGFWAHPIVPEDYWITAFTWQGKQYCWTVLPQGFLNSPGLFNGDVVDLLQGIPNVEVYVDDVYISHDSEKEHLEYLDILFNRLKEAGYIISLKKSNIANSIVDFLGFQITNEGRGLTDTFKEKLENITAPTTLKQLQSILGKLNFARNFIPDFTELIAPLYALIPKSPKNYVPWQIEHSTTLETLITKLNGAEYLQGRKGDKTLIMKVNASYTTGYIRYYNEGEKKPISYVSIVFSKTELKFTELEKLLTTVHKGLLKALDLSMGQNIHVYSPIVSMQNIQKTPQTAKKALASRWLSWLSYLEDPRIRFFYDPQMPALKDLPAVDTGKDNKKHPSNFQHIFYTDGSAITSPTKEGHLNAGMGIVYFINKDGNLQKQQEWSISLGNHTAQFAEIAAFEFALKKCLPLGGNILVVTDSNYVAKAYNEELDVWASNGFVNNRKKPLKHISKWKSVADLKRLRPDVVVTHEPGHQKLDSSPHAYGNNLADQLATQASFKVHAGKRTADGSEFEKRTADGSEFESPKKKAKVE

SEQ ID NO: 1115 - protein, 2208 aa, synthetic construct
MPAAKRVKLDGGDKKYSIGLDIGTNSVGWAVITDEYKVPSKKFKVLGNTDRHSIKKNLIGALLFDSGETAEATRLKRTARRRYTRRKNRICYLQEIFSNEMAKVDDSFFHRLEESFLVEEDKKHERHPIFGNIVDEVAYHEKYPTIYHLRKKLVDSTDKADLRLIYLALAHMIKFRGHFLIEGDLNPDNSDVDKLFIQLVQTYNQLFEENPINASGVDAKAILSARLSKSRRLENLIAQLPGEKKNGLFGNLIALSLGLTPNFKSNFDLAEDAKLQLSKDTYDDDLDNLLAQIGDQYADLFLAAKNLSDAILLSDILRVNTEITKAPLSASMIKRYDEHHQDLTLLKALVRQQLPEKYKEIFFDQSKNGYAGYIDGGASQEEFYKFIKPILEKMDGTEELLVKLNREDLLRKQRTFDNGSIPHQIHLGELHAILRRQEDFYPFLKDNREKIEKILTFRIPYYVGPLARGNSRFAWMTRKSEETITPWNFEEVVDKGASAQSFIERMTNFDKNLPNEKVLPKHSLLYEYFTVYNELTKVKYVTEGMRKPAFLSGEQKKAIVDLLFKTNRKVTVKQLKEDYFKKIECFDSVEISGVEDRFNASLGTYHDLLKIIKDKDFLDNEENEDILEDIVLTLTLFEDREMIEERLKTYAHLFDDKVMKQLKRRRYTGWGRLSRKLINGIRDKQSGKTILDFLKSDGFANRNFMQLIHDDSLTFKEDIQKAQVSGQGDSLHEHIANLAGSPAIKKGILQTVKVVDELVKVMGRHKPENIVIEMARENQTTQKGQKNSRERMKRIEEGIKELGSQILKEHPVENTQLQNEKLYLYYLQNGRDMYVDQELDINRLSDYDVDHIVPQSFLKDDSIDNKVLTRSDKARGKSDNVPSEEVVKKMKNYWRQLLNAKLITQRKFDNLTKAERGGLSELDKAGFIKRQLVETRQITKHVAQILDSRMNTKYDENDKLIREVKVITLKSKLVSDFRKDFQFYKVREINNYHHAHDAYLNAVVGTALIKKYPKLESEFVYGDYKVYDVRKMIAKSEQEIGKATAKYFFYSNIMNFFKTEITLANGEIRKRPLIETNGETGEIVWDKGRDFATVRKVLSMPQVNIVKKTEVQTGGFSKESILPKRNSDKLIARKKDWDPKKYGGFDSPTVAYSVLVVAKVEKGKSKKLKSVKELLGITIMERSSFEKNPIDFLEAKGYKEVKKDLIIKLPKYSLFELENGRKRMLASAGELQKGNELALPSKYVNFLYLASHYEKLKGSPEDNEQKQLFVEQHKHYLDEIIEQISEFSKRVILADANLDKVLSAYNKHRDKPIREQAENIIHLFTLTNLGAPAAFKYFDTTIDRKRYTSTKEVLDATLIHQSITGLYETRIDLSQLGGDGGAEAAAKEAAAKEAAAKEAAAKALEAEAAAKEAAAKEAAAKEAAAKAGGMDLLKPLTVERKGVKIKGYWNSQADITCVPKDLLQGEEPVRQQNVTTIHGTQEGDVYYVNLKIDGRRINTEVIGTTLDYAIITPGDVPWILKKPLELTIKLDLEEQQGTLLNNSILSKKGKEELKQLFEKYSALWQSWENQVGHRRIRPHKIATGTVKPTPQKQYHINPKAKPDIQIVINDLLKQGVLIQKESTMNTPVYPVPKPNGRWRMVLDYRAVNKVTPLIAVQNQHSYGILGSLFKGRYKTTIDLSNGFWAHPIVPEDYWITAFTWQGKQYCWTVLPQGFLNSPGLFNGDVVDLLQGIPNVEVYVDDVYISHDSEKEHLEYLDILFNRLKEAGYIISLKKSNIANSIVDFLGFQITNEGRGLTDTFKEKLENITAPTTLKQLQSILGLLNFARNFIPDFTELIAPLYALIPKSPKNYVPWQIEHSTTLETLITKLNGAEYLQGRKGDKTLIMKVNASYTTGYIRYYNEGEKKPISYVSIVFSKTELKFTELEKLLTTVHKGLLKALDLSMGQNIHVYSPIVSMQNIQKTPQTAKKALASRWLSWLSYLEDPRIRFFYDPQMPALKDLPAVDTGKDNKKHPSNFQHIFYTDGSAITSPTKEGHLNAGMGIVYFINKDGNLQKQQEWSISLGNHTAQFAEIAAFEFALKKCLPLGGNILVVTDSNYVAKAYNEELDVWASNGFVNNRKKPLKHISKWKSVADLKRLRPDVVVTHEPGHQKLDSSPHAYGNNLADQLATQASFKVHAGKRTADGSEFEKRTADGSEFESPKKKAKVE

SEQ ID NO: 1116 - protein, 2182 aa, synthetic construct
MPAAKRVKLDGGDKKYSIGLDIGTNSVGWAVITDEYKVPSKKFKVLGNTDRHSIKKNLIGALLFDSGETAEATRLKRTARRRYTRRKNRICYLQEIFSNEMAKVDDSFFHRLEESFLVEEDKKHERHPIFGNIVDEVAYHEKYPTIYHLRKKLVDSTDKADLRLIYLALAHMIKFRGHFLIEGDLNPDNSDVDKLFIQLVQTYNQLFEENPINASGVDAKAILSARLSKSRRLENLIAQLPGEKKNGLFGNLIALSLGLTPNFKSNFDLAEDAKLQLSKDTYDDDLDNLLAQIGDQYADLFLAAKNLSDAILLSDILRVNTEITKAPLSASMIKRYDEHHQDLTLLKALVRQQLPEKYKEIFFDQSKNGYAGYIDGGASQEEFYKFIKPILEKMDGTEELLVKLNREDLLRKQRTFDNGSIPHQIHLGELHAILRRQEDFYPFLKDNREKIEKILTFRIPYYVGPLARGNSRFAWMTRKSEETITPWNFEEVVDKGASAQSFIERMTNFDKNLPNEKVLPKHSLLYEYFTVYNELTKVKYVTEGMRKPAFLSGEQKKAIVDLLFKTNRKVTVKQLKEDYFKKIECFDSVEISGVEDRFNASLGTYHDLLKIIKDKDFLDNEENEDILEDIVLTLTLFEDREMIEERLKTYAHLFDDKVMKQLKRRRYTGWGRLSRKLINGIRDKQSGKTILDFLKSDGFANRNFMQLIHDDSLTFKEDIQKAQVSGQGDSLHEHIANLAGSPAIKKGILQTVKVVDELVKVMGRHKPENIVIEMARENQTTQKGQKNSRERMKRIEEGIKELGSQILKEHPVENTQLQNEKLYLYYLQNGRDMYVDQELDINRLSDYDVDHIVPQSFLKDDSIDNKVLTRSDKARGKSDNVPSEEVVKKMKNYWRQLLNAKLITQRKFDNLTKAERGGLSELDKAGFIKRQLVETRQITKHVAQILDSRMNTKYDENDKLIREVKVITLKSKLVSDFRKDFQFYKVREINNYHHAHDAYLNAVVGTALIKKYPKLESEFVYGDYKVYDVRKMIAKSEQEIGKATAKYFFYSNIMNFFKTEITLANGEIRKRPLIETNGETGEIVWDKGRDFATVRKVLSMPQVNIVKKTEVQTGGFSKESILPKRNSDKLIARKKDWDPKKYGGFDSPTVAYSVLVVAKVEKGKSKKLKSVKELLGITIMERSSFEKNPIDFLEAKGYKEVKKDLIIKLPKYSLFELENGRKRMLASAGELQKGNELALPSKYVNFLYLASHYEKLKGSPEDNEQKQLFVEQHKHYLDEIIEQISEFSKRVILADANLDKVLSAYNKHRDKPIREQAENIIHLFTLTNLGAPAAFKYFDTTIDRKRYTSTKEVLDATLIHQSITGLYETRIDLSQLGGDGGEAAAKEAAAKEAAAKEAAAKGGMDLLKPLTVERKGVKIKGYWNSQADITCVPKDLLQGEEPVRQQNVTTIHGTQEGDVYYVNLKIDGRRINTEVIGTTLDYAIITPGDVPWILKKPLELTIKLDLEEQQGTLLNNSILSKKGKEELKQLFEKYSALWQSWENQVGHRRIRPHKIATGTVKPTPQKQYHINPKAKPDIQIVINDLLKQGVLIQKESTMNTPVYPVPKPNGRWRMVLDYRAVNKVTPLIAVQNQHSYGILGSLFKGRYKTTIDLSNGFWAHPIVPEDYWITAFTWQGKQYCWTVLPQGFLNSPGLFNGDVVDLLQGIPNVEVYVDDVYISHDSEKEHLEYLDILFNRLKEAGYIISLKKSNIANSIVDFLGFQITNEGRGLTDTFKEKLENITAPTTLKQLQSILGLLNFARNFIPDFTELIAPLYALIPKSPKNYVPWQIEHSTTLETLITKLNGAEYLQGRKGDKTLIMKVNASYTTGYIRYYNEGEKKPISYVSIVFSKTELKFTELEKLLTTVHKGLLKALDLSMGQNIHVYSPIVSMQNIQKTPQTAKKALASRWLSWLSYLEDPRIRFFYDPQMPALKDLPAVDTGKDNKKHPSNFQHIFYTDGSAITSPTKEGHLNAGMGIVYFINKDGNLQKQQEWSISLGNHTAQFAEIAAFEFALKKCLPLGGNILVVTDSNYVAKAYNEELDVWASNGFVNNRKKPLKHISKWKSVADLKRLRPDVVVTHEPGHQKLDSSPHAYGNNLADQLATQASFKVHAGKRTADGSEFEKRTADGSEFESPKKKAKVE

SEQ ID NO: 1117 - protein, 2171 aa, synthetic construct
MPAAKRVKLDGGDKKYSIGLDIGTNSVGWAVITDEYKVPSKKFKVLGNTDRHSIKKNLIGALLFDSGETAEATRLKRTARRRYTRRKNRICYLQEIFSNEMAKVDDSFFHRLEESFLVEEDKKHERHPIFGNIVDEVAYHEKYPTIYHLRKKLVDSTDKADLRLIYLALAHMIKFRGHFLIEGDLNPDNSDVDKLFIQLVQTYNQLFEENPINASGVDAKAILSARLSKSRRLENLIAQLPGEKKNGLFGNLIALSLGLTPNFKSNFDLAEDAKLQLSKDTYDDDLDNLLAQIGDQYADLFLAAKNLSDAILLSDILRVNTEITKAPLSASMIKRYDEHHQDLTLLKALVRQQLPEKYKEIFFDQSKNGYAGYIDGGASQEEFYKFIKPILEKMDGTEELLVKLNREDLLRKQRTFDNGSIPHQIHLGELHAILRRQEDFYPFLKDNREKIEKILTFRIPYYVGPLARGNSRFAWMTRKSEETITPWNFEEVVDKGASAQSFIERMTNFDKNLPNEKVLPKHSLLYEYFTVYNELTKVKYVTEGMRKPAFLSGEQKKAIVDLLFKTNRKVTVKQLKEDYFKKIECFDSVEISGVEDRFNASLGTYHDLLKIIKDKDFLDNEENEDILEDIVLTLTLFEDREMIEERLKTYAHLFDDKVMKQLKRRRYTGWGRLSRKLINGIRDKQSGKTILDFLKSDGFANRNFMQLIHDDSLTFKEDIQKAQVSGQGDSLHEHIANLAGSPAIKKGILQTVKVVDELVKVMGRHKPENIVIEMARENQTTQKGQKNSRERMKRIEEGIKELGSQILKEHPVENTQLQNEKLYLYYLQNGRDMYVDQELDINRLSDYDVDHIVPQSFLKDDSIDNKVLTRSDKARGKSDNVPSEEVVKKMKNYWRQLLNAKLITQRKFDNLTKAERGGLSELDKAGFIKRQLVETRQITKHVAQILDSRMNTKYDENDKLIREVKVITLKSKLVSDFRKDFQFYKVREINNYHHAHDAYLNAVVGTALIKKYPKLESEFVYGDYKVYDVRKMIAKSEQEIGKATAKYFFYSNIMNFFKTEITLANGEIRKRPLIETNGETGEIVWDKGRDFATVRKVLSMPQVNIVKKTEVQTGGFSKESILPKRNSDKLIARKKDWDPKKYGGFDSPTVAYSVLVVAKVEKGKSKKLKSVKELLGITIMERSSFEKNPIDFLEAKGYKEVKKDLIIKLPKYSLFELENGRKRMLASAGELQKGNELALPSKYVNFLYLASHYEKLKGSPEDNEQKQLFVEQHKHYLDEIIEQISEFSKRVILADANLDKVLSAYNKHRDKPIREQAENIIHLFTLTNLGAPAAFKYFDTTIDRKRYTSTKEVLDATLIHQSITGLYETRIDLSQLGGDGGGSSPAPGGGGGMDLLKPLTVERKGVKIKGYWNSQADITCVPKDLLQGEEPVRQQNVTTIHGTQEGDVYYVNLKIDGRRINTEVIGTTLDYAIITPGDVPWILKKPLELTIKLDLEEQQGTLLNNSILSKKGKEELKQLFEKYSALWQSWENQVGHRRIRPHKIATGTVKPTPQKQYHINPKAKPDIQIVINDLLKQGVLIQKESTMNTPVYPVPKPNGRWRMVLDYRAVNKVTPLIAVQNQHSYGILGSLFKGRYKTTIDLSNGFWAHPIVPEDYWITAFTWQGKQYCWTVLPQGFLNSPGLFNGDVVDLLQGIPNVEVYVDDVYISHDSEKEHLEYLDILFNRLKEAGYIISLKKSNIANSIVDFLGFQITNEGRGLTDTFKEKLENITAPTTLKQLQSILGLLNFARNFIPDFTELIAPLYALIPKSPKNYVPWQIEHSTTLETLITKLNGAEYLQGRKGDKTLIMKVNASYTTGYIRYYNEGEKKPISYVSIVFSKTELKFTELEKLLTTVHKGLLKALDLSMGQNIHVYSPIVSMQNIQKTPQTAKKALASRWLSWLSYLEDPRIRFFYDPQMPALKDLPAVDTGKDNKKHPSNFQHIFYTDGSAITSPTKEGHLNAGMGIVYFINKDGNLQKQQEWSISLGNHTAQFAEIAAFEFALKKCLPLGGNILVVTDSNYVAKAYNEELDVWASNGFVNNRKKPLKHISKWKSVADLKRLRPDVVVTHEPGHQKLDSSPHAYGNNLADQLATQASFKVHAGKRTADGSEFEKRTADGSEFESPKKKAKVE

SEQ ID NO: 1118 - protein, 2173 aa, synthetic construct
MPAAKRVKLDGGDKKYSIGLDIGTNSVGWAVITDEYKVPSKKFKVLGNTDRHSIKKNLIGALLFDSGETAEATRLKRTARRRYTRRKNRICYLQEIFSNEMAKVDDSFFHRLEESFLVEEDKKHERHPIFGNIVDEVAYHEKYPTIYHLRKKLVDSTDKADLRLIYLALAHMIKFRGHFLIEGDLNPDNSDVDKLFIQLVQTYNQLFEENPINASGVDAKAILSARLSKSRRLENLIAQLPGEKKNGLFGNLIALSLGLTPNFKSNFDLAEDAKLQLSKDTYDDDLDNLLAQIGDQYADLFLAAKNLSDAILLSDILRVNTEITKAPLSASMIKRYDEHHQDLTLLKALVRQQLPEKYKEIFFDQSKNGYAGYIDGGASQEEFYKFIKPILEKMDGTEELLVKLNREDLLRKQRTFDNGSIPHQIHLGELHAILRRQEDFYPFLKDNREKIEKILTFRIPYYVGPLARGNSRFAWMTRKSEETITPWNFEEVVDKGASAQSFIERMTNFDKNLPNEKVLPKHSLLYEYFTVYNELTKVKYVTEGMRKPAFLSGEQKKAIVDLLFKTNRKVTVKQLKEDYFKKIECFDSVEISGVEDRFNASLGTYHDLLKIIKDKDFLDNEENEDILEDIVLTLTLFEDREMIEERLKTYAHLFDDKVMKQLKRRRYTGWGRLSRKLINGIRDKQSGKTILDFLKSDGFANRNFMQLIHDDSLTFKEDIQKAQVSGQGDSLHEHIANLAGSPAIKKGILQTVKVVDELVKVMGRHKPENIVIEMARENQTTQKGQKNSRERMKRIEEGIKELGSQILKEHPVENTQLQNEKLYLYYLQNGRDMYVDQELDINRLSDYDVDHIVPQSFLKDDSIDNKVLTRSDKARGKSDNVPSEEVVKKMKNYWRQLLNAKLITQRKFDNLTKAERGGLSELDKAGFIKRQLVETRQITKHVAQILDSRMNTKYDENDKLIREVKVITLKSKLVSDFRKDFQFYKVREINNYHHAHDAYLNAVVGTALIKKYPKLESEFVYGDYKVYDVRKMIAKSEQEIGKATAKYFFYSNIMNFFKTEITLANGEIRKRPLIETNGETGEIVWDKGRDFATVRKVLSMPQVNIVKKTEVQTGGFSKESILPKRNSDKLIARKKDWDPKKYGGFDSPTVAYSVLVVAKVEKGKSKKLKSVKELLGITIMERSSFEKNPIDFLEAKGYKEVKKDLIIKLPKYSLFELENGRKRMLASAGELQKGNELALPSKYVNFLYLASHYEKLKGSPEDNEQKQLFVEQHKHYLDEIIEQISEFSKRVILADANLDKVLSAYNKHRDKPIREQAENIIHLFTLTNLGAPAAFKYFDTTIDRKRYTSTKEVLDATLIHQSITGLYETRIDLSQLGGDGGPAPEAAAKGGGGGMDLLKPLTVERKGVKIKGYWNSQADITCVPKDLLQGEEPVRQQNVTTIHGTQEGDVYYVNLKIDGRRINTEVIGTTLDYAIITPGDVPWILKKPLELTIKLDLEEQQGTLLNNSILSKKGKEELKQLFEKYSALWQSWENQVGHRRIRPHKIATGTVKPTPQKQYHINPKAKPDIQIVINDLLKQGVLIQKESTMNTPVYPVPKPNGRWRMVLDYRAVNKVTPLIAVQNQHSYGILGSLFKGRYKTTIDLSNGFWAHPIVPEDYWITAFTWQGKQYCWTVLPQGFLNSPGLFNGDVVDLLQGIPNVEVYVDDVYISHDSEKEHLEYLDILFNRLKEAGYIISLKKSNIANSIVDFLGFQITNEGRGLTDTFKEKLENITAPTTLKQLQSILGLLNFARNFIPDFTELIAPLYALIPKSPKNYVPWQIEHSTTLETLITKLNGAEYLQGRKGDKTLIMKVNASYTTGYIRYYNEGEKKPISYVSIVFSKTELKFTELEKLLTTVHKGLLKALDLSMGQNIHVYSPIVSMQNIQKTPQTAKKALASRWLSWLSYLEDPRIRFFYDPQMPALKDLPAVDTGKDNKKHPSNFQHIFYTDGSAITSPTKEGHLNAGMGIVYFINKDGNLQKQQEWSISLGNHTAQFAEIAAFEFALKKCLPLGGNILVVTDSNYVAKAYNEELDVWASNGFVNNRKKPLKHISKWKSVADLKRLRPDVVVTHEPGHQKLDSSPHAYGNNLADQLATQASFKVHAGKRTADGSEFEKRTADGSEFESPKKKAKVE

SEQ ID NO: 1119 - protein, 2182 aa, synthetic construct
MPAAKRVKLDGGDKKYSIGLDIGTNSVGWAVITDEYKVPSKKFKVLGNTDRHSIKKNLIGALLFDSGETAEATRLKRTARRRYTRRKNRICYLQEIFSNEMAKVDDSFFHRLEESFLVEEDKKHERHPIFGNIVDEVAYHEKYPTIYHLRKKLVDSTDKADLRLIYLALAHMIKFRGHFLIEGDLNPDNSDVDKLFIQLVQTYNQLFEENPINASGVDAKAILSARLSKSRRLENLIAQLPGEKKNGLFGNLIALSLGLTPNFKSNFDLAEDAKLQLSKDTYDDDLDNLLAQIGDQYADLFLAAKNLSDAILLSDILRVNTEITKAPLSASMIKRYDEHHQDLTLLKALVRQQLPEKYKEIFFDQSKNGYAGYIDGGASQEEFYKFIKPILEKMDGTEELLVKLNREDLLRKQRTFDNGSIPHQIHLGELHAILRRQEDFYPFLKDNREKIEKILTFRIPYYVGPLARGNSRFAWMTRKSEETITPWNFEEVVDKGASAQSFIERMTNFDKNLPNEKVLPKHSLLYEYFTVYNELTKVKYVTEGMRKPAFLSGEQKKAIVDLLFKTNRKVTVKQLKEDYFKKIECFDSVEISGVEDRFNASLGTYHDLLKIIKDKDFLDNEENEDILEDIVLTLTLFEDREMIEERLKTYAHLFDDKVMKQLKRRRYTGWGRLSRKLINGIRDKQSGKTILDFLKSDGFANRNFMQLIHDDSLTFKEDIQKAQVSGQGDSLHEHIANLAGSPAIKKGILQTVKVVDELVKVMGRHKPENIVIEMARENQTTQKGQKNSRERMKRIEEGIKELGSQILKEHPVENTQLQNEKLYLYYLQNGRDMYVDQELDINRLSDYDVDHIVPQSFLKDDSIDNKVLTRSDKARGKSDNVPSEEVVKKMKNYWRQLLNAKLITQRKFDNLTKAERGGLSELDKAGFIKRQLVETRQITKHVAQILDSRMNTKYDENDKLIREVKVITLKSKLVSDFRKDFQFYKVREINNYHHAHDAYLNAVVGTALIKKYPKLESEFVYGDYKVYDVRKMIAKSEQEIGKATAKYFFYSNIMNFFKTEITLANGEIRKRPLIETNGETGEIVWDKGRDFATVRKVLSMPQVNIVKKTEVQTGGFSKESILPKRNSDKLIARKKDWDPKKYGGFDSPTVAYSVLVVAKVEKGKSKKLKSVKELLGITIMERSSFEKNPIDFLEAKGYKEVKKDLIIKLPKYSLFELENGRKRMLASAGELQKGNELALPSKYVNFLYLASHYEKLKGSPEDNEQKQLFVEQHKHYLDEIIEQISEFSKRVILADANLDKVLSAYNKHRDKPIREQAENIIHLFTLTNLGAPAAFKYFDTTIDRKRYTSTKEVLDATLIHQSITGLYETRIDLSQLGGDGGGGGGSGGGGSGGGGSGGGGSGGMDLLKPLTVERKGVKIKGYWNSQADITCVPKDLLQGEEPVRQQNVTTIHGTQEGDVYYVNLKIDGRRINTEVIGTTLDYAIITPGDVPWILKKPLELTIKLDLEEQQGTLLNNSILSKKGKEELKQLFEKYSALWQSWENQVGHRRIRPHKIATGTVKPTPQKQYHINPKAKPDIQIVINDLLKQGVLIQKESTMNTPVYPVPKPNGRWRMVLDYRAVNKVTPLIAVQNQHSYGILGSLFKGRYKTTIDLSNGFWAHPIVPEDYWITAFTWQGKQYCWTVLPQGFLNSPGLFNGDVVDLLQGIPNVEVYVDDVYISHDSEKEHLEYLDILFNRLKEAGYIISLKKSNIANSIVDFLGFQITNEGRGLTDTFKEKLENITAPTTLKQLQSILGLLNFARNFIPDFTELIAPLYALIPKSPKNYVPWQIEHSTTLETLITKLNGAEYLQGRKGDKTLIMKVNASYTTGYIRYYNEGEKKPISYVSIVFSKTELKFTELEKLLTTVHKGLLKALDLSMGQNIHVYSPIVSMQNIQKTPQTAKKALASRWLSWLSYLEDPRIRFFYDPQMPALKDLPAVDTGKDNKKHPSNFQHIFYTDGSAITSPTKEGHLNAGMGIVYFINKDGNLQKQQEWSISLGNHTAQFAEIAAFEFALKKCLPLGGNILVVTDSNYVAKAYNEELDVWASNGFVNNRKKPLKHISKWKSVADLKRLRPDVVVTHEPGHQKLDSSPHAYGNNLADQLATQASFKVHAGKRTADGSEFEKRTADGSEFESPKKKAKVE

SEQ ID NO: 1120 - protein, 2171 aa, synthetic construct
MPAAKRVKLDGGDKKYSIGLDIGTNSVGWAVITDEYKVPSKKFKVLGNTDRHSIKKNLIGALLFDSGETAEATRLKRTARRRYTRRKNRICYLQEIFSNEMAKVDDSFFHRLEESFLVEEDKKHERHPIFGNIVDEVAYHEKYPTIYHLRKKLVDSTDKADLRLIYLALAHMIKFRGHFLIEGDLNPDNSDVDKLFIQLVQTYNQLFEENPINASGVDAKAILSARLSKSRRLENLIAQLPGEKKNGLFGNLIALSLGLTPNFKSNFDLAEDAKLQLSKDTYDDDLDNLLAQIGDQYADLFLAAKNLSDAILLSDILRVNTEITKAPLSASMIKRYDEHHQDLTLLKALVRQQLPEKYKEIFFDQSKNGYAGYIDGGASQEEFYKFIKPILEKMDGTEELLVKLNREDLLRKQRTFDNGSIPHQIHLGELHAILRRQEDFYPFLKDNREKIEKILTFRIPYYVGPLARGNSRFAWMTRKSEETITPWNFEEVVDKGASAQSFIERMTNFDKNLPNEKVLPKHSLLYEYFTVYNELTKVKYVTEGMRKPAFLSGEQKKAIVDLLFKTNRKVTVKQLKEDYFKKIECFDSVEISGVEDRFNASLGTYHDLLKIIKDKDFLDNEENEDILEDIVLTLTLFEDREMIEERLKTYAHLFDDKVMKQLKRRRYTGWGRLSRKLINGIRDKQSGKTILDFLKSDGFANRNFMQLIHDDSLTFKEDIQKAQVSGQGDSLHEHIANLAGSPAIKKGILQTVKVVDELVKVMGRHKPENIVIEMARENQTTQKGQKNSRERMKRIEEGIKELGSQILKEHPVENTQLQNEKLYLYYLQNGRDMYVDQELDINRLSDYDVDHIVPQSFLKDDSIDNKVLTRSDKARGKSDNVPSEEVVKKMKNYWRQLLNAKLITQRKFDNLTKAERGGLSELDKAGFIKRQLVETRQITKHVAQILDSRMNTKYDENDKLIREVKVITLKSKLVSDFRKDFQFYKVREINNYHHAHDAYLNAVVGTALIKKYPKLESEFVYGDYKVYDVRKMIAKSEQEIGKATAKYFFYSNIMNFFKTEITLANGEIRKRPLIETNGETGEIVWDKGRDFATVRKVLSMPQVNIVKKTEVQTGGFSKESILPKRNSDKLIARKKDWDPKKYGGFDSPTVAYSVLVVAKVEKGKSKKLKSVKELLGITIMERSSFEKNPIDFLEAKGYKEVKKDLIIKLPKYSLFELENGRKRMLASAGELQKGNELALPSKYVNFLYLASHYEKLKGSPEDNEQKQLFVEQHKHYLDEIIEQISEFSKRVILADANLDKVLSAYNKHRDKPIREQAENIIHLFTLTNLGAPAAFKYFDTTIDRKRYTSTKEVLDATLIHQSITGLYETRIDLSQLGGDGGPAPGGSGSSGGMDLLKPLTVERKGVKIKGYWNSQADITCVPKDLLQGEEPVRQQNVTTIHGTQEGDVYYVNLKIDGRRINTEVIGTTLDYAIITPGDVPWILKKPLELTIKLDLEEQQGTLLNNSILSKKGKEELKQLFEKYSALWQSWENQVGHRRIRPHKIATGTVKPTPQKQYHINPKAKPDIQIVINDLLKQGVLIQKESTMNTPVYPVPKPNGRWRMVLDYRAVNKVTPLIAVQNQHSYGILGSLFKGRYKTTIDLSNGFWAHPIVPEDYWITAFTWQGKQYCWTVLPQGFLNSPGLFNGDVVDLLQGIPNVEVYVDDVYISHDSEKEHLEYLDILFNRLKEAGYIISLKKSNIANSIVDFLGFQITNEGRGLTDTFKEKLENITAPTTLKQLQSILGLLNFARNFIPDFTELIAPLYALIPKSPKNYVPWQIEHSTTLETLITKLNGAEYLQGRKGDKTLIMKVNASYTTGYIRYYNEGEKKPISYVSIVFSKTELKFTELEKLLTTVHKGLLKALDLSMGQNIHVYSPIVSMQNIQKTPQTAKKALASRWLSWLSYLEDPRIRFFYDPQMPALKDLPAVDTGKDNKKHPSNFQHIFYTDGSAITSPTKEGHLNAGMGIVYFINKDGNLQKQQEWSISLGNHTAQFAEIAAFEFALKKCLPLGGNILVVTDSNYVAKAYNEELDVWASNGFVNNRKKPLKHISKWKSVADLKRLRPDVVVTHEPGHQKLDSSPHAYGNNLADQLATQASFKVHAGKRTADGSEFEKRTADGSEFESPKKKAKVE

SEQ ID NO: 1121 - protein, 2173 aa, synthetic construct
MPAAKRVKLDGGDKKYSIGLDIGTNSVGWAVITDEYKVPSKKFKVLGNTDRHSIKKNLIGALLFDSGETAEATRLKRTARRRYTRRKNRICYLQEIFSNEMAKVDDSFFHRLEESFLVEEDKKHERHPIFGNIVDEVAYHEKYPTIYHLRKKLVDSTDKADLRLIYLALAHMIKFRGHFLIEGDLNPDNSDVDKLFIQLVQTYNQLFEENPINASGVDAKAILSARLSKSRRLENLIAQLPGEKKNGLFGNLIALSLGLTPNFKSNFDLAEDAKLQLSKDTYDDDLDNLLAQIGDQYADLFLAAKNLSDAILLSDILRVNTEITKAPLSASMIKRYDEHHQDLTLLKALVRQQLPEKYKEIFFDQSKNGYAGYIDGGASQEEFYKFIKPILEKMDGTEELLVKLNREDLLRKQRTFDNGSIPHQIHLGELHAILRRQEDFYPFLKDNREKIEKILTFRIPYYVGPLARGNSRFAWMTRKSEETITPWNFEEVVDKGASAQSFIERMTNFDKNLPNEKVLPKHSLLYEYFTVYNELTKVKYVTEGMRKPAFLSGEQKKAIVDLLFKTNRKVTVKQLKEDYFKKIECFDSVEISGVEDRFNASLGTYHDLLKIIKDKDFLDNEENEDILEDIVLTLTLFEDREMIEERLKTYAHLFDDKVMKQLKRRRYTGWGRLSRKLINGIRDKQSGKTILDFLKSDGFANRNFMQLIHDDSLTFKEDIQKAQVSGQGDSLHEHIANLAGSPAIKKGILQTVKVVDELVKVMGRHKPENIVIEMARENQTTQKGQKNSRERMKRIEEGIKELGSQILKEHPVENTQLQNEKLYLYYLQNGRDMYVDQELDINRLSDYDVDHIVPQSFLKDDSIDNKVLTRSDKARGKSDNVPSEEVVKKMKNYWRQLLNAKLITQRKFDNLTKAERGGLSELDKAGFIKRQLVETRQITKHVAQILDSRMNTKYDENDKLIREVKVITLKSKLVSDFRKDFQFYKVREINNYHHAHDAYLNAVVGTALIKKYPKLESEFVYGDYKVYDVRKMIAKSEQEIGKATAKYFFYSNIMNFFKTEITLANGEIRKRPLIETNGETGEIVWDKGRDFATVRKVLSMPQVNIVKKTEVQTGGFSKESILPKRNSDKLIARKKDWDPKKYGGFDSPTVAYSVLVVAKVEKGKSKKLKSVKELLGITIMERSSFEKNPIDFLEAKGYKEVKKDLIIKLPKYSLFELENGRKRMLASAGELQKGNELALPSKYVNFLYLASHYEKLKGSPEDNEQKQLFVEQHKHYLDEIIEQISEFSKRVILADANLDKVLSAYNKHRDKPIREQAENIIHLFTLTNLGAPAAFKYFDTTIDRKRYTSTKEVLDATLIHQSITGLYETRIDLSQLGGDGGEAAAKPAPGSSGGMDLLKPLTVERKGVKIKGYWNSQADITCVPKDLLQGEEPVRQQNVTTIHGTQEGDVYYVNLKIDGRRINTEVIGTTLDYAIITPGDVPWILKKPLELTIKLDLEEQQGTLLNNSILSKKGKEELKQLFEKYSALWQSWENQVGHRRIRPHKIATGTVKPTPQKQYHINPKAKPDIQIVINDLLKQGVLIQKESTMNTPVYPVPKPNGRWRMVLDYRAVNKVTPLIAVQNQHSYGILGSLFKGRYKTTIDLSNGFWAHPIVPEDYWITAFTWQGKQYCWTVLPQGFLNSPGLFNGDVVDLLQGIPNVEVYVDDVYISHDSEKEHLEYLDILFNRLKEAGYIISLKKSNIANSIVDFLGFQITNEGRGLTDTFKEKLENITAPTTLKQLQSILGLLNFARNFIPDFTELIAPLYALIPKSPKNYVPWQIEHSTTLETLITKLNGAEYLQGRKGDKTLIMKVNASYTTGYIRYYNEGEKKPISYVSIVFSKTELKFTELEKLLTTVHKGLLKALDLSMGQNIHVYSPIVSMQNIQKTPQTAKKALASRWLSWLSYLEDPRIRFFYDPQMPALKDLPAVDTGKDNKKHPSNFQHIFYTDGSAITSPTKEGHLNAGMGIVYFINKDGNLQKQQEWSISLGNHTAQFAEIAAFEFALKKCLPLGGNILVVTDSNYVAKAYNEELDVWASNGFVNNRKKPLKHISKWKSVADLKRLRPDVVVTHEPGHQKLDSSPHAYGNNLADQLATQASFKVHAGKRTADGSEFEKRTADGSEFESPKKKAKVE

SEQ ID NO: 1122 - protein, 2172 aa, synthetic construct
MPAAKRVKLDGGDKKYSIGLDIGTNSVGWAVITDEYKVPSKKFKVLGNTDRHSIKKNLIGALLFDSGETAEATRLKRTARRRYTRRKNRICYLQEIFSNEMAKVDDSFFHRLEESFLVEEDKKHERHPIFGNIVDEVAYHEKYPTIYHLRKKLVDSTDKADLRLIYLALAHMIKFRGHFLIEGDLNPDNSDVDKLFIQLVQTYNQLFEENPINASGVDAKAILSARLSKSRRLENLIAQLPGEKKNGLFGNLIALSLGLTPNFKSNFDLAEDAKLQLSKDTYDDDLDNLLAQIGDQYADLFLAAKNLSDAILLSDILRVNTEITKAPLSASMIKRYDEHHQDLTLLKALVRQQLPEKYKEIFFDQSKNGYAGYIDGGASQEEFYKFIKPILEKMDGTEELLVKLNREDLLRKQRTFDNGSIPHQIHLGELHAILRRQEDFYPFLKDNREKIEKILTFRIPYYVGPLARGNSRFAWMTRKSEETITPWNFEEVVDKGASAQSFIERMTNFDKNLPNEKVLPKHSLLYEYFTVYNELTKVKYVTEGMRKPAFLSGEQKKAIVDLLFKTNRKVTVKQLKEDYFKKIECFDSVEISGVEDRFNASLGTYHDLLKIIKDKDFLDNEENEDILEDIVLTLTLFEDREMIEERLKTYAHLFDDKVMKQLKRRRYTGWGRLSRKLINGIRDKQSGKTILDFLKSDGFANRNFMQLIHDDSLTFKEDIQKAQVSGQGDSLHEHIANLAGSPAIKKGILQTVKVVDELVKVMGRHKPENIVIEMARENQTTQKGQKNSRERMKRIEEGIKELGSQILKEHPVENTQLQNEKLYLYYLQNGRDMYVDQELDINRLSDYDVDHIVPQSFLKDDSIDNKVLTRSDKARGKSDNVPSEEVVKKMKNYWRQLLNAKLITQRKFDNLTKAERGGLSELDKAGFIKRQLVETRQITKHVAQILDSRMNTKYDENDKLIREVKVITLKSKLVSDFRKDFQFYKVREINNYHHAHDAYLNAVVGTALIKKYPKLESEFVYGDYKVYDVRKMIAKSEQEIGKATAKYFFYSNIMNFFKTEITLANGEIRKRPLIETNGETGEIVWDKGRDFATVRKVLSMPQVNIVKKTEVQTGGFSKESILPKRNSDKLIARKKDWDPKKYGGFDSPTVAYSVLVVAKVEKGKSKKLKSVKELLGITIMERSSFEKNPIDFLEAKGYKEVKKDLIIKLPKYSLFELENGRKRMLASAGELQKGNELALPSKYVNFLYLASHYEKLKGSPEDNEQKQLFVEQHKHYLDEIIEQISEFSKRVILADANLDKVLSAYNKHRDKPIREQAENIIHLFTLTNLGAPAAFKYFDTTIDRKRYTSTKEVLDATLIHQSITGLYETRIDLSQLGGDGGGGGGSGGGGSGGMDLLKPLTVERKGVKIKGYWNSQADITCVPKDLLQGEEPVRQQNVTTIHGTQEGDVYYVNLKIDGRRINTEVIGTTLDYAIITPGDVPWILKKPLELTIKLDLEEQQGTLLNNSILSKKGKEELKQLFEKYSALWQSWENQVGHRRIRPHKIATGTVKPTPQKQYHINPKAKPDIQIVINDLLKQGVLIQKESTMNTPVYPVPKPNGRWRMVLDYRAVNKVTPLIAVQNQHSYGILGSLFKGRYKTTIDLSNGFWAHPIVPEDYWITAFTWQGKQYCWTVLPQGFLNSPGLFNGDVVDLLQGIPNVEVYVDDVYISHDSEKEHLEYLDILFNRLKEAGYIISLKKSNIANSIVDFLGFQITNEGRGLTDTFKEKLENITAPTTLKQLQSILGLLNFARNFIPDFTELIAPLYALIPKSPKNYVPWQIEHSTTLETLITKLNGAEYLQGRKGDKTLIMKVNASYTTGYIRYYNEGEKKPISYVSIVFSKTELKFTELEKLLTTVHKGLLKALDLSMGQNIHVYSPIVSMQNIQKTPQTAKKALASRWLSWLSYLEDPRIRFFYDPQMPALKDLPAVDTGKDNKKHPSNFQHIFYTDGSAITSPTKEGHLNAGMGIVYFINKDGNLQKQQEWSISLGNHTAQFAEIAAFEFALKKCLPLGGNILVVTDSNYVAKAYNEELDVWASNGFVNNRKKPLKHISKWKSVADLKRLRPDVVVTHEPGHQKLDSSPHAYGNNLADQLATQASFKVHAGKRTADGSEFEKRTADGSEFESPKKKAKVE

SEQ ID NO: 1123 - protein, 2173 aa, synthetic construct
MPAAKRVKLDGGDKKYSIGLDIGTNSVGWAVITDEYKVPSKKFKVLGNTDRHSIKKNLIGALLFDSGETAEATRLKRTARRRYTRRKNRICYLQEIFSNEMAKVDDSFFHRLEESFLVEEDKKHERHPIFGNIVDEVAYHEKYPTIYHLRKKLVDSTDKADLRLIYLALAHMIKFRGHFLIEGDLNPDNSDVDKLFIQLVQTYNQLFEENPINASGVDAKAILSARLSKSRRLENLIAQLPGEKKNGLFGNLIALSLGLTPNFKSNFDLAEDAKLQLSKDTYDDDLDNLLAQIGDQYADLFLAAKNLSDAILLSDILRVNTEITKAPLSASMIKRYDEHHQDLTLLKALVRQQLPEKYKEIFFDQSKNGYAGYIDGGASQEEFYKFIKPILEKMDGTEELLVKLNREDLLRKQRTFDNGSIPHQIHLGELHAILRRQEDFYPFLKDNREKIEKILTFRIPYYVGPLARGNSRFAWMTRKSEETITPWNFEEVVDKGASAQSFIERMTNFDKNLPNEKVLPKHSLLYEYFTVYNELTKVKYVTEGMRKPAFLSGEQKKAIVDLLFKTNRKVTVKQLKEDYFKKIECFDSVEISGVEDRFNASLGTYHDLLKIIKDKDFLDNEENEDILEDIVLTLTLFEDREMIEERLKTYAHLFDDKVMKQLKRRRYTGWGRLSRKLINGIRDKQSGKTILDFLKSDGFANRNFMQLIHDDSLTFKEDIQKAQVSGQGDSLHEHIANLAGSPAIKKGILQTVKVVDELVKVMGRHKPENIVIEMARENQTTQKGQKNSRERMKRIEEGIKELGSQILKEHPVENTQLQNEKLYLYYLQNGRDMYVDQELDINRLSDYDVDHIVPQSFLKDDSIDNKVLTRSDKARGKSDNVPSEEVVKKMKNYWRQLLNAKLITQRKFDNLTKAERGGLSELDKAGFIKRQLVETRQITKHVAQILDSRMNTKYDENDKLIREVKVITLKSKLVSDFRKDFQFYKVREINNYHHAHDAYLNAVVGTALIKKYPKLESEFVYGDYKVYDVRKMIAKSEQEIGKATAKYFFYSNIMNFFKTEITLANGEIRKRPLIETNGETGEIVWDKGRDFATVRKVLSMPQVNIVKKTEVQTGGFSKESILPKRNSDKLIARKKDWDPKKYGGFDSPTVAYSVLVVAKVEKGKSKKLKSVKELLGITIMERSSFEKNPIDFLEAKGYKEVKKDLIIKLPKYSLFELENGRKRMLASAGELQKGNELALPSKYVNFLYLASHYEKLKGSPEDNEQKQLFVEQHKHYLDEIIEQISEFSKRVILADANLDKVLSAYNKHRDKPIREQAENIIHLFTLTNLGAPAAFKYFDTTIDRKRYTSTKEVLDATLIHQSITGLYETRIDLSQLGGDGGGGSEAAAKPAPGGMDLLKPLTVERKGVKIKGYWNSQADITCVPKDLLQGEEPVRQQNVTTIHGTQEGDVYYVNLKIDGRRINTEVIGTTLDYAIITPGDVPWILKKPLELTIKLDLEEQQGTLLNNSILSKKGKEELKQLFEKYSALWQSWENQVGHRRIRPHKIATGTVKPTPQKQYHINPKAKPDIQIVINDLLKQGVLIQKESTMNTPVYPVPKPNGRWRMVLDYRAVNKVTPLIAVQNQHSYGILGSLFKGRYKTTIDLSNGFWAHPIVPEDYWITAFTWQGKQYCWTVLPQGFLNSPGLFNGDVVDLLQGIPNVEVYVDDVYISHDSEKEHLEYLDILFNRLKEAGYIISLKKSNIANSIVDFLGFQITNEGRGLTDTFKEKLENITAPTTLKQLQSILGLLNFARNFIPDFTELIAPLYALIPKSPKNYVPWQIEHSTTLETLITKLNGAEYLQGRKGDKTLIMKVNASYTTGYIRYYNEGEKKPISYVSIVFSKTELKFTELEKLLTTVHKGLLKALDLSMGQNIHVYSPIVSMQNIQKTPQTAKKALASRWLSWLSYLEDPRIRFFYDPQMPALKDLPAVDTGKDNKKHPSNFQHIFYTDGSAITSPTKEGHLNAGMGIVYFINKDGNLQKQQEWSISLGNHTAQFAEIAAFEFALKKCLPLGGNILVVTDSNYVAKAYNEELDVWASNGFVNNRKKPLKHISKWKSVADLKRLRPDVVVTHEPGHQKLDSSPHAYGNNLADQLATQASFKVHAGKRTADGSEFEKRTADGSEFESPKKKAKVE

SEQ ID NO: 1124 - protein, 2171 aa, synthetic construct
MPAAKRVKLDGGDKKYSIGLDIGTNSVGWAVITDEYKVPSKKFKVLGNTDRHSIKKNLIGALLFDSGETAEATRLKRTARRRYTRRKNRICYLQEIFSNEMAKVDDSFFHRLEESFLVEEDKKHERHPIFGNIVDEVAYHEKYPTIYHLRKKLVDSTDKADLRLIYLALAHMIKFRGHFLIEGDLNPDNSDVDKLFIQLVQTYNQLFEENPINASGVDAKAILSARLSKSRRLENLIAQLPGEKKNGLFGNLIALSLGLTPNFKSNFDLAEDAKLQLSKDTYDDDLDNLLAQIGDQYADLFLAAKNLSDAILLSDILRVNTEITKAPLSASMIKRYDEHHQDLTLLKALVRQQLPEKYKEIFFDQSKNGYAGYIDGGASQEEFYKFIKPILEKMDGTEELLVKLNREDLLRKQRTFDNGSIPHQIHLGELHAILRRQEDFYPFLKDNREKIEKILTFRIPYYVGPLARGNSRFAWMTRKSEETITPWNFEEVVDKGASAQSFIERMTNFDKNLPNEKVLPKHSLLYEYFTVYNELTKVKYVTEGMRKPAFLSGEQKKAIVDLLFKTNRKVTVKQLKEDYFKKIECFDSVEISGVEDRFNASLGTYHDLLKIIKDKDFLDNEENEDILEDIVLTLTLFEDREMIEERLKTYAHLFDDKVMKQLKRRRYTGWGRLSRKLINGIRDKQSGKTILDFLKSDGFANRNFMQLIHDDSLTFKEDIQKAQVSGQGDSLHEHIANLAGSPAIKKGILQTVKVVDELVKVMGRHKPENIVIEMARENQTTQKGQKNSRERMKRIEEGIKELGSQILKEHPVENTQLQNEKLYLYYLQNGRDMYVDQELDINRLSDYDVDHIVPQSFLKDDSIDNKVLTRSDKARGKSDNVPSEEVVKKMKNYWRQLLNAKLITQRKFDNLTKAERGGLSELDKAGFIKRQLVETRQITKHVAQILDSRMNTKYDENDKLIREVKVITLKSKLVSDFRKDFQFYKVREINNYHHAHDAYLNAVVGTALIKKYPKLESEFVYGDYKVYDVRKMIAKSEQEIGKATAKYFFYSNIMNFFKTEITLANGEIRKRPLIETNGETGEIVWDKGRDFATVRKVLSMPQVNIVKKTEVQTGGFSKESILPKRNSDKLIARKKDWDPKKYGGFDSPTVAYSVLVVAKVEKGKSKKLKSVKELLGITIMERSSFEKNPIDFLEAKGYKEVKKDLIIKLPKYSLFELENGRKRMLASAGELQKGNELALPSKYVNFLYLASHYEKLKGSPEDNEQKQLFVEQHKHYLDEIIEQISEFSKRVILADANLDKVLSAYNKHRDKPIREQAENIIHLFTLTNLGAPAAFKYFDTTIDRKRYTSTKEVLDATLIHQSITGLYETRIDLSQLGGDGGGGGGSSPAPGGMDLLKPLTVERKGVKIKGYWNSQADITCVPKDLLQGEEPVRQQNVTTIHGTQEGDVYYVNLKIDGRRINTEVIGTTLDYAIITPGDVPWILKKPLELTIKLDLEEQQGTLLNNSILSKKGKEELKQLFEKYSALWQSWENQVGHRRIRPHKIATGTVKPTPQKQYHINPKAKPDIQIVINDLLKQGVLIQKESTMNTPVYPVPKPNGRWRMVLDYRAVNKVTPLIAVQNQHSYGILGSLFKGRYKTTIDLSNGFWAHPIVPEDYWITAFTWQGKQYCWTVLPQGFLNSPGLFNGDVVDLLQGIPNVEVYVDDVYISHDSEKEHLEYLDILFNRLKEAGYIISLKKSNIANSIVDFLGFQITNEGRGLTDTFKEKLENITAPTTLKQLQSILGLLNFARNFIPDFTELIAPLYALIPKSPKNYVPWQIEHSTTLETLITKLNGAEYLQGRKGDKTLIMKVNASYTTGYIRYYNEGEKKPISYVSIVFSKTELKFTELEKLLTTVHKGLLKALDLSMGQNIHVYSPIVSMQNIQKTPQTAKKALASRWLSWLSYLEDPRIRFFYDPQMPALKDLPAVDTGKDNKKHPSNFQHIFYTDGSAITSPTKEGHLNAGMGIVYFINKDGNLQKQQEWSISLGNHTAQFAEIAAFEFALKKCLPLGGNILVVTDSNYVAKAYNEELDVWASNGFVNNRKKPLKHISKWKSVADLKRLRPDVVVTHEPGHQKLDSSPHAYGNNLADQLATQASFKVHAGKRTADGSEFEKRTADGSEFESPKKKAKVE

SEQ ID NO: 1125 - protein, 2177 aa, synthetic construct
MPAAKRVKLDGGDKKYSIGLDIGTNSVGWAVITDEYKVPSKKFKVLGNTDRHSIKKNLIGALLFDSGETAEATRLKRTARRRYTRRKNRICYLQEIFSNEMAKVDDSFFHRLEESFLVEEDKKHERHPIFGNIVDEVAYHEKYPTIYHLRKKLVDSTDKADLRLIYLALAHMIKFRGHFLIEGDLNPDNSDVDKLFIQLVQTYNQLFEENPINASGVDAKAILSARLSKSRRLENLIAQLPGEKKNGLFGNLIALSLGLTPNFKSNFDLAEDAKLQLSKDTYDDDLDNLLAQIGDQYADLFLAAKNLSDAILLSDILRVNTEITKAPLSASMIKRYDEHHQDLTLLKALVRQQLPEKYKEIFFDQSKNGYAGYIDGGASQEEFYKFIKPILEKMDGTEELLVKLNREDLLRKQRTFDNGSIPHQIHLGELHAILRRQEDFYPFLKDNREKIEKILTFRIPYYVGPLARGNSRFAWMTRKSEETITPWNFEEVVDKGASAQSFIERMTNFDKNLPNEKVLPKHSLLYEYFTVYNELTKVKYVTEGMRKPAFLSGEQKKAIVDLLFKTNRKVTVKQLKEDYFKKIECFDSVEISGVEDRFNASLGTYHDLLKIIKDKDFLDNEENEDILEDIVLTLTLFEDREMIEERLKTYAHLFDDKVMKQLKRRRYTGWGRLSRKLINGIRDKQSGKTILDFLKSDGFANRNFMQLIHDDSLTFKEDIQKAQVSGQGDSLHEHIANLAGSPAIKKGILQTVKVVDELVKVMGRHKPENIVIEMARENQTTQKGQKNSRERMKRIEEGIKELGSQILKEHPVENTQLQNEKLYLYYLQNGRDMYVDQELDINRLSDYDVDHIVPQSFLKDDSIDNKVLTRSDKARGKSDNVPSEEVVKKMKNYWRQLLNAKLITQRKFDNLTKAERGGLSELDKAGFIKRQLVETRQITKHVAQILDSRMNTKYDENDKLIREVKVITLKSKLVSDFRKDFQFYKVREINNYHHAHDAYLNAVVGTALIKKYPKLESEFVYGDYKVYDVRKMIAKSEQEIGKATAKYFFYSNIMNFFKTEITLANGEIRKRPLIETNGETGEIVWDKGRDFATVRKVLSMPQVNIVKKTEVQTGGFSKESILPKRNSDKLIARKKDWDPKKYGGFDSPTVAYSVLVVAKVEKGKSKKLKSVKELLGITIMERSSFEKNPIDFLEAKGYKEVKKDLIIKLPKYSLFELENGRKRMLASAGELQKGNELALPSKYVNFLYLASHYEKLKGSPEDNEQKQLFVEQHKHYLDEIIEQISEFSKRVILADANLDKVLSAYNKHRDKPIREQAENIIHLFTLTNLGAPAAFKYFDTTIDRKRYTSTKEVLDATLIHQSITGLYETRIDLSQLGGDGGGGGGSGGGGSGGGGSGGMDLLKPLTVERKGVKIKGYWNSQADITCVPKDLLQGEEPVRQQNVTTIHGTQEGDVYYVNLKIDGRRINTEVIGTTLDYAIITPGDVPWILKKPLELTIKLDLEEQQGTLLNNSILSKKGKEELKQLFEKYSALWQSWENQVGHRRIRPHKIATGTVKPTPQKQYHINPKAKPDIQIVINDLLKQGVLIQKESTMNTPVYPVPKPNGRWRMVLDYRAVNKVTPLIAVQNQHSYGILGSLFKGRYKTTIDLSNGFWAHPIVPEDYWITAFTWQGKQYCWTVLPQGFLNSPGLFNGDVVDLLQGIPNVEVYVDDVYISHDSEKEHLEYLDILFNRLKEAGYIISLKKSNIANSIVDFLGFQITNEGRGLTDTFKEKLENITAPTTLKQLQSILGLLNFARNFIPDFTELIAPLYALIPKSPKNYVPWQIEHSTTLETLITKLNGAEYLQGRKGDKTLIMKVNASYTTGYIRYYNEGEKKPISYVSIVFSKTELKFTELEKLLTTVHKGLLKALDLSMGQNIHVYSPIVSMQNIQKTPQTAKKALASRWLSWLSYLEDPRIRFFYDPQMPALKDLPAVDTGKDNKKHPSNFQHIFYTDGSAITSPTKEGHLNAGMGIVYFINKDGNLQKQQEWSISLGNHTAQFAEIAAFEFALKKCLPLGGNILVVTDSNYVAKAYNEELDVWASNGFVNNRKKPLKHISKWKSVADLKRLRPDVVVTHEPGHQKLDSSPHAYGNNLADQLATQASFKVHAGKRTADGSEFEKRTADGSEFESPKKKAKVE

SEQ ID NO: 1126 - protein, 2177 aa, synthetic construct
MPAAKRVKLDGGDKKYSIGLDIGTNSVGWAVITDEYKVPSKKFKVLGNTDRHSIKKNLIGALLFDSGETAEATRLKRTARRRYTRRKNRICYLQEIFSNEMAKVDDSFFHRLEESFLVEEDKKHERHPIFGNIVDEVAYHEKYPTIYHLRKKLVDSTDKADLRLIYLALAHMIKFRGHFLIEGDLNPDNSDVDKLFIQLVQTYNQLFEENPINASGVDAKAILSARLSKSRRLENLIAQLPGEKKNGLFGNLIALSLGLTPNFKSNFDLAEDAKLQLSKDTYDDDLDNLLAQIGDQYADLFLAAKNLSDAILLSDILRVNTEITKAPLSASMIKRYDEHHQDLTLLKALVRQQLPEKYKEIFFDQSKNGYAGYIDGGASQEEFYKFIKPILEKMDGTEELLVKLNREDLLRKQRTFDNGSIPHQIHLGELHAILRRQEDFYPFLKDNREKIEKILTFRIPYYVGPLARGNSRFAWMTRKSEETITPWNFEEVVDKGASAQSFIERMTNFDKNLPNEKVLPKHSLLYEYFTVYNELTKVKYVTEGMRKPAFLSGEQKKAIVDLLFKTNRKVTVKQLKEDYFKKIECFDSVEISGVEDRFNASLGTYHDLLKIIKDKDFLDNEENEDILEDIVLTLTLFEDREMIEERLKTYAHLFDDKVMKQLKRRRYTGWGRLSRKLINGIRDKQSGKTILDFLKSDGFANRNFMQLIHDDSLTFKEDIQKAQVSGQGDSLHEHIANLAGSPAIKKGILQTVKVVDELVKVMGRHKPENIVIEMARENQTTQKGQKNSRERMKRIEEGIKELGSQILKEHPVENTQLQNEKLYLYYLQNGRDMYVDQELDINRLSDYDVDHIVPQSFLKDDSIDNKVLTRSDKARGKSDNVPSEEVVKKMKNYWRQLLNAKLITQRKFDNLTKAERGGLSELDKAGFIKRQLVETRQITKHVAQILDSRMNTKYDENDKLIREVKVITLKSKLVSDFRKDFQFYKVREINNYHHAHDAYLNAVVGTALIKKYPKLESEFVYGDYKVYDVRKMIAKSEQEIGKATAKYFFYSNIMNFFKTEITLANGEIRKRPLIETNGETGEIVWDKGRDFATVRKVLSMPQVNIVKKTEVQTGGFSKESILPKRNSDKLIARKKDWDPKKYGGFDSPTVAYSVLVVAKVEKGKSKKLKSVKELLGITIMERSSFEKNPIDFLEAKGYKEVKKDLIIKLPKYSLFELENGRKRMLASAGELQKGNELALPSKYVNFLYLASHYEKLKGSPEDNEQKQLFVEQHKHYLDEIIEQISEFSKRVILADANLDKVLSAYNKHRDKPIREQAENIIHLFTLTNLGAPAAFKYFDTTIDRKRYTSTKEVLDATLIHQSITGLYETRIDLSQLGGDGGEAAAKEAAAKEAAAKGGMDLLKPLTVERKGVKIKGYWNSQADITCVPKDLLQGEEPVRQQNVTTIHGTQEGDVYYVNLKIDGRRINTEVIGTTLDYAIITPGDVPWILKKPLELTIKLDLEEQQGTLLNNSILSKKGKEELKQLFEKYSALWQSWENQVGHRRIRPHKIATGTVKPTPQKQYHINPKAKPDIQIVINDLLKQGVLIQKESTMNTPVYPVPKPNGRWRMVLDYRAVNKVTPLIAVQNQHSYGILGSLFKGRYKTTIDLSNGFWAHPIVPEDYWITAFTWQGKQYCWTVLPQGFLNSPGLFNGDVVDLLQGIPNVEVYVDDVYISHDSEKEHLEYLDILFNRLKEAGYIISLKKSNIANSIVDFLGFQITNEGRGLTDTFKEKLENITAPTTLKQLQSILGLLNFARNFIPDFTELIAPLYALIPKSPKNYVPWQIEHSTTLETLITKLNGAEYLQGRKGDKTLIMKVNASYTTGYIRYYNEGEKKPISYVSIVFSKTELKFTELEKLLTTVHKGLLKALDLSMGQNIHVYSPIVSMQNIQKTPQTAKKALASRWLSWLSYLEDPRIRFFYDPQMPALKDLPAVDTGKDNKKHPSNFQHIFYTDGSAITSPTKEGHLNAGMGIVYFINKDGNLQKQQEWSISLGNHTAQFAEIAAFEFALKKCLPLGGNILVVTDSNYVAKAYNEELDVWASNGFVNNRKKPLKHISKWKSVADLKRLRPDVVVTHEPGHQKLDSSPHAYGNNLADQLATQASFKVHAGKRTADGSEFEKRTADGSEFESPKKKAKVE

SEQ ID NO: 1127 - protein, 2173 aa, synthetic construct
MPAAKRVKLDGGDKKYSIGLDIGTNSVGWAVITDEYKVPSKKFKVLGNTDRHSIKKNLIGALLFDSGETAEATRLKRTARRRYTRRKNRICYLQEIFSNEMAKVDDSFFHRLEESFLVEEDKKHERHPIFGNIVDEVAYHEKYPTIYHLRKKLVDSTDKADLRLIYLALAHMIKFRGHFLIEGDLNPDNSDVDKLFIQLVQTYNQLFEENPINASGVDAKAILSARLSKSRRLENLIAQLPGEKKNGLFGNLIALSLGLTPNFKSNFDLAEDAKLQLSKDTYDDDLDNLLAQIGDQYADLFLAAKNLSDAILLSDILRVNTEITKAPLSASMIKRYDEHHQDLTLLKALVRQQLPEKYKEIFFDQSKNGYAGYIDGGASQEEFYKFIKPILEKMDGTEELLVKLNREDLLRKQRTFDNGSIPHQIHLGELHAILRRQEDFYPFLKDNREKIEKILTFRIPYYVGPLARGNSRFAWMTRKSEETITPWNFEEVVDKGASAQSFIERMTNFDKNLPNEKVLPKHSLLYEYFTVYNELTKVKYVTEGMRKPAFLSGEQKKAIVDLLFKTNRKVTVKQLKEDYFKKIECFDSVEISGVEDRFNASLGTYHDLLKIIKDKDFLDNEENEDILEDIVLTLTLFEDREMIEERLKTYAHLFDDKVMKQLKRRRYTGWGRLSRKLINGIRDKQSGKTILDFLKSDGFANRNFMQLIHDDSLTFKEDIQKAQVSGQGDSLHEHIANLAGSPAIKKGILQTVKVVDELVKVMGRHKPENIVIEMARENQTTQKGQKNSRERMKRIEEGIKELGSQILKEHPVENTQLQNEKLYLYYLQNGRDMYVDQELDINRLSDYDVDHIVPQSFLKDDSIDNKVLTRSDKARGKSDNVPSEEVVKKMKNYWRQLLNAKLITQRKFDNLTKAERGGLSELDKAGFIKRQLVETRQITKHVAQILDSRMNTKYDENDKLIREVKVITLKSKLVSDFRKDFQFYKVREINNYHHAHDAYLNAVVGTALIKKYPKLESEFVYGDYKVYDVRKMIAKSEQEIGKATAKYFFYSNIMNFFKTEITLANGEIRKRPLIETNGETGEIVWDKGRDFATVRKVLSMPQVNIVKKTEVQTGGFSKESILPKRNSDKLIARKKDWDPKKYGGFDSPTVAYSVLVVAKVEKGKSKKLKSVKELLGITIMERSSFEKNPIDFLEAKGYKEVKKDLIIKLPKYSLFELENGRKRMLASAGELQKGNELALPSKYVNFLYLASHYEKLKGSPEDNEQKQLFVEQHKHYLDEIIEQISEFSKRVILADANLDKVLSAYNKHRDKPIREQAENIIHLFTLTNLGAPAAFKYFDTTIDRKRYTSTKEVLDATLIHQSITGLYETRIDLSQLGGDGGEAAAKGSSGGSGGMDLLKPLTVERKGVKIKGYWNSQADITCVPKDLLQGEEPVRQQNVTTIHGTQEGDVYYVNLKIDGRRINTEVIGTTLDYAIITPGDVPWILKKPLELTIKLDLEEQQGTLLNNSILSKKGKEELKQLFEKYSALWQSWENQVGHRRIRPHKIATGTVKPTPQKQYHINPKAKPDIQIVINDLLKQGVLIQKESTMNTPVYPVPKPNGRWRMVLDYRAVNKVTPLIAVQNQHSYGILGSLFKGRYKTTIDLSNGFWAHPIVPEDYWITAFTWQGKQYCWTVLPQGFLNSPGLFNGDVVDLLQGIPNVEVYVDDVYISHDSEKEHLEYLDILFNRLKEAGYIISLKKSNIANSIVDFLGFQITNEGRGLTDTFKEKLENITAPTTLKQLQSILGLLNFARNFIPDFTELIAPLYALIPKSPKNYVPWQIEHSTTLETLITKLNGAEYLQGRKGDKTLIMKVNASYTTGYIRYYNEGEKKPISYVSIVFSKTELKFTELEKLLTTVHKGLLKALDLSMGQNIHVYSPIVSMQNIQKTPQTAKKALASRWLSWLSYLEDPRIRFFYDPQMPALKDLPAVDTGKDNKKHPSNFQHIFYTDGSAITSPTKEGHLNAGMGIVYFINKDGNLQKQQEWSISLGNHTAQFAEIAAFEFALKKCLPLGGNILVVTDSNYVAKAYNEELDVWASNGFVNNRKKPLKHISKWKSVADLKRLRPDVVVTHEPGHQKLDSSPHAYGNNLADQLATQASFKVHAGKRTADGSEFEKRTADGSEFESPKKKAKVE

SEQ ID NO: 1128 - protein, 2171 aa, synthetic construct
MPAAKRVKLDGGDKKYSIGLDIGTNSVGWAVITDEYKVPSKKFKVLGNTDRHSIKKNLIGALLFDSGETAEATRLKRTARRRYTRRKNRICYLQEIFSNEMAKVDDSFFHRLEESFLVEEDKKHERHPIFGNIVDEVAYHEKYPTIYHLRKKLVDSTDKADLRLIYLALAHMIKFRGHFLIEGDLNPDNSDVDKLFIQLVQTYNQLFEENPINASGVDAKAILSARLSKSRRLENLIAQLPGEKKNGLFGNLIALSLGLTPNFKSNFDLAEDAKLQLSKDTYDDDLDNLLAQIGDQYADLFLAAKNLSDAILLSDILRVNTEITKAPLSASMIKRYDEHHQDLTLLKALVRQQLPEKYKEIFFDQSKNGYAGYIDGGASQEEFYKFIKPILEKMDGTEELLVKLNREDLLRKQRTFDNGSIPHQIHLGELHAILRRQEDFYPFLKDNREKIEKILTFRIPYYVGPLARGNSRFAWMTRKSEETITPWNFEEVVDKGASAQSFIERMTNFDKNLPNEKVLPKHSLLYEYFTVYNELTKVKYVTEGMRKPAFLSGEQKKAIVDLLFKTNRKVTVKQLKEDYFKKIECFDSVEISGVEDRFNASLGTYHDLLKIIKDKDFLDNEENEDILEDIVLTLTLFEDREMIEERLKTYAHLFDDKVMKQLKRRRYTGWGRLSRKLINGIRDKQSGKTILDFLKSDGFANRNFMQLIHDDSLTFKEDIQKAQVSGQGDSLHEHIANLAGSPAIKKGILQTVKVVDELVKVMGRHKPENIVIEMARENQTTQKGQKNSRERMKRIEEGIKELGSQILKEHPVENTQLQNEKLYLYYLQNGRDMYVDQELDINRLSDYDVDHIVPQSFLKDDSIDNKVLTRSDKARGKSDNVPSEEVVKKMKNYWRQLLNAKLITQRKFDNLTKAERGGLSELDKAGFIKRQLVETRQITKHVAQILDSRMNTKYDENDKLIREVKVITLKSKLVSDFRKDFQFYKVREINNYHHAHDAYLNAVVGTALIKKYPKLESEFVYGDYKVYDVRKMIAKSEQEIGKATAKYFFYSNIMNFFKTEITLANGEIRKRPLIETNGETGEIVWDKGRDFATVRKVLSMPQVNIVKKTEVQTGGFSKESILPKRNSDKLIARKKDWDPKKYGGFDSPTVAYSVLVVAKVEKGKSKKLKSVKELLGITIMERSSFEKNPIDFLEAKGYKEVKKDLIIKLPKYSLFELENGRKRMLASAGELQKGNELALPSKYVNFLYLASHYEKLKGSPEDNEQKQLFVEQHKHYLDEIIEQISEFSKRVILADANLDKVLSAYNKHRDKPIREQAENIIHLFTLTNLGAPAAFKYFDTTIDRKRYTSTKEVLDATLIHQSITGLYETRIDLSQLGGDGGGGSGGGPAPGGMDLLKPLTVERKGVKIKGYWNSQADITCVPKDLLQGEEPVRQQNVTTIHGTQEGDVYYVNLKIDGRRINTEVIGTTLDYAIITPGDVPWILKKPLELTIKLDLEEQQGTLLNNSILSKKGKEELKQLFEKYSALWQSWENQVGHRRIRPHKIATGTVKPTPQKQYHINPKAKPDIQIVINDLLKQGVLIQKESTMNTPVYPVPKPNGRWRMVLDYRAVNKVTPLIAVQNQHSYGILGSLFKGRYKTTIDLSNGFWAHPIVPEDYWITAFTWQGKQYCWTVLPQGFLNSPGLFNGDVVDLLQGIPNVEVYVDDVYISHDSEKEHLEYLDILFNRLKEAGYIISLKKSNIANSIVDFLGFQITNEGRGLTDTFKEKLENITAPTTLKQLQSILGLLNFARNFIPDFTELIAPLYALIPKSPKNYVPWQIEHSTTLETLITKLNGAEYLQGRKGDKTLIMKVNASYTTGYIRYYNEGEKKPISYVSIVFSKTELKFTELEKLLTTVHKGLLKALDLSMGQNIHVYSPIVSMQNIQKTPQTAKKALASRWLSWLSYLEDPRIRFFYDPQMPALKDLPAVDTGKDNKKHPSNFQHIFYTDGSAITSPTKEGHLNAGMGIVYFINKDGNLQKQQEWSISLGNHTAQFAEIAAFEFALKKCLPLGGNILVVTDSNYVAKAYNEELDVWASNGFVNNRKKPLKHISKWKSVADLKRLRPDVVVTHEPGHQKLDSSPHAYGNNLADQLATQASFKVHAGKRTADGSEFEKRTADGSEFESPKKKAKVE

SEQ ID NO: 1129 - protein, 2208 aa, synthetic construct
MPAAKRVKLDGGDKKYSIGLDIGTNSVGWAVITDEYKVPSKKFKVLGNTDRHSIKKNLIGALLFDSGETAEATRLKRTARRRYTRRKNRICYLQEIFSNEMAKVDDSFFHRLEESFLVEEDKKHERHPIFGNIVDEVAYHEKYPTIYHLRKKLVDSTDKADLRLIYLALAHMIKFRGHFLIEGDLNPDNSDVDKLFIQLVQTYNQLFEENPINASGVDAKAILSARLSKSRRLENLIAQLPGEKKNGLFGNLIALSLGLTPNFKSNFDLAEDAKLQLSKDTYDDDLDNLLAQIGDQYADLFLAAKNLSDAILLSDILRVNTEITKAPLSASMIKRYDEHHQDLTLLKALVRQQLPEKYKEIFFDQSKNGYAGYIDGGASQEEFYKFIKPILEKMDGTEELLVKLNREDLLRKQRTFDNGSIPHQIHLGELHAILRRQEDFYPFLKDNREKIEKILTFRIPYYVGPLARGNSRFAWMTRKSEETITPWNFEEVVDKGASAQSFIERMTNFDKNLPNEKVLPKHSLLYEYFTVYNELTKVKYVTEGMRKPAFLSGEQKKAIVDLLFKTNRKVTVKQLKEDYFKKIECFDSVEISGVEDRFNASLGTYHDLLKIIKDKDFLDNEENEDILEDIVLTLTLFEDREMIEERLKTYAHLFDDKVMKQLKRRRYTGWGRLSRKLINGIRDKQSGKTILDFLKSDGFANRNFMQLIHDDSLTFKEDIQKAQVSGQGDSLHEHIANLAGSPAIKKGILQTVKVVDELVKVMGRHKPENIVIEMARENQTTQKGQKNSRERMKRIEEGIKELGSQILKEHPVENTQLQNEKLYLYYLQNGRDMYVDQELDINRLSDYDVDHIVPQSFLKDDSIDNKVLTRSDKARGKSDNVPSEEVVKKMKNYWRQLLNAKLITQRKFDNLTKAERGGLSELDKAGFIKRQLVETRQITKHVAQILDSRMNTKYDENDKLIREVKVITLKSKLVSDFRKDFQFYKVREINNYHHAHDAYLNAVVGTALIKKYPKLESEFVYGDYKVYDVRKMIAKSEQEIGKATAKYFFYSNIMNFFKTEITLANGEIRKRPLIETNGETGEIVWDKGRDFATVRKVLSMPQVNIVKKTEVQTGGFSKESILPKRNSDKLIARKKDWDPKKYGGFDSPTVAYSVLVVAKVEKGKSKKLKSVKELLGITIMERSSFEKNPIDFLEAKGYKEVKKDLIIKLPKYSLFELENGRKRMLASAGELQKGNELALPSKYVNFLYLASHYEKLKGSPEDNEQKQLFVEQHKHYLDEIIEQISEFSKRVILADANLDKVLSAYNKHRDKPIREQAENIIHLFTLTNLGAPAAFKYFDTTIDRKRYTSTKEVLDATLIHQSITGLYETRIDLSQLGGDGGAEAAAKEAAAKEAAAKEAAAKALEAEAAAKEAAAKEAAAKEAAAKAGGMDLLKPLTVERKGVKIKGYWNSQADITCVPKDLLQGEEPVRQQNVTTIHGTQEGDVYYVNLKIDGRRINTEVIGTTLDYAIITPGDVPWILKKPLELTIKLDLEEQQGTLLNNSILSKKGKEELKQLFEKYSALWQSWENQVGHRRIRPHKIATGTVKPTPQKQYHINPKAKPDIQIVINDLLKQGVLIQKESTMNTPVYPVPKPNGRWRMVLDYRAVNKVTPLIAVQNQHSYGILGSLFKGRYKTTIDLSNGFWAHPIVPEDYWITAFTWQGKQYCWTVLPQGFLNSPGLFNGDVVDLLQGIPNVEVYVDDVYISHDSEKEHLEYLDILFNRLKEAGYIISLKKSNIANSIVDFLGFQITNEGRGLTDTFKEKLENITAPTTLKQLQSILGKLNFARNFIPDFTELIAPLYALIPKSPKNYVPWQIEHSTTLETLITKLNGAEYLQGRKGDKTLIMKVNASYTTGYIRYYNEGEKKPISYVSIVFSKTELKFTELEKLLTTVHKGLLKALDLSMGQNIHVYSPIVSMQNIQKTPQTAKKALASRWLSWLSYLEDPRIRFFYDPQMPALKDLPAVDTGKDNKKHPSNFQHIFYTDGSAITSPTKEGHLNAGMGIVYFINKDGNLQKQQEWSISLGNHTAQFAEIAAFEFALKKCLPLGGNILVVTDSNYVAKAYNEELDVWASNGFVNNRKKPLKHISKWKSVADLKRLRPDVVVTHEPGHQKLDSSPHAYGNNLADQLATQASFKVHAGKRTADGSEFEKRTADGSEFESPKKKAKVE

SEQ ID NO: 1130 - protein, 2171 aa, synthetic construct
MPAAKRVKLDGGDKKYSIGLDIGTNSVGWAVITDEYKVPSKKFKVLGNTDRHSIKKNLIGALLFDSGETAEATRLKRTARRRYTRRKNRICYLQEIFSNEMAKVDDSFFHRLEESFLVEEDKKHERHPIFGNIVDEVAYHEKYPTIYHLRKKLVDSTDKADLRLIYLALAHMIKFRGHFLIEGDLNPDNSDVDKLFIQLVQTYNQLFEENPINASGVDAKAILSARLSKSRRLENLIAQLPGEKKNGLFGNLIALSLGLTPNFKSNFDLAEDAKLQLSKDTYDDDLDNLLAQIGDQYADLFLAAKNLSDAILLSDILRVNTEITKAPLSASMIKRYDEHHQDLTLLKALVRQQLPEKYKEIFFDQSKNGYAGYIDGGASQEEFYKFIKPILEKMDGTEELLVKLNREDLLRKQRTFDNGSIPHQIHLGELHAILRRQEDFYPFLKDNREKIEKILTFRIPYYVGPLARGNSRFAWMTRKSEETITPWNFEEVVDKGASAQSFIERMTNFDKNLPNEKVLPKHSLLYEYFTVYNELTKVKYVTEGMRKPAFLSGEQKKAIVDLLFKTNRKVTVKQLKEDYFKKIECFDSVEISGVEDRFNASLGTYHDLLKIIKDKDFLDNEENEDILEDIVLTLTLFEDREMIEERLKTYAHLFDDKVMKQLKRRRYTGWGRLSRKLINGIRDKQSGKTILDFLKSDGFANRNFMQLIHDDSLTFKEDIQKAQVSGQGDSLHEHIANLAGSPAIKKGILQTVKVVDELVKVMGRHKPENIVIEMARENQTTQKGQKNSRERMKRIEEGIKELGSQILKEHPVENTQLQNEKLYLYYLQNGRDMYVDQELDINRLSDYDVDHIVPQSFLKDDSIDNKVLTRSDKARGKSDNVPSEEVVKKMKNYWRQLLNAKLITQRKFDNLTKAERGGLSELDKAGFIKRQLVETRQITKHVAQILDSRMNTKYDENDKLIREVKVITLKSKLVSDFRKDFQFYKVREINNYHHAHDAYLNAVVGTALIKKYPKLESEFVYGDYKVYDVRKMIAKSEQEIGKATAKYFFYSNIMNFFKTEITLANGEIRKRPLIETNGETGEIVWDKGRDFATVRKVLSMPQVNIVKKTEVQTGGFSKESILPKRNSDKLIARKKDWDPKKYGGFDSPTVAYSVLVVAKVEKGKSKKLKSVKELLGITIMERSSFEKNPIDFLEAKGYKEVKKDLIIKLPKYSLFELENGRKRMLASAGELQKGNELALPSKYVNFLYLASHYEKLKGSPEDNEQKQLFVEQHKHYLDEIIEQISEFSKRVILADANLDKVLSAYNKHRDKPIREQAENIIHLFTLTNLGAPAAFKYFDTTIDRKRYTSTKEVLDATLIHQSITGLYETRIDLSQLGGDGGGSSPAPGGSGGMDLLKPLTVERKGVKIKGYWNSQADITCVPKDLLQGEEPVRQQNVTTIHGTQEGDVYYVNLKIDGRRINTEVIGTTLDYAIITPGDVPWILKKPLELTIKLDLEEQQGTLLNNSILSKKGKEELKQLFEKYSALWQSWENQVGHRRIRPHKIATGTVKPTPQKQYHINPKAKPDIQIVINDLLKQGVLIQKESTMNTPVYPVPKPNGRWRMVLDYRAVNKVTPLIAVQNQHSYGILGSLFKGRYKTTIDLSNGFWAHPIVPEDYWITAFTWQGKQYCWTVLPQGFLNSPGLFNGDVVDLLQGIPNVEVYVDDVYISHDSEKEHLEYLDILFNRLKEAGYIISLKKSNIANSIVDFLGFQITNEGRGLTDTFKEKLENITAPTTLKQLQSILGKLNFARNFIPDFTELIAPLYALIPKSPKNYVPWQIEHSTTLETLITKLNGAEYLQGRKGDKTLIMKVNASYTTGYIRYYNEGEKKPISYVSIVFSKTELKFTELEKLLTTVHKGLLKALDLSMGQNIHVYSPIVSMQNIQKTPQTAKKALASRWLSWLSYLEDPRIRFFYDPQMPALKDLPAVDTGKDNKKHPSNFQHIFYTDGSAITSPTKEGHLNAGMGIVYFINKDGNLQKQQEWSISLGNHTAQFAEIAAFEFALKKCLPLGGNILVVTDSNYVAKAYNEELDVWASNGFVNNRKKPLKHISKWKSVADLKRLRPDVVVTHEPGHQKLDSSPHAYGNNLADQLATQASFKVHAGKRTADGSEFEKRTADGSEFESPKKKAKVE

SEQ ID NO: 1131 - protein, 2182 aa, synthetic construct
MPAAKRVKLDGGDKKYSIGLDIGTNSVGWAVITDEYKVPSKKFKVLGNTDRHSIKKNLIGALLFDSGETAEATRLKRTARRRYTRRKNRICYLQEIFSNEMAKVDDSFFHRLEESFLVEEDKKHERHPIFGNIVDEVAYHEKYPTIYHLRKKLVDSTDKADLRLIYLALAHMIKFRGHFLIEGDLNPDNSDVDKLFIQLVQTYNQLFEENPINASGVDAKAILSARLSKSRRLENLIAQLPGEKKNGLFGNLIALSLGLTPNFKSNFDLAEDAKLQLSKDTYDDDLDNLLAQIGDQYADLFLAAKNLSDAILLSDILRVNTEITKAPLSASMIKRYDEHHQDLTLLKALVRQQLPEKYKEIFFDQSKNGYAGYIDGGASQEEFYKFIKPILEKMDGTEELLVKLNREDLLRKQRTFDNGSIPHQIHLGELHAILRRQEDFYPFLKDNREKIEKILTFRIPYYVGPLARGNSRFAWMTRKSEETITPWNFEEVVDKGASAQSFIERMTNFDKNLPNEKVLPKHSLLYEYFTVYNELTKVKYVTEGMRKPAFLSGEQKKAIVDLLFKTNRKVTVKQLKEDYFKKIECFDSVEISGVEDRFNASLGTYHDLLKIIKDKDFLDNEENEDILEDIVLTLTLFEDREMIEERLKTYAHLFDDKVMKQLKRRRYTGWGRLSRKLINGIRDKQSGKTILDFLKSDGFANRNFMQLIHDDSLTFKEDIQKAQVSGQGDSLHEHIANLAGSPAIKKGILQTVKVVDELVKVMGRHKPENIVIEMARENQTTQKGQKNSRERMKRIEEGIKELGSQILKEHPVENTQLQNEKLYLYYLQNGRDMYVDQELDINRLSDYDVDHIVPQSFLKDDSIDNKVLTRSDKARGKSDNVPSEEVVKKMKNYWRQLLNAKLITQRKFDNLTKAERGGLSELDKAGFIKRQLVETRQITKHVAQILDSRMNTKYDENDKLIREVKVITLKSKLVSDFRKDFQFYKVREINNYHHAHDAYLNAVVGTALIKKYPKLESEFVYGDYKVYDVRKMIAKSEQEIGKATAKYFFYSNIMNFFKTEITLANGEIRKRPLIETNGETGEIVWDKGRDFATVRKVLSMPQVNIVKKTEVQTGGFSKESILPKRNSDKLIARKKDWDPKKYGGFDSPTVAYSVLVVAKVEKGKSKKLKSVKELLGITIMERSSFEKNPIDFLEAKGYKEVKKDLIIKLPKYSLFELENGRKRMLASAGELQKGNELALPSKYVNFLYLASHYEKLKGSPEDNEQKQLFVEQHKHYLDEIIEQISEFSKRVILADANLDKVLSAYNKHRDKPIREQAENIIHLFTLTNLGAPAAFKYFDTTIDRKRYTSTKEVLDATLIHQSITGLYETRIDLSQLGGDGGGGGGSGGGGSGGGGSGGGGSGGMDLLKPLTVERKGVKIKGYWNSQADITCVPKDLLQGEEPVRQQNVTTIHGTQEGDVYYVNLKIDGRRINTEVIGTTLDYAIITPGDVPWILKKPLELTIKLDLEEQQGTLLNNSILSKKGKEELKQLFEKYSALWQSWENQVGHRRIRPHKIATGTVKPTPQKQYHINPKAKPDIQIVINDLLKQGVLIQKESTMNTPVYPVPKPNGRWRMVLDYRAVNKVTPLIAVQNQHSYGILGSLFKGRYKTTIDLSNGFWAHPIVPEDYWITAFTWQGKQYCWTVLPQGFLNSPGLFNGDVVDLLQGIPNVEVYVDDVYISHDSEKEHLEYLDILFNRLKEAGYIISLKKSNIANSIVDFLGFQITNEGRGLTDTFKEKLENITAPTTLKQLQSILGKLNFARNFIPDFTELIAPLYALIPKSPKNYVPWQIEHSTTLETLITKLNGAEYLQGRKGDKTLIMKVNASYTTGYIRYYNEGEKKPISYVSIVFSKTELKFTELEKLLTTVHKGLLKALDLSMGQNIHVYSPIVSMQNIQKTPQTAKKALASRWLSWLSYLEDPRIRFFYDPQMPALKDLPAVDTGKDNKKHPSNFQHIFYTDGSAITSPTKEGHLNAGMGIVYFINKDGNLQKQQEWSISLGNHTAQFAEIAAFEFALKKCLPLGGNILVVTDSNYVAKAYNEELDVWASNGFVNNRKKPLKHISKWKSVADLKRLRPDVVVTHEPGHQKLDSSPHAYGNNLADQLATQASFKVHAGKRTADGSEFEKRTADGSEFESPKKKAKVE

SEQ ID NO: 1132 - protein, 2167 aa, synthetic construct
MPAAKRVKLDGGDKKYSIGLDIGTNSVGWAVITDEYKVPSKKFKVLGNTDRHSIKKNLIGALLFDSGETAEATRLKRTARRRYTRRKNRICYLQEIFSNEMAKVDDSFFHRLEESFLVEEDKKHERHPIFGNIVDEVAYHEKYPTIYHLRKKLVDSTDKADLRLIYLALAHMIKFRGHFLIEGDLNPDNSDVDKLFIQLVQTYNQLFEENPINASGVDAKAILSARLSKSRRLENLIAQLPGEKKNGLFGNLIALSLGLTPNFKSNFDLAEDAKLQLSKDTYDDDLDNLLAQIGDQYADLFLAAKNLSDAILLSDILRVNTEITKAPLSASMIKRYDEHHQDLTLLKALVRQQLPEKYKEIFFDQSKNGYAGYIDGGASQEEFYKFIKPILEKMDGTEELLVKLNREDLLRKQRTFDNGSIPHQIHLGELHAILRRQEDFYPFLKDNREKIEKILTFRIPYYVGPLARGNSRFAWMTRKSEETITPWNFEEVVDKGASAQSFIERMTNFDKNLPNEKVLPKHSLLYEYFTVYNELTKVKYVTEGMRKPAFLSGEQKKAIVDLLFKTNRKVTVKQLKEDYFKKIECFDSVEISGVEDRFNASLGTYHDLLKIIKDKDFLDNEENEDILEDIVLTLTLFEDREMIEERLKTYAHLFDDKVMKQLKRRRYTGWGRLSRKLINGIRDKQSGKTILDFLKSDGFANRNFMQLIHDDSLTFKEDIQKAQVSGQGDSLHEHIANLAGSPAIKKGILQTVKVVDELVKVMGRHKPENIVIEMARENQTTQKGQKNSRERMKRIEEGIKELGSQILKEHPVENTQLQNEKLYLYYLQNGRDMYVDQELDINRLSDYDVDHIVPQSFLKDDSIDNKVLTRSDKARGKSDNVPSEEVVKKMKNYWRQLLNAKLITQRKFDNLTKAERGGLSELDKAGFIKRQLVETRQITKHVAQILDSRMNTKYDENDKLIREVKVITLKSKLVSDFRKDFQFYKVREINNYHHAHDAYLNAVVGTALIKKYPKLESEFVYGDYKVYDVRKMIAKSEQEIGKATAKYFFYSNIMNFFKTEITLANGEIRKRPLIETNGETGEIVWDKGRDFATVRKVLSMPQVNIVKKTEVQTGGFSKESILPKRNSDKLIARKKDWDPKKYGGFDSPTVAYSVLVVAKVEKGKSKKLKSVKELLGITIMERSSFEKNPIDFLEAKGYKEVKKDLIIKLPKYSLFELENGRKRMLASAGELQKGNELALPSKYVNFLYLASHYEKLKGSPEDNEQKQLFVEQHKHYLDEIIEQISEFSKRVILADANLDKVLSAYNKHRDKPIREQAENIIHLFTLTNLGAPAAFKYFDTTIDRKRYTSTKEVLDATLIHQSITGLYETRIDLSQLGGDGGEAAAKGGMDLLKPLTVERKGVKIKGYWNSQADITCVPKDLLQGEEPVRQQNVTTIHGTQEGDVYYVNLKIDGRRINTEVIGTTLDYAIITPGDVPWILKKPLELTIKLDLEEQQGTLLNNSILSKKGKEELKQLFEKYSALWQSWENQVGHRRIRPHKIATGTVKPTPQKQYHINPKAKPDIQIVINDLLKQGVLIQKESTMNTPVYPVPKPNGRWRMVLDYRAVNKVTPLIAVQNQHSYGILGSLFKGRYKTTIDLSNGFWAHPIVPEDYWITAFTWQGKQYCWTVLPQGFLNSPGLFNGDVVDLLQGIPNVEVYVDDVYISHDSEKEHLEYLDILFNRLKEAGYIISLKKSNIANSIVDFLGFQITNEGRGLTDTFKEKLENITAPTTLKQLQSILGKLNFARNFIPDFTELIAPLYALIPKSPKNYVPWQIEHSTTLETLITKLNGAEYLQGRKGDKTLIMKVNASYTTGYIRYYNEGEKKPISYVSIVFSKTELKFTELEKLLTTVHKGLLKALDLSMGQNIHVYSPIVSMQNIQKTPQTAKKALASRWLSWLSYLEDPRIRFFYDPQMPALKDLPAVDTGKDNKKHPSNFQHIFYTDGSAITSPTKEGHLNAGMGIVYFINKDGNLQKQQEWSISLGNHTAQFAEIAAFEFALKKCLPLGGNILVVTDSNYVAKAYNEELDVWASNGFVNNRKKPLKHISKWKSVADLKRLRPDVVVTHEPGHQKLDSSPHAYGNNLADQLATQASFKVHAGKRTADGSEFEKRTADGSEFESPKKKAKVE

SEQ ID NO: 1133 - protein, 2174 aa, synthetic construct
MPAAKRVKLDGGDKKYSIGLDIGTNSVGWAVITDEYKVPSKKFKVLGNTDRHSIKKNLIGALLFDSGETAEATRLKRTARRRYTRRKNRICYLQEIFSNEMAKVDDSFFHRLEESFLVEEDKKHERHPIFGNIVDEVAYHEKYPTIYHLRKKLVDSTDKADLRLIYLALAHMIKFRGHFLIEGDLNPDNSDVDKLFIQLVQTYNQLFEENPINASGVDAKAILSARLSKSRRLENLIAQLPGEKKNGLFGNLIALSLGLTPNFKSNFDLAEDAKLQLSKDTYDDDLDNLLAQIGDQYADLFLAAKNLSDAILLSDILRVNTEITKAPLSASMIKRYDEHHQDLTLLKALVRQQLPEKYKEIFFDQSKNGYAGYIDGGASQEEFYKFIKPILEKMDGTEELLVKLNREDLLRKQRTFDNGSIPHQIHLGELHAILRRQEDFYPFLKDNREKIEKILTFRIPYYVGPLARGNSRFAWMTRKSEETITPWNFEEVVDKGASAQSFIERMTNFDKNLPNEKVLPKHSLLYEYFTVYNELTKVKYVTEGMRKPAFLSGEQKKAIVDLLFKTNRKVTVKQLKEDYFKKIECFDSVEISGVEDRFNASLGTYHDLLKIIKDKDFLDNEENEDILEDIVLTLTLFEDREMIEERLKTYAHLFDDKVMKQLKRRRYTGWGRLSRKLINGIRDKQSGKTILDFLKSDGFANRNFMQLIHDDSLTFKEDIQKAQVSGQGDSLHEHIANLAGSPAIKKGILQTVKVVDELVKVMGRHKPENIVIEMARENQTTQKGQKNSRERMKRIEEGIKELGSQILKEHPVENTQLQNEKLYLYYLQNGRDMYVDQELDINRLSDYDVDHIVPQSFLKDDSIDNKVLTRSDKARGKSDNVPSEEVVKKMKNYWRQLLNAKLITQRKFDNLTKAERGGLSELDKAGFIKRQLVETRQITKHVAQILDSRMNTKYDENDKLIREVKVITLKSKLVSDFRKDFQFYKVREINNYHHAHDAYLNAVVGTALIKKYPKLESEFVYGDYKVYDVRKMIAKSEQEIGKATAKYFFYSNIMNFFKTEITLANGEIRKRPLIETNGETGEIVWDKGRDFATVRKVLSMPQVNIVKKTEVQTGGFSKESILPKRNSDKLIARKKDWDPKKYGGFDSPTVAYSVLVVAKVEKGKSKKLKSVKELLGITIMERSSFEKNPIDFLEAKGYKEVKKDLIIKLPKYSLFELENGRKRMLASAGELQKGNELALPSKYVNFLYLASHYEKLKGSPEDNEQKQLFVEQHKHYLDEIIEQISEFSKRVILADANLDKVLSAYNKHRDKPIREQAENIIHLFTLTNLGAPAAFKYFDTTIDRKRYTSTKEVLDATLIHQSITGLYETRIDLSQLGGDGGGSAGSAAGSGEFGGMDLLKPLTVERKGVKIKGYWNSQADITCVPKDLLQGEEPVRQQNVTTIHGTQEGDVYYVNLKIDGRRINTEVIGTTLDYAIITPGDVPWILKKPLELTIKLDLEEQQGTLLNNSILSKKGKEELKQLFEKYSALWQSWENQVGHRRIRPHKIATGTVKPTPQKQYHINPKAKPDIQIVINDLLKQGVLIQKESTMNTPVYPVPKPNGRWRMVLDYRAVNKVTPLIAVQNQHSYGILGSLFKGRYKTTIDLSNGFWAHPIVPEDYWITAFTWQGKQYCWTVLPQGFLNSPGLFNGDVVDLLQGIPNVEVYVDDVYISHDSEKEHLEYLDILFNRLKEAGYIISLKKSNIANSIVDFLGFQITNEGRGLTDTFKEKLENITAPTTLKQLQSILGKLNFARNFIPDFTELIAPLYALIPKSPKNYVPWQIEHSTTLETLITKLNGAEYLQGRKGDKTLIMKVNASYTTGYIRYYNEGEKKPISYVSIVFSKTELKFTELEKLLTTVHKGLLKALDLSMGQNIHVYSPIVSMQNIQKTPQTAKKALASRWLSWLSYLEDPRIRFFYDPQMPALKDLPAVDTGKDNKKHPSNFQHIFYTDGSAITSPTKEGHLNAGMGIVYFINKDGNLQKQQEWSISLGNHTAQFAEIAAFEFALKKCLPLGGNILVVTDSNYVAKAYNEELDVWASNGFVNNRKKPLKHISKWKSVADLKRLRPDVVVTHEPGHQKLDSSPHAYGNNLADQLATQASFKVHAGKRTADGSEFEKRTADGSEFESPKKKAKVE

SEQ ID NO: 1134 - protein, 2109 aa, synthetic construct
MPAAKRVKLDGGDKKYSIGLDIGTNSVGWAVITDEYKVPSKKFKVLGNTDRHSIKKNLIGALLFDSGETAEATRLKRTARRRYTRRKNRICYLQEIFSNEMAKVDDSFFHRLEESFLVEEDKKHERHPIFGNIVDEVAYHEKYPTIYHLRKKLVDSTDKADLRLIYLALAHMIKFRGHFLIEGDLNPDNSDVDKLFIQLVQTYNQLFEENPINASGVDAKAILSARLSKSRRLENLIAQLPGEKKNGLFGNLIALSLGLTPNFKSNFDLAEDAKLQLSKDTYDDDLDNLLAQIGDQYADLFLAAKNLSDAILLSDILRVNTEITKAPLSASMIKRYDEHHQDLTLLKALVRQQLPEKYKEIFFDQSKNGYAGYIDGGASQEEFYKFIKPILEKMDGTEELLVKLNREDLLRKQRTFDNGSIPHQIHLGELHAILRRQEDFYPFLKDNREKIEKILTFRIPYYVGPLARGNSRFAWMTRKSEETITPWNFEEVVDKGASAQSFIERMTNFDKNLPNEKVLPKHSLLYEYFTVYNELTKVKYVTEGMRKPAFLSGEQKKAIVDLLFKTNRKVTVKQLKEDYFKKIECFDSVEISGVEDRFNASLGTYHDLLKIIKDKDFLDNEENEDILEDIVLTLTLFEDREMIEERLKTYAHLFDDKVMKQLKRRRYTGWGRLSRKLINGIRDKQSGKTILDFLKSDGFANRNFMQLIHDDSLTFKEDIQKAQVSGQGDSLHEHIANLAGSPAIKKGILQTVKVVDELVKVMGRHKPENIVIEMARENQTTQKGQKNSRERMKRIEEGIKELGSQILKEHPVENTQLQNEKLYLYYLQNGRDMYVDQELDINRLSDYDVDHIVPQSFLKDDSIDNKVLTRSDKARGKSDNVPSEEVVKKMKNYWRQLLNAKLITQRKFDNLTKAERGGLSELDKAGFIKRQLVETRQITKHVAQILDSRMNTKYDENDKLIREVKVITLKSKLVSDFRKDFQFYKVREINNYHHAHDAYLNAVVGTALIKKYPKLESEFVYGDYKVYDVRKMIAKSEQEIGKATAKYFFYSNIMNFFKTEITLANGEIRKRPLIETNGETGEIVWDKGRDFATVRKVLSMPQVNIVKKTEVQTGGFSKESILPKRNSDKLIARKKDWDPKKYGGFDSPTVAYSVLVVAKVEKGKSKKLKSVKELLGITIMERSSFEKNPIDFLEAKGYKEVKKDLIIKLPKYSLFELENGRKRMLASAGELQKGNELALPSKYVNFLYLASHYEKLKGSPEDNEQKQLFVEQHKHYLDEIIEQISEFSKRVILADANLDKVLSAYNKHRDKPIREQAENIIHLFTLTNLGAPAAFKYFDTTIDRKRYTSTKEVLDATLIHQSITGLYETRIDLSQLGGDGGEAAAKEAAAKEAAAKEAAAKEAAAKGGTLQLEEEYRLFEPESTQKQEMDIWLKNFPQAWAETGGMGTAHCQAPVLIQLKATATPISIRQYPMPHEAYQGIKPHIRRMLDQGILKPCQSPWNTPLLPVKKPGTEDYRPVQDLREVNKRVEDIHPTVPNPYNLLSTLPPSHPWYTVLDLKDAFFCLRLHSESQLLFAFEWRDPEIGLSGQLTWTRLPQGFKNSPTLFDEALHSDLADFRVRYPALVLLQYVDDLLLAAATRTECLEGTKALLETLGNKGYRASAKKAQICLQEVTYLGYSLKDGQRWLTKARKEAILSIPVPKNSRQVREFLGTAGYCRLWIPGFAELAAPLYPLTRPGTLFQWGTEQQLAFEDIKKALLSSPALGLPDITKPFELFIDENSGFAKGVLVQKLGPWKRPVAYLSKKLDTVASGWPPCLRMVAAIAILVKDAGKLTLGQPLTILTSHPVEALVRQPPNKWLSNARMTHYQAMLLDAERVHFGPTVSLNPATLLPLPSGGNHHDCLQILAETHGTRPDLTDQPLPDADLTWYTDGSSFIRNGEREAGAAVTTESEVIWAAPLPPGTSAQRAELIALTQALKMAEGKKLTVYTDSRYAFATTHVHGEIYRRRGLLTSEGKEIKNKNEILALLEALFLPKRLSIIHCPGHQKGDSPQAKGNRLADDTAKKAATETHSSLTVLPAGKRTADGSEFEKRTADGSEFESPKKKAKVE

SEQ ID NO: 1135 - protein, 2095 aa, synthetic construct
MPAAKRVKLDGGDKKYSIGLDIGTNSVGWAVITDEYKVPSKKFKVLGNTDRHSIKKNLIGALLFDSGETAEATRLKRTARRRYTRRKNRICYLQEIFSNEMAKVDDSFFHRLEESFLVEEDKKHERHPIFGNIVDEVAYHEKYPTIYHLRKKLVDSTDKADLRLIYLALAHMIKFRGHFLIEGDLNPDNSDVDKLFIQLVQTYNQLFEENPINASGVDAKAILSARLSKSRRLENLIAQLPGEKKNGLFGNLIALSLGLTPNFKSNFDLAEDAKLQLSKDTYDDDLDNLLAQIGDQYADLFLAAKNLSDAILLSDILRVNTEITKAPLSASMIKRYDEHHQDLTLLKALVRQQLPEKYKEIFFDQSKNGYAGYIDGGASQEEFYKFIKPILEKMDGTEELLVKLNREDLLRKQRTFDNGSIPHQIHLGELHAILRRQEDFYPFLKDNREKIEKILTFRIPYYVGPLARGNSRFAWMTRKSEETITPWNFEEVVDKGASAQSFIERMTNFDKNLPNEKVLPKHSLLYEYFTVYNELTKVKYVTEGMRKPAFLSGEQKKAIVDLLFKTNRKVTVKQLKEDYFKKIECFDSVEISGVEDRFNASLGTYHDLLKIIKDKDFLDNEENEDILEDIVLTLTLFEDREMIEERLKTYAHLFDDKVMKQLKRRRYTGWGRLSRKLINGIRDKQSGKTILDFLKSDGFANRNFMQLIHDDSLTFKEDIQKAQVSGQGDSLHEHIANLAGSPAIKKGILQTVKVVDELVKVMGRHKPENIVIEMARENQTTQKGQKNSRERMKRIEEGIKELGSQILKEHPVENTQLQNEKLYLYYLQNGRDMYVDQELDINRLSDYDVDHIVPQSFLKDDSIDNKVLTRSDKARGKSDNVPSEEVVKKMKNYWRQLLNAKLITQRKFDNLTKAERGGLSELDKAGFIKRQLVETRQITKHVAQILDSRMNTKYDENDKLIREVKVITLKSKLVSDFRKDFQFYKVREINNYHHAHDAYLNAVVGTALIKKYPKLESEFVYGDYKVYDVRKMIAKSEQEIGKATAKYFFYSNIMNFFKTEITLANGEIRKRPLIETNGETGEIVWDKGRDFATVRKVLSMPQVNIVKKTEVQTGGFSKESILPKRNSDKLIARKKDWDPKKYGGFDSPTVAYSVLVVAKVEKGKSKKLKSVKELLGITIMERSSFEKNPIDFLEAKGYKEVKKDLIIKLPKYSLFELENGRKRMLASAGELQKGNELALPSKYVNFLYLASHYEKLKGSPEDNEQKQLFVEQHKHYLDEIIEQISEFSKRVILADANLDKVLSAYNKHRDKPIREQAENIIHLFTLTNLGAPAAFKYFDTTIDRKRYTSTKEVLDATLIHQSITGLYETRIDLSQLGGDGGGGSEAAAKPAPGGTLQLEEEYRLFEPESTQKQEMDIWLKNFPQAWAETGGMGTAHCQAPVLIQLKATATPISIRQYPMPHEAYQGIKPHIRRMLDQGILKPCQSPWNTPLLPVKKPGTEDYRPVQDLREVNKRVEDIHPTVPNPYNLLSTLPPSHPWYTVLDLKDAFFCLRLHSESQLLFAFEWRDPEIGLSGQLTWTRLPQGFKNSPTLFDEALHSDLADFRVRYPALVLLQYVDDLLLAAATRTECLEGTKALLETLGNKGYRASAKKAQICLQEVTYLGYSLKDGQRWLTKARKEAILSIPVPKNSRQVREFLGTAGYCRLWIPGFAELAAPLYPLTRPGTLFQWGTEQQLAFEDIKKALLSSPALGLPDITKPFELFIDENSGFAKGVLVQKLGPWKRPVAYLSKKLDTVASGWPPCLRMVAAIAILVKDAGKLTLGQPLTILTSHPVEALVRQPPNKWLSNARMTHYQAMLLDAERVHFGPTVSLNPATLLPLPSGGNHHDCLQILAETHGTRPDLTDQPLPDADLTWYTDGSSFIRNGEREAGAAVTTESEVIWAAPLPPGTSAQRAELIALTQALKMAEGKKLTVYTDSRYAFATTHVHGEIYRRRGLLTSEGKEIKNKNEILALLEALFLPKRLSIIHCPGHQKGDSPQAKGNRLADDTAKKAATETHSSLTVLPAGKRTADGSEFEKRTADGSEFESPKKKAKVE

SEQ ID NO: 1136 - protein, 2093 aa, synthetic construct
MPAAKRVKLDGGDKKYSIGLDIGTNSVGWAVITDEYKVPSKKFKVLGNTDRHSIKKNLIGALLFDSGETAEATRLKRTARRRYTRRKNRICYLQEIFSNEMAKVDDSFFHRLEESFLVEEDKKHERHPIFGNIVDEVAYHEKYPTIYHLRKKLVDSTDKADLRLIYLALAHMIKFRGHFLIEGDLNPDNSDVDKLFIQLVQTYNQLFEENPINASGVDAKAILSARLSKSRRLENLIAQLPGEKKNGLFGNLIALSLGLTPNFKSNFDLAEDAKLQLSKDTYDDDLDNLLAQIGDQYADLFLAAKNLSDAILLSDILRVNTEITKAPLSASMIKRYDEHHQDLTLLKALVRQQLPEKYKEIFFDQSKNGYAGYIDGGASQEEFYKFIKPILEKMDGTEELLVKLNREDLLRKQRTFDNGSIPHQIHLGELHAILRRQEDFYPFLKDNREKIEKILTFRIPYYVGPLARGNSRFAWMTRKSEETITPWNFEEVVDKGASAQSFIERMTNFDKNLPNEKVLPKHSLLYEYFTVYNELTKVKYVTEGMRKPAFLSGEQKKAIVDLLFKTNRKVTVKQLKEDYFKKIECFDSVEISGVEDRFNASLGTYHDLLKIIKDKDFLDNEENEDILEDIVLTLTLFEDREMIEERLKTYAHLFDDKVMKQLKRRRYTGWGRLSRKLINGIRDKQSGKTILDFLKSDGFANRNFMQLIHDDSLTFKEDIQKAQVSGQGDSLHEHIANLAGSPAIKKGILQTVKVVDELVKVMGRHKPENIVIEMARENQTTQKGQKNSRERMKRIEEGIKELGSQILKEHPVENTQLQNEKLYLYYLQNGRDMYVDQELDINRLSDYDVDHIVPQSFLKDDSIDNKVLTRSDKARGKSDNVPSEEVVKKMKNYWRQLLNAKLITQRKFDNLTKAERGGLSELDKAGFIKRQLVETRQITKHVAQILDSRMNTKYDENDKLIREVKVITLKSKLVSDFRKDFQFYKVREINNYHHAHDAYLNAVVGTALIKKYPKLESEFVYGDYKVYDVRKMIAKSEQEIGKATAKYFFYSNIMNFFKTEITLANGEIRKRPLIETNGETGEIVWDKGRDFATVRKVLSMPQVNIVKKTEVQTGGFSKESILPKRNSDKLIARKKDWDPKKYGGFDSPTVAYSVLVVAKVEKGKSKKLKSVKELLGITIMERSSFEKNPIDFLEAKGYKEVKKDLIIKLPKYSLFELENGRKRMLASAGELQKGNELALPSKYVNFLYLASHYEKLKGSPEDNEQKQLFVEQHKHYLDEIIEQISEFSKRVILADANLDKVLSAYNKHRDKPIREQAENIIHLFTLTNLGAPAAFKYFDTTIDRKRYTSTKEVLDATLIHQSITGLYETRIDLSQLGGDGGPAPGSSGGGGGTLQLEEEYRLFEPESTQKQEMDIWLKNFPQAWAETGGMGTAHCQAPVLIQLKATATPISIRQYPMPHEAYQGIKPHIRRMLDQGILKPCQSPWNTPLLPVKKPGTEDYRPVQDLREVNKRVEDIHPTVPNPYNLLSTLPPSHPWYTVLDLKDAFFCLRLHSESQLLFAFEWRDPEIGLSGQLTWTRLPQGFKNSPTLFDEALHSDLADFRVRYPALVLLQYVDDLLLAAATRTECLEGTKALLETLGNKGYRASAKKAQICLQEVTYLGYSLKDGQRWLTKARKEAILSIPVPKNSRQVREFLGTAGYCRLWIPGFAELAAPLYPLTRPGTLFQWGTEQQLAFEDIKKALLSSPALGLPDITKPFELFIDENSGFAKGVLVQKLGPWKRPVAYLSKKLDTVASGWPPCLRMVAAIAILVKDAGKLTLGQPLTILTSHPVEALVRQPPNKWLSNARMTHYQAMLLDAERVHFGPTVSLNPATLLPLPSGGNHHDCLQILAETHGTRPDLTDQPLPDADLTWYTDGSSFIRNGEREAGAAVTTESEVIWAAPLPPGTSAQRAELIALTQALKMAEGKKLTVYTDSRYAFATTHVHGEIYRRRGLLTSEGKEIKNKNEILALLEALFLPKRLSIIHCPGHQKGDSPQAKGNRLADDTAKKAATETHSSLTVLPAGKRTADGSEFEKRTADGSEFESPKKKAKVE

SEQ ID NO: 1137 - protein, 2107 aa, synthetic construct
MPAAKRVKLDGGDKKYSIGLDIGTNSVGWAVITDEYKVPSKKFKVLGNTDRHSIKKNLIGALLFDSGETAEATRLKRTARRRYTRRKNRICYLQEIFSNEMAKVDDSFFHRLEESFLVEEDKKHERHPIFGNIVDEVAYHEKYPTIYHLRKKLVDSTDKADLRLIYLALAHMIKFRGHFLIEGDLNPDNSDVDKLFIQLVQTYNQLFEENPINASGVDAKAILSARLSKSRRLENLIAQLPGEKKNGLFGNLIALSLGLTPNFKSNFDLAEDAKLQLSKDTYDDDLDNLLAQIGDQYADLFLAAKNLSDAILLSDILRVNTEITKAPLSASMIKRYDEHHQDLTLLKALVRQQLPEKYKEIFFDQSKNGYAGYIDGGASQEEFYKFIKPILEKMDGTEELLVKLNREDLLRKQRTFDNGSIPHQIHLGELHAILRRQEDFYPFLKDNREKIEKILTFRIPYYVGPLARGNSRFAWMTRKSEETITPWNFEEVVDKGASAQSFIERMTNFDKNLPNEKVLPKHSLLYEYFTVYNELTKVKYVTEGMRKPAFLSGEQKKAIVDLLFKTNRKVTVKQLKEDYFKKIECFDSVEISGVEDRFNASLGTYHDLLKIIKDKDFLDNEENEDILEDIVLTLTLFEDREMIEERLKTYAHLFDDKVMKQLKRRRYTGWGRLSRKLINGIRDKQSGKTILDFLKSDGFANRNFMQLIHDDSLTFKEDIQKAQVSGQGDSLHEHIANLAGSPAIKKGILQTVKVVDELVKVMGRHKPENIVIEMARENQTTQKGQKNSRERMKRIEEGIKELGSQILKEHPVENTQLQNEKLYLYYLQNGRDMYVDQELDINRLSDYDVDHIVPQSFLKDDSIDNKVLTRSDKARGKSDNVPSEEVVKKMKNYWRQLLNAKLITQRKFDNLTKAERGGLSELDKAGFIKRQLVETRQITKHVAQILDSRMNTKYDENDKLIREVKVITLKSKLVSDFRKDFQFYKVREINNYHHAHDAYLNAVVGTALIKKYPKLESEFVYGDYKVYDVRKMIAKSEQEIGKATAKYFFYSNIMNFFKTEITLANGEIRKRPLIETNGETGEIVWDKGRDFATVRKVLSMPQVNIVKKTEVQTGGFSKESILPKRNSDKLIARKKDWDPKKYGGFDSPTVAYSVLVVAKVEKGKSKKLKSVKELLGITIMERSSFEKNPIDFLEAKGYKEVKKDLIIKLPKYSLFELENGRKRMLASAGELQKGNELALPSKYVNFLYLASHYEKLKGSPEDNEQKQLFVEQHKHYLDEIIEQISEFSKRVILADANLDKVLSAYNKHRDKPIREQAENIIHLFTLTNLGAPAAFKYFDTTIDRKRYTSTKEVLDATLIHQSITGLYETRIDLSQLGGDGGEAAAKEAAAKEAAAKEAAAKGGTAPLEEEYRLFLEAPIQNVTLLEQWKREIPKVWAEINPPGLASTQAPIHVQLLSTALPVRVRQYPITLEAKRSLRETIRKFRAAGILRPVHSPWNTPLLPVRKSGTSEYRMVQDLREVNKRVETIHPTVPNPYTLLSLLPPDRIWYSVLDLKDAFFCIPLAPESQLIFAFEWADAEEGESGQLTWTRLPQGFKNSPTLFNEALNRDLQGFRLDHPSVSLLQYVDDLLIAADTQAACLSATRDLLMTLAELGYRVSGKKAQLCQEEVTYLGFKIHKGSRSLSNSRTQAILQIPVPKTKRQVREFLGTIGYCRLWIPGFAELAQPLYAATRPGNDPLVWGEKEEEAFQSLKLALTQPPALALPSLDKPFQLFVEETSGAAKGVLTQALGPWKRPVAYLSKRLDPVAAGWPRCLRAIAAAALLTREASKLTFGQDIEITSSHNLESLLRSPPDKWLTNARITQYQVLLLDPPRVRFKQTAALNPATLLPETDDTLPIHHCLDTLDSLTSTRPDLTDQPLAQAEATLFTDGSSYIRDGKRYAGAAVVTLDSVIWAEPLPIGTSAQKAELIALTKALEWSKDKSVNIYTDSRYAFATLHVHGMIYRERGWLTAGGKAIKNAPEILALLTAVWLPKRVAVMHCKGHQKDDAPTSTGNRRADEVAREVAIRPLSTQATISAGKRTADGSEFEKRTADGSEFESPKKKAKVE

SEQ ID NO: 1138 - protein, 2100 aa, synthetic construct
MPAAKRVKLDGGDKKYSIGLDIGTNSVGWAVITDEYKVPSKKFKVLGNTDRHSIKKNLIGALLFDSGETAEATRLKRTARRRYTRRKNRICYLQEIFSNEMAKVDDSFFHRLEESFLVEEDKKHERHPIFGNIVDEVAYHEKYPTIYHLRKKLVDSTDKADLRLIYLALAHMIKFRGHFLIEGDLNPDNSDVDKLFIQLVQTYNQLFEENPINASGVDAKAILSARLSKSRRLENLIAQLPGEKKNGLFGNLIALSLGLTPNFKSNFDLAEDAKLQLSKDTYDDDLDNLLAQIGDQYADLFLAAKNLSDAILLSDILRVNTEITKAPLSASMIKRYDEHHQDLTLLKALVRQQLPEKYKEIFFDQSKNGYAGYIDGGASQEEFYKFIKPILEKMDGTEELLVKLNREDLLRKQRTFDNGSIPHQIHLGELHAILRRQEDFYPFLKDNREKIEKILTFRIPYYVGPLARGNSRFAWMTRKSEETITPWNFEEVVDKGASAQSFIERMTNFDKNLPNEKVLPKHSLLYEYFTVYNELTKVKYVTEGMRKPAFLSGEQKKAIVDLLFKTNRKVTVKQLKEDYFKKIECFDSVEISGVEDRFNASLGTYHDLLKIIKDKDFLDNEENEDILEDIVLTLTLFEDREMIEERLKTYAHLFDDKVMKQLKRRRYTGWGRLSRKLINGIRDKQSGKTILDFLKSDGFANRNFMQLIHDDSLTFKEDIQKAQVSGQGDSLHEHIANLAGSPAIKKGILQTVKVVDELVKVMGRHKPENIVIEMARENQTTQKGQKNSRERMKRIEEGIKELGSQILKEHPVENTQLQNEKLYLYYLQNGRDMYVDQELDINRLSDYDVDHIVPQSFLKDDSIDNKVLTRSDKARGKSDNVPSEEVVKKMKNYWRQLLNAKLITQRKFDNLTKAERGGLSELDKAGFIKRQLVETRQITKHVAQILDSRMNTKYDENDKLIREVKVITLKSKLVSDFRKDFQFYKVREINNYHHAHDAYLNAVVGTALIKKYPKLESEFVYGDYKVYDVRKMIAKSEQEIGKATAKYFFYSNIMNFFKTEITLANGEIRKRPLIETNGETGEIVWDKGRDFATVRKVLSMPQVNIVKKTEVQTGGFSKESILPKRNSDKLIARKKDWDPKKYGGFDSPTVAYSVLVVAKVEKGKSKKLKSVKELLGITIMERSSFEKNPIDFLEAKGYKEVKKDLIIKLPKYSLFELENGRKRMLASAGELQKGNELALPSKYVNFLYLASHYEKLKGSPEDNEQKQLFVEQHKHYLDEIIEQISEFSKRVILADANLDKVLSAYNKHRDKPIREQAENIIHLFTLTNLGAPAAFKYFDTTIDRKRYTSTKEVLDATLIHQSITGLYETRIDLSQLGGDGGPAPAPAPAPAPAPGGTAPLEEEYRLFLEAPIQNVTLLEQWKREIPKVWAEINPPGLASTQAPIHVQLLSTALPVRVRQYPITLEAKRSLRETIRKFRAAGILRPVHSPWNTPLLPVRKSGTSEYRMVQDLREVNKRVETIHPTVPNPYTLLSLLPPDRIWYSVLDLKDAFFCIPLAPESQLIFAFEWADAEEGESGQLTWTRLPQGFKNSPTLFNEALNRDLQGFRLDHPSVSLLQYVDDLLIAADTQAACLSATRDLLMTLAELGYRVSGKKAQLCQEEVTYLGFKIHKGSRSLSNSRTQAILQIPVPKTKRQVREFLGTIGYCRLWIPGFAELAQPLYAATRPGNDPLVWGEKEEEAFQSLKLALTQPPALALPSLDKPFQLFVEETSGAAKGVLTQALGPWKRPVAYLSKRLDPVAAGWPRCLRAIAAAALLTREASKLTFGQDIEITSSHNLESLLRSPPDKWLTNARITQYQVLLLDPPRVRFKQTAALNPATLLPETDDTLPIHHCLDTLDSLTSTRPDLTDQPLAQAEATLFTDGSSYIRDGKRYAGAAVVTLDSVIWAEPLPIGTSAQKAELIALTKALEWSKDKSVNIYTDSRYAFATLHVHGMIYRERGWLTAGGKAIKNAPEILALLTAVWLPKRVAVMHCKGHQKDDAPTSTGNRRADEVAREVAIRPLSTQATISAGKRTADGSEFEKRTADGSEFESPKKKAKVE

SEQ ID NO: 1139 - protein, 2098 aa, synthetic construct
MPAAKRVKLDGGDKKYSIGLDIGTNSVGWAVITDEYKVPSKKFKVLGNTDRHSIKKNLIGALLFDSGETAEATRLKRTARRRYTRRKNRICYLQEIFSNEMAKVDDSFFHRLEESFLVEEDKKHERHPIFGNIVDEVAYHEKYPTIYHLRKKLVDSTDKADLRLIYLALAHMIKFRGHFLIEGDLNPDNSDVDKLFIQLVQTYNQLFEENPINASGVDAKAILSARLSKSRRLENLIAQLPGEKKNGLFGNLIALSLGLTPNFKSNFDLAEDAKLQLSKDTYDDDLDNLLAQIGDQYADLFLAAKNLSDAILLSDILRVNTEITKAPLSASMIKRYDEHHQDLTLLKALVRQQLPEKYKEIFFDQSKNGYAGYIDGGASQEEFYKFIKPILEKMDGTEELLVKLNREDLLRKQRTFDNGSIPHQIHLGELHAILRRQEDFYPFLKDNREKIEKILTFRIPYYVGPLARGNSRFAWMTRKSEETITPWNFEEVVDKGASAQSFIERMTNFDKNLPNEKVLPKHSLLYEYFTVYNELTKVKYVTEGMRKPAFLSGEQKKAIVDLLFKTNRKVTVKQLKEDYFKKIECFDSVEISGVEDRFNASLGTYHDLLKIIKDKDFLDNEENEDILEDIVLTLTLFEDREMIEERLKTYAHLFDDKVMKQLKRRRYTGWGRLSRKLINGIRDKQSGKTILDFLKSDGFANRNFMQLIHDDSLTFKEDIQKAQVSGQGDSLHEHIANLAGSPAIKKGILQTVKVVDELVKVMGRHKPENIVIEMARENQTTQKGQKNSRERMKRIEEGIKELGSQILKEHPVENTQLQNEKLYLYYLQNGRDMYVDQELDINRLSDYDVDHIVPQSFLKDDSIDNKVLTRSDKARGKSDNVPSEEVVKKMKNYWRQLLNAKLITQRKFDNLTKAERGGLSELDKAGFIKRQLVETRQITKHVAQILDSRMNTKYDENDKLIREVKVITLKSKLVSDFRKDFQFYKVREINNYHHAHDAYLNAVVGTALIKKYPKLESEFVYGDYKVYDVRKMIAKSEQEIGKATAKYFFYSNIMNFFKTEITLANGEIRKRPLIETNGETGEIVWDKGRDFATVRKVLSMPQVNIVKKTEVQTGGFSKESILPKRNSDKLIARKKDWDPKKYGGFDSPTVAYSVLVVAKVEKGKSKKLKSVKELLGITIMERSSFEKNPIDFLEAKGYKEVKKDLIIKLPKYSLFELENGRKRMLASAGELQKGNELALPSKYVNFLYLASHYEKLKGSPEDNEQKQLFVEQHKHYLDEIIEQISEFSKRVILADANLDKVLSAYNKHRDKPIREQAENIIHLFTLTNLGAPAAFKYFDTTIDRKRYTSTKEVLDATLIHQSITGLYETRIDLSQLGGDGGEAAAKGGSPAPGGTAPLEEEYRLFLEAPIQNVTLLEQWKREIPKVWAEINPPGLASTQAPIHVQLLSTALPVRVRQYPITLEAKRSLRETIRKFRAAGILRPVHSPWNTPLLPVRKSGTSEYRMVQDLREVNKRVETIHPTVPNPYTLLSLLPPDRIWYSVLDLKDAFFCIPLAPESQLIFAFEWADAEEGESGQLTWTRLPQGFKNSPTLFNEALNRDLQGFRLDHPSVSLLQYVDDLLIAADTQAACLSATRDLLMTLAELGYRVSGKKAQLCQEEVTYLGFKIHKGSRSLSNSRTQAILQIPVPKTKRQVREFLGTIGYCRLWIPGFAELAQPLYAATRPGNDPLVWGEKEEEAFQSLKLALTQPPALALPSLDKPFQLFVEETSGAAKGVLTQALGPWKRPVAYLSKRLDPVAAGWPRCLRAIAAAALLTREASKLTFGQDIEITSSHNLESLLRSPPDKWLTNARITQYQVLLLDPPRVRFKQTAALNPATLLPETDDTLPIHHCLDTLDSLTSTRPDLTDQPLAQAEATLFTDGSSYIRDGKRYAGAAVVTLDSVIWAEPLPIGTSAQKAELIALTKALEWSKDKSVNIYTDSRYAFATLHVHGMIYRERGWLTAGGKAIKNAPEILALLTAVWLPKRVAVMHCKGHQKDDAPTSTGNRRADEVAREVAIRPLSTQATISAGKRTADGSEFEKRTADGSEFESPKKKAKVE

SEQ ID NO: 1140 - protein, 2096 aa, synthetic construct
MPAAKRVKLDGGDKKYSIGLDIGTNSVGWAVITDEYKVPSKKFKVLGNTDRHSIKKNLIGALLFDSGETAEATRLKRTARRRYTRRKNRICYLQEIFSNEMAKVDDSFFHRLEESFLVEEDKKHERHPIFGNIVDEVAYHEKYPTIYHLRKKLVDSTDKADLRLIYLALAHMIKFRGHFLIEGDLNPDNSDVDKLFIQLVQTYNQLFEENPINASGVDAKAILSARLSKSRRLENLIAQLPGEKKNGLFGNLIALSLGLTPNFKSNFDLAEDAKLQLSKDTYDDDLDNLLAQIGDQYADLFLAAKNLSDAILLSDILRVNTEITKAPLSASMIKRYDEHHQDLTLLKALVRQQLPEKYKEIFFDQSKNGYAGYIDGGASQEEFYKFIKPILEKMDGTEELLVKLNREDLLRKQRTFDNGSIPHQIHLGELHAILRRQEDFYPFLKDNREKIEKILTFRIPYYVGPLARGNSRFAWMTRKSEETITPWNFEEVVDKGASAQSFIERMTNFDKNLPNEKVLPKHSLLYEYFTVYNELTKVKYVTEGMRKPAFLSGEQKKAIVDLLFKTNRKVTVKQLKEDYFKKIECFDSVEISGVEDRFNASLGTYHDLLKIIKDKDFLDNEENEDILEDIVLTLTLFEDREMIEERLKTYAHLFDDKVMKQLKRRRYTGWGRLSRKLINGIRDKQSGKTILDFLKSDGFANRNFMQLIHDDSLTFKEDIQKAQVSGQGDSLHEHIANLAGSPAIKKGILQTVKVVDELVKVMGRHKPENIVIEMARENQTTQKGQKNSRERMKRIEEGIKELGSQILKEHPVENTQLQNEKLYLYYLQNGRDMYVDQELDINRLSDYDVDHIVPQSFLKDDSIDNKVLTRSDKARGKSDNVPSEEVVKKMKNYWRQLLNAKLITQRKFDNLTKAERGGLSELDKAGFIKRQLVETRQITKHVAQILDSRMNTKYDENDKLIREVKVITLKSKLVSDFRKDFQFYKVREINNYHHAHDAYLNAVVGTALIKKYPKLESEFVYGDYKVYDVRKMIAKSEQEIGKATAKYFFYSNIMNFFKTEITLANGEIRKRPLIETNGETGEIVWDKGRDFATVRKVLSMPQVNIVKKTEVQTGGFSKESILPKRNSDKLIARKKDWDPKKYGGFDSPTVAYSVLVVAKVEKGKSKKLKSVKELLGITIMERSSFEKNPIDFLEAKGYKEVKKDLIIKLPKYSLFELENGRKRMLASAGELQKGNELALPSKYVNFLYLASHYEKLKGSPEDNEQKQLFVEQHKHYLDEIIEQISEFSKRVILADANLDKVLSAYNKHRDKPIREQAENIIHLFTLTNLGAPAAFKYFDTTIDRKRYTSTKEVLDATLIHQSITGLYETRIDLSQLGGDGGGGGPAPGSSGGTAPLEEEYRLFLEAPIQNVTLLEQWKREIPKVWAEINPPGLASTQAPIHVQLLSTALPVRVRQYPITLEAKRSLRETIRKFRAAGILRPVHSPWNTPLLPVRKSGTSEYRMVQDLREVNKRVETIHPTVPNPYTLLSLLPPDRIWYSVLDLKDAFFCIPLAPESQLIFAFEWADAEEGESGQLTWTRLPQGFKNSPTLFNEALNRDLQGFRLDHPSVSLLQYVDDLLIAADTQAACLSATRDLLMTLAELGYRVSGKKAQLCQEEVTYLGFKIHKGSRSLSNSRTQAILQIPVPKTKRQVREFLGTIGYCRLWIPGFAELAQPLYAATRPGNDPLVWGEKEEEAFQSLKLALTQPPALALPSLDKPFQLFVEETSGAAKGVLTQALGPWKRPVAYLSKRLDPVAAGWPRCLRAIAAAALLTREASKLTFGQDIEITSSHNLESLLRSPPDKWLTNARITQYQVLLLDPPRVRFKQTAALNPATLLPETDDTLPIHHCLDTLDSLTSTRPDLTDQPLAQAEATLFTDGSSYIRDGKRYAGAAVVTLDSVIWAEPLPIGTSAQKAELIALTKALEWSKDKSVNIYTDSRYAFATLHVHGMIYRERGWLTAGGKAIKNAPEILALLTAVWLPKRVAVMHCKGHQKDDAPTSTGNRRADEVAREVAIRPLSTQATISAGKRTADGSEFEKRTADGSEFESPKKKAKVE

SEQ ID NO: 1141 - protein, 2095 aa, synthetic construct
MPAAKRVKLDGGDKKYSIGLDIGTNSVGWAVITDEYKVPSKKFKVLGNTDRHSIKKNLIGALLFDSGETAEATRLKRTARRRYTRRKNRICYLQEIFSNEMAKVDDSFFHRLEESFLVEEDKKHERHPIFGNIVDEVAYHEKYPTIYHLRKKLVDSTDKADLRLIYLALAHMIKFRGHFLIEGDLNPDNSDVDKLFIQLVQTYNQLFEENPINASGVDAKAILSARLSKSRRLENLIAQLPGEKKNGLFGNLIALSLGLTPNFKSNFDLAEDAKLQLSKDTYDDDLDNLLAQIGDQYADLFLAAKNLSDAILLSDILRVNTEITKAPLSASMIKRYDEHHQDLTLLKALVRQQLPEKYKEIFFDQSKNGYAGYIDGGASQEEFYKFIKPILEKMDGTEELLVKLNREDLLRKQRTFDNGSIPHQIHLGELHAILRRQEDFYPFLKDNREKIEKILTFRIPYYVGPLARGNSRFAWMTRKSEETITPWNFEEVVDKGASAQSFIERMTNFDKNLPNEKVLPKHSLLYEYFTVYNELTKVKYVTEGMRKPAFLSGEQKKAIVDLLFKTNRKVTVKQLKEDYFKKIECFDSVEISGVEDRFNASLGTYHDLLKIIKDKDFLDNEENEDILEDIVLTLTLFEDREMIEERLKTYAHLFDDKVMKQLKRRRYTGWGRLSRKLINGIRDKQSGKTILDFLKSDGFANRNFMQLIHDDSLTFKEDIQKAQVSGQGDSLHEHIANLAGSPAIKKGILQTVKVVDELVKVMGRHKPENIVIEMARENQTTQKGQKNSRERMKRIEEGIKELGSQILKEHPVENTQLQNEKLYLYYLQNGRDMYVDQELDINRLSDYDVDHIVPQSFLKDDSIDNKVLTRSDKARGKSDNVPSEEVVKKMKNYWRQLLNAKLITQRKFDNLTKAERGGLSELDKAGFIKRQLVETRQITKHVAQILDSRMNTKYDENDKLIREVKVITLKSKLVSDFRKDFQFYKVREINNYHHAHDAYLNAVVGTALIKKYPKLESEFVYGDYKVYDVRKMIAKSEQEIGKATAKYFFYSNIMNFFKTEITLANGEIRKRPLIETNGETGEIVWDKGRDFATVRKVLSMPQVNIVKKTEVQTGGFSKESILPKRNSDKLIARKKDWDPKKYGGFDSPTVAYSVLVVAKVEKGKSKKLKSVKELLGITIMERSSFEKNPIDFLEAKGYKEVKKDLIIKLPKYSLFELENGRKRMLASAGELQKGNELALPSKYVNFLYLASHYEKLKGSPEDNEQKQLFVEQHKHYLDEIIEQISEFSKRVILADANLDKVLSAYNKHRDKPIREQAENIIHLFTLTNLGAPAAFKYFDTTIDRKRYTSTKEVLDATLIHQSITGLYETRIDLSQLGGDGGEAAAKGGGGGTAPLEEEYRLFLEAPIQNVTLLEQWKREIPKVWAEINPPGLASTQAPIHVQLLSTALPVRVRQYPITLEAKRSLRETIRKFRAAGILRPVHSPWNTPLLPVRKSGTSEYRMVQDLREVNKRVETIHPTVPNPYTLLSLLPPDRIWYSVLDLKDAFFCIPLAPESQLIFAFEWADAEEGESGQLTWTRLPQGFKNSPTLFNEALNRDLQGFRLDHPSVSLLQYVDDLLIAADTQAACLSATRDLLMTLAELGYRVSGKKAQLCQEEVTYLGFKIHKGSRSLSNSRTQAILQIPVPKTKRQVREFLGTIGYCRLWIPGFAELAQPLYAATRPGNDPLVWGEKEEEAFQSLKLALTQPPALALPSLDKPFQLFVEETSGAAKGVLTQALGPWKRPVAYLSKRLDPVAAGWPRCLRAIAAAALLTREASKLTFGQDIEITSSHNLESLLRSPPDKWLTNARITQYQVLLLDPPRVRFKQTAALNPATLLPETDDTLPIHHCLDTLDSLTSTRPDLTDQPLAQAEATLFTDGSSYIRDGKRYAGAAVVTLDSVIWAEPLPIGTSAQKAELIALTKALEWSKDKSVNIYTDSRYAFATLHVHGMIYRERGWLTAGGKAIKNAPEILALLTAVWLPKRVAVMHCKGHQKDDAPTSTGNRRADEVAREVAIRPLSTQATISAGKRTADGSEFEKRTADGSEFESPKKKAKVE

SEQ ID NO: 1142 - protein, 2098 aa, synthetic construct
MPAAKRVKLDGGDKKYSIGLDIGTNSVGWAVITDEYKVPSKKFKVLGNTDRHSIKKNLIGALLFDSGETAEATRLKRTARRRYTRRKNRICYLQEIFSNEMAKVDDSFFHRLEESFLVEEDKKHERHPIFGNIVDEVAYHEKYPTIYHLRKKLVDSTDKADLRLIYLALAHMIKFRGHFLIEGDLNPDNSDVDKLFIQLVQTYNQLFEENPINASGVDAKAILSARLSKSRRLENLIAQLPGEKKNGLFGNLIALSLGLTPNFKSNFDLAEDAKLQLSKDTYDDDLDNLLAQIGDQYADLFLAAKNLSDAILLSDILRVNTEITKAPLSASMIKRYDEHHQDLTLLKALVRQQLPEKYKEIFFDQSKNGYAGYIDGGASQEEFYKFIKPILEKMDGTEELLVKLNREDLLRKQRTFDNGSIPHQIHLGELHAILRRQEDFYPFLKDNREKIEKILTFRIPYYVGPLARGNSRFAWMTRKSEETITPWNFEEVVDKGASAQSFIERMTNFDKNLPNEKVLPKHSLLYEYFTVYNELTKVKYVTEGMRKPAFLSGEQKKAIVDLLFKTNRKVTVKQLKEDYFKKIECFDSVEISGVEDRFNASLGTYHDLLKIIKDKDFLDNEENEDILEDIVLTLTLFEDREMIEERLKTYAHLFDDKVMKQLKRRRYTGWGRLSRKLINGIRDKQSGKTILDFLKSDGFANRNFMQLIHDDSLTFKEDIQKAQVSGQGDSLHEHIANLAGSPAIKKGILQTVKVVDELVKVMGRHKPENIVIEMARENQTTQKGQKNSRERMKRIEEGIKELGSQILKEHPVENTQLQNEKLYLYYLQNGRDMYVDQELDINRLSDYDVDHIVPQSFLKDDSIDNKVLTRSDKARGKSDNVPSEEVVKKMKNYWRQLLNAKLITQRKFDNLTKAERGGLSELDKAGFIKRQLVETRQITKHVAQILDSRMNTKYDENDKLIREVKVITLKSKLVSDFRKDFQFYKVREINNYHHAHDAYLNAVVGTALIKKYPKLESEFVYGDYKVYDVRKMIAKSEQEIGKATAKYFFYSNIMNFFKTEITLANGEIRKRPLIETNGETGEIVWDKGRDFATVRKVLSMPQVNIVKKTEVQTGGFSKESILPKRNSDKLIARKKDWDPKKYGGFDSPTVAYSVLVVAKVEKGKSKKLKSVKELLGITIMERSSFEKNPIDFLEAKGYKEVKKDLIIKLPKYSLFELENGRKRMLASAGELQKGNELALPSKYVNFLYLASHYEKLKGSPEDNEQKQLFVEQHKHYLDEIIEQISEFSKRVILADANLDKVLSAYNKHRDKPIREQAENIIHLFTLTNLGAPAAFKYFDTTIDRKRYTSTKEVLDATLIHQSITGLYETRIDLSQLGGDGGGGGEAAAKGSSGGTAPLEEEYRLFLEAPIQNVTLLEQWKREIPKVWAEINPPGLASTQAPIHVQLLSTALPVRVRQYPITLEAKRSLRETIRKFRAAGILRPVHSPWNTPLLPVRKSGTSEYRMVQDLREVNKRVETIHPTVPNPYTLLSLLPPDRIWYSVLDLKDAFFCIPLAPESQLIFAFEWADAEEGESGQLTWTRLPQGFKNSPTLFNEALNRDLQGFRLDHPSVSLLQYVDDLLIAADTQAACLSATRDLLMTLAELGYRVSGKKAQLCQEEVTYLGFKIHKGSRSLSNSRTQAILQIPVPKTKRQVREFLGTIGYCRLWIPGFAELAQPLYAATRPGNDPLVWGEKEEEAFQSLKLALTQPPALALPSLDKPFQLFVEETSGAAKGVLTQALGPWKRPVAYLSKRLDPVAAGWPRCLRAIAAAALLTREASKLTFGQDIEITSSHNLESLLRSPPDKWLTNARITQYQVLLLDPPRVRFKQTAALNPATLLPETDDTLPIHHCLDTLDSLTSTRPDLTDQPLAQAEATLFTDGSSYIRDGKRYAGAAVVTLDSVIWAEPLPIGTSAQKAELIALTKALEWSKDKSVNIYTDSRYAFATLHVHGMIYRERGWLTAGGKAIKNAPEILALLTAVWLPKRVAVMHCKGHQKDDAPTSTGNRRADEVAREVAIRPLSTQATISAGKRTADGSEFEKRTADGSEFESPKKKAKVE

SEQ ID NO: 1143 - protein, 2102 aa, synthetic construct
MPAAKRVKLDGGDKKYSIGLDIGTNSVGWAVITDEYKVPSKKFKVLGNTDRHSIKKNLIGALLFDSGETAEATRLKRTARRRYTRRKNRICYLQEIFSNEMAKVDDSFFHRLEESFLVEEDKKHERHPIFGNIVDEVAYHEKYPTIYHLRKKLVDSTDKADLRLIYLALAHMIKFRGHFLIEGDLNPDNSDVDKLFIQLVQTYNQLFEENPINASGVDAKAILSARLSKSRRLENLIAQLPGEKKNGLFGNLIALSLGLTPNFKSNFDLAEDAKLQLSKDTYDDDLDNLLAQIGDQYADLFLAAKNLSDAILLSDILRVNTEITKAPLSASMIKRYDEHHQDLTLLKALVRQQLPEKYKEIFFDQSKNGYAGYIDGGASQEEFYKFIKPILEKMDGTEELLVKLNREDLLRKQRTFDNGSIPHQIHLGELHAILRRQEDFYPFLKDNREKIEKILTFRIPYYVGPLARGNSRFAWMTRKSEETITPWNFEEVVDKGASAQSFIERMTNFDKNLPNEKVLPKHSLLYEYFTVYNELTKVKYVTEGMRKPAFLSGEQKKAIVDLLFKTNRKVTVKQLKEDYFKKIECFDSVEISGVEDRFNASLGTYHDLLKIIKDKDFLDNEENEDILEDIVLTLTLFEDREMIEERLKTYAHLFDDKVMKQLKRRRYTGWGRLSRKLINGIRDKQSGKTILDFLKSDGFANRNFMQLIHDDSLTFKEDIQKAQVSGQGDSLHEHIANLAGSPAIKKGILQTVKVVDELVKVMGRHKPENIVIEMARENQTTQKGQKNSRERMKRIEEGIKELGSQILKEHPVENTQLQNEKLYLYYLQNGRDMYVDQELDINRLSDYDVDHIVPQSFLKDDSIDNKVLTRSDKARGKSDNVPSEEVVKKMKNYWRQLLNAKLITQRKFDNLTKAERGGLSELDKAGFIKRQLVETRQITKHVAQILDSRMNTKYDENDKLIREVKVITLKSKLVSDFRKDFQFYKVREINNYHHAHDAYLNAVVGTALIKKYPKLESEFVYGDYKVYDVRKMIAKSEQEIGKATAKYFFYSNIMNFFKTEITLANGEIRKRPLIETNGETGEIVWDKGRDFATVRKVLSMPQVNIVKKTEVQTGGFSKESILPKRNSDKLIARKKDWDPKKYGGFDSPTVAYSVLVVAKVEKGKSKKLKSVKELLGITIMERSSFEKNPIDFLEAKGYKEVKKDLIIKLPKYSLFELENGRKRMLASAGELQKGNELALPSKYVNFLYLASHYEKLKGSPEDNEQKQLFVEQHKHYLDEIIEQISEFSKRVILADANLDKVLSAYNKHRDKPIREQAENIIHLFTLTNLGAPAAFKYFDTTIDRKRYTSTKEVLDATLIHQSITGLYETRIDLSQLGGDGGGSSGSSGSSGSSGSSGGTAPLEEEYRLFLEAPIQNVTLLEQWKREIPKVWAEINPPGLASTQAPIHVQLLSTALPVRVRQYPITLEAKRSLRETIRKFRAAGILRPVHSPWNTPLLPVRKSGTSEYRMVQDLREVNKRVETIHPTVPNPYTLLSLLPPDRIWYSVLDLKDAFFCIPLAPESQLIFAFEWADAEEGESGQLTWTRLPQGFKNSPTLFNEALNRDLQGFRLDHPSVSLLQYVDDLLIAADTQAACLSATRDLLMTLAELGYRVSGKKAQLCQEEVTYLGFKIHKGSRSLSNSRTQAILQIPVPKTKRQVREFLGTIGYCRLWIPGFAELAQPLYAATRPGNDPLVWGEKEEEAFQSLKLALTQPPALALPSLDKPFQLFVEETSGAAKGVLTQALGPWKRPVAYLSKRLDPVAAGWPRCLRAIAAAALLTREASKLTFGQDIEITSSHNLESLLRSPPDKWLTNARITQYQVLLLDPPRVRFKQTAALNPATLLPETDDTLPIHHCLDTLDSLTSTRPDLTDQPLAQAEATLFTDGSSYIRDGKRYAGAAVVTLDSVIWAEPLPIGTSAQKAELIALTKALEWSKDKSVNIYTDSRYAFATLHVHGMIYRERGWLTAGGKAIKNAPEILALLTAVWLPKRVAVMHCKGHQKDDAPTSTGNRRADEVAREVAIRPLSTQATISAGKRTADGSEFEKRTADGSEFESPKKKAKVE

SEQ ID NO: 1144 - protein, 2090 aa, synthetic construct
MPAAKRVKLDGGDKKYSIGLDIGTNSVGWAVITDEYKVPSKKFKVLGNTDRHSIKKNLIGALLFDSGETAEATRLKRTARRRYTRRKNRICYLQEIFSNEMAKVDDSFFHRLEESFLVEEDKKHERHPIFGNIVDEVAYHEKYPTIYHLRKKLVDSTDKADLRLIYLALAHMIKFRGHFLIEGDLNPDNSDVDKLFIQLVQTYNQLFEENPINASGVDAKAILSARLSKSRRLENLIAQLPGEKKNGLFGNLIALSLGLTPNFKSNFDLAEDAKLQLSKDTYDDDLDNLLAQIGDQYADLFLAAKNLSDAILLSDILRVNTEITKAPLSASMIKRYDEHHQDLTLLKALVRQQLPEKYKEIFFDQSKNGYAGYIDGGASQEEFYKFIKPILEKMDGTEELLVKLNREDLLRKQRTFDNGSIPHQIHLGELHAILRRQEDFYPFLKDNREKIEKILTFRIPYYVGPLARGNSRFAWMTRKSEETITPWNFEEVVDKGASAQSFIERMTNFDKNLPNEKVLPKHSLLYEYFTVYNELTKVKYVTEGMRKPAFLSGEQKKAIVDLLFKTNRKVTVKQLKEDYFKKIECFDSVEISGVEDRFNASLGTYHDLLKIIKDKDFLDNEENEDILEDIVLTLTLFEDREMIEERLKTYAHLFDDKVMKQLKRRRYTGWGRLSRKLINGIRDKQSGKTILDFLKSDGFANRNFMQLIHDDSLTFKEDIQKAQVSGQGDSLHEHIANLAGSPAIKKGILQTVKVVDELVKVMGRHKPENIVIEMARENQTTQKGQKNSRERMKRIEEGIKELGSQILKEHPVENTQLQNEKLYLYYLQNGRDMYVDQELDINRLSDYDVDHIVPQSFLKDDSIDNKVLTRSDKARGKSDNVPSEEVVKKMKNYWRQLLNAKLITQRKFDNLTKAERGGLSELDKAGFIKRQLVETRQITKHVAQILDSRMNTKYDENDKLIREVKVITLKSKLVSDFRKDFQFYKVREINNYHHAHDAYLNAVVGTALIKKYPKLESEFVYGDYKVYDVRKMIAKSEQEIGKATAKYFFYSNIMNFFKTEITLANGEIRKRPLIETNGETGEIVWDKGRDFATVRKVLSMPQVNIVKKTEVQTGGFSKESILPKRNSDKLIARKKDWDPKKYGGFDSPTVAYSVLVVAKVEKGKSKKLKSVKELLGITIMERSSFEKNPIDFLEAKGYKEVKKDLIIKLPKYSLFELENGRKRMLASAGELQKGNELALPSKYVNFLYLASHYEKLKGSPEDNEQKQLFVEQHKHYLDEIIEQISEFSKRVILADANLDKVLSAYNKHRDKPIREQAENIIHLFTLTNLGAPAAFKYFDTTIDRKRYTSTKEVLDATLIHQSITGLYETRIDLSQLGGDGGGGSGGTAPLEEEYRLFLEAPIQNVTLLEQWKREIPKVWAEINPPGLASTQAPIHVQLLSTALPVRVRQYPITLEAKRSLRETIRKFRAAGILRPVHSPWNTPLLPVRKSGTSEYRMVQDLREVNKRVETIHPTVPNPYTLLSLLPPDRIWYSVLDLKDAFFCIPLAPESQLIFAFEWADAEEGESGQLTWTRLPQGFKNSPTLFNEALNRDLQGFRLDHPSVSLLQYVDDLLIAADTQAACLSATRDLLMTLAELGYRVSGKKAQLCQEEVTYLGFKIHKGSRSLSNSRTQAILQIPVPKTKRQVREFLGTIGYCRLWIPGFAELAQPLYAATRPGNDPLVWGEKEEEAFQSLKLALTQPPALALPSLDKPFQLFVEETSGAAKGVLTQALGPWKRPVAYLSKRLDPVAAGWPRCLRAIAAAALLTREASKLTFGQDIEITSSHNLESLLRSPPDKWLTNARITQYQVLLLDPPRVRFKQTAALNPATLLPETDDTLPIHHCLDTLDSLTSTRPDLTDQPLAQAEATLFTDGSSYIRDGKRYAGAAVVTLDSVIWAEPLPIGTSAQKAELIALTKALEWSKDKSVNIYTDSRYAFATLHVHGMIYRERGWLTAGGKAIKNAPEILALLTAVWLPKRVAVMHCKGHQKDDAPTSTGNRRADEVAREVAIRPLSTQATISAGKRTADGSEFEKRTADGSEFESPKKKAKVE

SEQ ID NO: 1145 - protein, 2098 aa, synthetic construct
MPAAKRVKLDGGDKKYSIGLDIGTNSVGWAVITDEYKVPSKKFKVLGNTDRHSIKKNLIGALLFDSGETAEATRLKRTARRRYTRRKNRICYLQEIFSNEMAKVDDSFFHRLEESFLVEEDKKHERHPIFGNIVDEVAYHEKYPTIYHLRKKLVDSTDKADLRLIYLALAHMIKFRGHFLIEGDLNPDNSDVDKLFIQLVQTYNQLFEENPINASGVDAKAILSARLSKSRRLENLIAQLPGEKKNGLFGNLIALSLGLTPNFKSNFDLAEDAKLQLSKDTYDDDLDNLLAQIGDQYADLFLAAKNLSDAILLSDILRVNTEITKAPLSASMIKRYDEHHQDLTLLKALVRQQLPEKYKEIFFDQSKNGYAGYIDGGASQEEFYKFIKPILEKMDGTEELLVKLNREDLLRKQRTFDNGSIPHQIHLGELHAILRRQEDFYPFLKDNREKIEKILTFRIPYYVGPLARGNSRFAWMTRKSEETITPWNFEEVVDKGASAQSFIERMTNFDKNLPNEKVLPKHSLLYEYFTVYNELTKVKYVTEGMRKPAFLSGEQKKAIVDLLFKTNRKVTVKQLKEDYFKKIECFDSVEISGVEDRFNASLGTYHDLLKIIKDKDFLDNEENEDILEDIVLTLTLFEDREMIEERLKTYAHLFDDKVMKQLKRRRYTGWGRLSRKLINGIRDKQSGKTILDFLKSDGFANRNFMQLIHDDSLTFKEDIQKAQVSGQGDSLHEHIANLAGSPAIKKGILQTVKVVDELVKVMGRHKPENIVIEMARENQTTQKGQKNSRERMKRIEEGIKELGSQILKEHPVENTQLQNEKLYLYYLQNGRDMYVDQELDINRLSDYDVDHIVPQSFLKDDSIDNKVLTRSDKARGKSDNVPSEEVVKKMKNYWRQLLNAKLITQRKFDNLTKAERGGLSELDKAGFIKRQLVETRQITKHVAQILDSRMNTKYDENDKLIREVKVITLKSKLVSDFRKDFQFYKVREINNYHHAHDAYLNAVVGTALIKKYPKLESEFVYGDYKVYDVRKMIAKSEQEIGKATAKYFFYSNIMNFFKTEITLANGEIRKRPLIETNGETGEIVWDKGRDFATVRKVLSMPQVNIVKKTEVQTGGFSKESILPKRNSDKLIARKKDWDPKKYGGFDSPTVAYSVLVVAKVEKGKSKKLKSVKELLGITIMERSSFEKNPIDFLEAKGYKEVKKDLIIKLPKYSLFELENGRKRMLASAGELQKGNELALPSKYVNFLYLASHYEKLKGSPEDNEQKQLFVEQHKHYLDEIIEQISEFSKRVILADANLDKVLSAYNKHRDKPIREQAENIIHLFTLTNLGAPAAFKYFDTTIDRKRYTSTKEVLDATLIHQSITGLYETRIDLSQLGGDGGEAAAKPAPGSSGGTAPLEEEYRLFLEAPIQNVTLLEQWKREIPKVWAEINPPGLASTQAPIHVQLLSTALPVRVRQYPITLEAKRSLRETIRKFRAAGILRPVHSPWNTPLLPVRKSGTSEYRMVQDLREVNKRVETIHPTVPNPYTLLSLLPPDRIWYSVLDLKDAFFCIPLAPESQLIFAFEWADAEEGESGQLTWTRLPQGFKNSPTLFNEALNRDLQGFRLDHPSVSLLQYVDDLLIAADTQAACLSATRDLLMTLAELGYRVSGKKAQLCQEEVTYLGFKIHKGSRSLSNSRTQAILQIPVPKTKRQVREFLGTIGYCRLWIPGFAELAQPLYAATRPGNDPLVWGEKEEEAFQSLKLALTQPPALALPSLDKPFQLFVEETSGAAKGVLTQALGPWKRPVAYLSKRLDPVAAGWPRCLRAIAAAALLTREASKLTFGQDIEITSSHNLESLLRSPPDKWLTNARITQYQVLLLDPPRVRFKQTAALNPATLLPETDDTLPIHHCLDTLDSLTSTRPDLTDQPLAQAEATLFTDGSSYIRDGKRYAGAAVVTLDSVIWAEPLPIGTSAQKAELIALTKALEWSKDKSVNIYTDSRYAFATLHVHGMIYRERGWLTAGGKAIKNAPEILALLTAVWLPKRVAVMHCKGHQKDDAPTSTGNRRADEVAREVAIRPLSTQATISAGKRTADGSEFEKRTADGSEFESPKKKAKVE

SEQ ID NO: 1146 - protein, 2133 aa, synthetic construct
MPAAKRVKLDGGDKKYSIGLDIGTNSVGWAVITDEYKVPSKKFKVLGNTDRHSIKKNLIGALLFDSGETAEATRLKRTARRRYTRRKNRICYLQEIFSNEMAKVDDSFFHRLEESFLVEEDKKHERHPIFGNIVDEVAYHEKYPTIYHLRKKLVDSTDKADLRLIYLALAHMIKFRGHFLIEGDLNPDNSDVDKLFIQLVQTYNQLFEENPINASGVDAKAILSARLSKSRRLENLIAQLPGEKKNGLFGNLIALSLGLTPNFKSNFDLAEDAKLQLSKDTYDDDLDNLLAQIGDQYADLFLAAKNLSDAILLSDILRVNTEITKAPLSASMIKRYDEHHQDLTLLKALVRQQLPEKYKEIFFDQSKNGYAGYIDGGASQEEFYKFIKPILEKMDGTEELLVKLNREDLLRKQRTFDNGSIPHQIHLGELHAILRRQEDFYPFLKDNREKIEKILTFRIPYYVGPLARGNSRFAWMTRKSEETITPWNFEEVVDKGASAQSFIERMTNFDKNLPNEKVLPKHSLLYEYFTVYNELTKVKYVTEGMRKPAFLSGEQKKAIVDLLFKTNRKVTVKQLKEDYFKKIECFDSVEISGVEDRFNASLGTYHDLLKIIKDKDFLDNEENEDILEDIVLTLTLFEDREMIEERLKTYAHLFDDKVMKQLKRRRYTGWGRLSRKLINGIRDKQSGKTILDFLKSDGFANRNFMQLIHDDSLTFKEDIQKAQVSGQGDSLHEHIANLAGSPAIKKGILQTVKVVDELVKVMGRHKPENIVIEMARENQTTQKGQKNSRERMKRIEEGIKELGSQILKEHPVENTQLQNEKLYLYYLQNGRDMYVDQELDINRLSDYDVDHIVPQSFLKDDSIDNKVLTRSDKARGKSDNVPSEEVVKKMKNYWRQLLNAKLITQRKFDNLTKAERGGLSELDKAGFIKRQLVETRQITKHVAQILDSRMNTKYDENDKLIREVKVITLKSKLVSDFRKDFQFYKVREINNYHHAHDAYLNAVVGTALIKKYPKLESEFVYGDYKVYDVRKMIAKSEQEIGKATAKYFFYSNIMNFFKTEITLANGEIRKRPLIETNGETGEIVWDKGRDFATVRKVLSMPQVNIVKKTEVQTGGFSKESILPKRNSDKLIARKKDWDPKKYGGFDSPTVAYSVLVVAKVEKGKSKKLKSVKELLGITIMERSSFEKNPIDFLEAKGYKEVKKDLIIKLPKYSLFELENGRKRMLASAGELQKGNELALPSKYVNFLYLASHYEKLKGSPEDNEQKQLFVEQHKHYLDEIIEQISEFSKRVILADANLDKVLSAYNKHRDKPIREQAENIIHLFTLTNLGAPAAFKYFDTTIDRKRYTSTKEVLDATLIHQSITGLYETRIDLSQLGGDGGAEAAAKEAAAKEAAAKEAAAKALEAEAAAKEAAAKEAAAKEAAAKAGGTAPLEEEYRLFLEAPIQNVTLLEQWKREIPKVWAEINPPGLASTQAPIHVQLLSTALPVRVRQYPITLEAKRSLRETIRKFRAAGILRPVHSPWNTPLLPVRKSGTSEYRMVQDLREVNKRVETIHPTVPNPYTLLSLLPPDRIWYSVLDLKDAFFCIPLAPESQLIFAFEWADAEEGESGQLTWTRLPQGFKNSPTLFNEALNRDLQGFRLDHPSVSLLQYVDDLLIAADTQAACLSATRDLLMTLAELGYRVSGKKAQLCQEEVTYLGFKIHKGSRSLSNSRTQAILQIPVPKTKRQVREFLGTIGYCRLWIPGFAELAQPLYAATRPGNDPLVWGEKEEEAFQSLKLALTQPPALALPSLDKPFQLFVEETSGAAKGVLTQALGPWKRPVAYLSKRLDPVAAGWPRCLRAIAAAALLTREASKLTFGQDIEITSSHNLESLLRSPPDKWLTNARITQYQVLLLDPPRVRFKQTAALNPATLLPETDDTLPIHHCLDTLDSLTSTRPDLTDQPLAQAEATLFTDGSSYIRDGKRYAGAAVVTLDSVIWAEPLPIGTSAQKAELIALTKALEWSKDKSVNIYTDSRYAFATLHVHGMIYRERGWLTAGGKAIKNAPEILALLTAVWLPKRVAVMHCKGHQKDDAPTSTGNRRADEVAREVAIRPLSTQATISAGKRTADGSEFEKRTADGSEFESPKKKAKVE

SEQ ID NO: 1147 - protein, 2098 aa, synthetic construct
MPAAKRVKLDGGDKKYSIGLDIGTNSVGWAVITDEYKVPSKKFKVLGNTDRHSIKKNLIGALLFDSGETAEATRLKRTARRRYTRRKNRICYLQEIFSNEMAKVDDSFFHRLEESFLVEEDKKHERHPIFGNIVDEVAYHEKYPTIYHLRKKLVDSTDKADLRLIYLALAHMIKFRGHFLIEGDLNPDNSDVDKLFIQLVQTYNQLFEENPINASGVDAKAILSARLSKSRRLENLIAQLPGEKKNGLFGNLIALSLGLTPNFKSNFDLAEDAKLQLSKDTYDDDLDNLLAQIGDQYADLFLAAKNLSDAILLSDILRVNTEITKAPLSASMIKRYDEHHQDLTLLKALVRQQLPEKYKEIFFDQSKNGYAGYIDGGASQEEFYKFIKPILEKMDGTEELLVKLNREDLLRKQRTFDNGSIPHQIHLGELHAILRRQEDFYPFLKDNREKIEKILTFRIPYYVGPLARGNSRFAWMTRKSEETITPWNFEEVVDKGASAQSFIERMTNFDKNLPNEKVLPKHSLLYEYFTVYNELTKVKYVTEGMRKPAFLSGEQKKAIVDLLFKTNRKVTVKQLKEDYFKKIECFDSVEISGVEDRFNASLGTYHDLLKIIKDKDFLDNEENEDILEDIVLTLTLFEDREMIEERLKTYAHLFDDKVMKQLKRRRYTGWGRLSRKLINGIRDKQSGKTILDFLKSDGFANRNFMQLIHDDSLTFKEDIQKAQVSGQGDSLHEHIANLAGSPAIKKGILQTVKVVDELVKVMGRHKPENIVIEMARENQTTQKGQKNSRERMKRIEEGIKELGSQILKEHPVENTQLQNEKLYLYYLQNGRDMYVDQELDINRLSDYDVDHIVPQSFLKDDSIDNKVLTRSDKARGKSDNVPSEEVVKKMKNYWRQLLNAKLITQRKFDNLTKAERGGLSELDKAGFIKRQLVETRQITKHVAQILDSRMNTKYDENDKLIREVKVITLKSKLVSDFRKDFQFYKVREINNYHHAHDAYLNAVVGTALIKKYPKLESEFVYGDYKVYDVRKMIAKSEQEIGKATAKYFFYSNIMNFFKTEITLANGEIRKRPLIETNGETGEIVWDKGRDFATVRKVLSMPQVNIVKKTEVQTGGFSKESILPKRNSDKLIARKKDWDPKKYGGFDSPTVAYSVLVVAKVEKGKSKKLKSVKELLGITIMERSSFEKNPIDFLEAKGYKEVKKDLIIKLPKYSLFELENGRKRMLASAGELQKGNELALPSKYVNFLYLASHYEKLKGSPEDNEQKQLFVEQHKHYLDEIIEQISEFSKRVILADANLDKVLSAYNKHRDKPIREQAENIIHLFTLTNLGAPAAFKYFDTTIDRKRYTSTKEVLDATLIHQSITGLYETRIDLSQLGGDGGGGSEAAAKPAPGGTAPLEEEYRLFLEAPIQNVTLLEQWKREIPKVWAEINPPGLASTQAPIHVQLLSTALPVRVRQYPITLEAKRSLRETIRKFRAAGILRPVHSPWNTPLLPVRKSGTSEYRMVQDLREVNKRVETIHPTVPNPYTLLSLLPPDRIWYSVLDLKDAFFCIPLAPESQLIFAFEWADAEEGESGQLTWTRLPQGFKNSPTLFNEALNRDLQGFRLDHPSVSLLQYVDDLLIAADTQAACLSATRDLLMTLAELGYRVSGKKAQLCQEEVTYLGFKIHKGSRSLSNSRTQAILQIPVPKTKRQVREFLGTIGYCRLWIPGFAELAQPLYAATRPGNDPLVWGEKEEEAFQSLKLALTQPPALALPSLDKPFQLFVEETSGAAKGVLTQALGPWKRPVAYLSKRLDPVAAGWPRCLRAIAAAALLTREASKLTFGQDIEITSSHNLESLLRSPPDKWLTNARITQYQVLLLDPPRVRFKQTAALNPATLLPETDDTLPIHHCLDTLDSLTSTRPDLTDQPLAQAEATLFTDGSSYIRDGKRYAGAAVVTLDSVIWAEPLPIGTSAQKAELIALTKALEWSKDKSVNIYTDSRYAFATLHVHGMIYRERGWLTAGGKAIKNAPEILALLTAVWLPKRVAVMHCKGHQKDDAPTSTGNRRADEVAREVAIRPLSTQATISAGKRTADGSEFEKRTADGSEFESPKKKAKVE

SEQ ID NO: 1148 - protein, 2090 aa, synthetic construct
MPAAKRVKLDGGDKKYSIGLDIGTNSVGWAVITDEYKVPSKKFKVLGNTDRHSIKKNLIGALLFDSGETAEATRLKRTARRRYTRRKNRICYLQEIFSNEMAKVDDSFFHRLEESFLVEEDKKHERHPIFGNIVDEVAYHEKYPTIYHLRKKLVDSTDKADLRLIYLALAHMIKFRGHFLIEGDLNPDNSDVDKLFIQLVQTYNQLFEENPINASGVDAKAILSARLSKSRRLENLIAQLPGEKKNGLFGNLIALSLGLTPNFKSNFDLAEDAKLQLSKDTYDDDLDNLLAQIGDQYADLFLAAKNLSDAILLSDILRVNTEITKAPLSASMIKRYDEHHQDLTLLKALVRQQLPEKYKEIFFDQSKNGYAGYIDGGASQEEFYKFIKPILEKMDGTEELLVKLNREDLLRKQRTFDNGSIPHQIHLGELHAILRRQEDFYPFLKDNREKIEKILTFRIPYYVGPLARGNSRFAWMTRKSEETITPWNFEEVVDKGASAQSFIERMTNFDKNLPNEKVLPKHSLLYEYFTVYNELTKVKYVTEGMRKPAFLSGEQKKAIVDLLFKTNRKVTVKQLKEDYFKKIECFDSVEISGVEDRFNASLGTYHDLLKIIKDKDFLDNEENEDILEDIVLTLTLFEDREMIEERLKTYAHLFDDKVMKQLKRRRYTGWGRLSRKLINGIRDKQSGKTILDFLKSDGFANRNFMQLIHDDSLTFKEDIQKAQVSGQGDSLHEHIANLAGSPAIKKGILQTVKVVDELVKVMGRHKPENIVIEMARENQTTQKGQKNSRERMKRIEEGIKELGSQILKEHPVENTQLQNEKLYLYYLQNGRDMYVDQELDINRLSDYDVDHIVPQSFLKDDSIDNKVLTRSDKARGKSDNVPSEEVVKKMKNYWRQLLNAKLITQRKFDNLTKAERGGLSELDKAGFIKRQLVETRQITKHVAQILDSRMNTKYDENDKLIREVKVITLKSKLVSDFRKDFQFYKVREINNYHHAHDAYLNAVVGTALIKKYPKLESEFVYGDYKVYDVRKMIAKSEQEIGKATAKYFFYSNIMNFFKTEITLANGEIRKRPLIETNGETGEIVWDKGRDFATVRKVLSMPQVNIVKKTEVQTGGFSKESILPKRNSDKLIARKKDWDPKKYGGFDSPTVAYSVLVVAKVEKGKSKKLKSVKELLGITIMERSSFEKNPIDFLEAKGYKEVKKDLIIKLPKYSLFELENGRKRMLASAGELQKGNELALPSKYVNFLYLASHYEKLKGSPEDNEQKQLFVEQHKHYLDEIIEQISEFSKRVILADANLDKVLSAYNKHRDKPIREQAENIIHLFTLTNLGAPAAFKYFDTTIDRKRYTSTKEVLDATLIHQSITGLYETRIDLSQLGGDGGPAPGGTAPLEEEYRLFLEAPIQNVTLLEQWKREIPKVWAEINPPGLASTQAPIHVQLLSTALPVRVRQYPITLEAKRSLRETIRKFRAAGILRPVHSPWNTPLLPVRKSGTSEYRMVQDLREVNKRVETIHPTVPNPYTLLSLLPPDRIWYSVLDLKDAFFCIPLAPESQLIFAFEWADAEEGESGQLTWTRLPQGFKNSPTLFNEALNRDLQGFRLDHPSVSLLQYVDDLLIAADTQAACLSATRDLLMTLAELGYRVSGKKAQLCQEEVTYLGFKIHKGSRSLSNSRTQAILQIPVPKTKRQVREFLGTIGYCRLWIPGFAELAQPLYAATRPGNDPLVWGEKEEEAFQSLKLALTQPPALALPSLDKPFQLFVEETSGAAKGVLTQALGPWKRPVAYLSKRLDPVAAGWPRCLRAIAAAALLTREASKLTFGQDIEITSSHNLESLLRSPPDKWLTNARITQYQVLLLDPPRVRFKQTAALNPATLLPETDDTLPIHHCLDTLDSLTSTRPDLTDQPLAQAEATLFTDGSSYIRDGKRYAGAAVVTLDSVIWAEPLPIGTSAQKAELIALTKALEWSKDKSVNIYTDSRYAFATLHVHGMIYRERGWLTAGGKAIKNAPEILALLTAVWLPKRVAVMHCKGHQKDDAPTSTGNRRADEVAREVAIRPLSTQATISAGKRTADGSEFEKRTADGSEFESPKKKAKVE

SEQ ID NO: 1149 - protein, 2092 aa, synthetic construct
MPAAKRVKLDGGDKKYSIGLDIGTNSVGWAVITDEYKVPSKKFKVLGNTDRHSIKKNLIGALLFDSGETAEATRLKRTARRRYTRRKNRICYLQEIFSNEMAKVDDSFFHRLEESFLVEEDKKHERHPIFGNIVDEVAYHEKYPTIYHLRKKLVDSTDKADLRLIYLALAHMIKFRGHFLIEGDLNPDNSDVDKLFIQLVQTYNQLFEENPINASGVDAKAILSARLSKSRRLENLIAQLPGEKKNGLFGNLIALSLGLTPNFKSNFDLAEDAKLQLSKDTYDDDLDNLLAQIGDQYADLFLAAKNLSDAILLSDILRVNTEITKAPLSASMIKRYDEHHQDLTLLKALVRQQLPEKYKEIFFDQSKNGYAGYIDGGASQEEFYKFIKPILEKMDGTEELLVKLNREDLLRKQRTFDNGSIPHQIHLGELHAILRRQEDFYPFLKDNREKIEKILTFRIPYYVGPLARGNSRFAWMTRKSEETITPWNFEEVVDKGASAQSFIERMTNFDKNLPNEKVLPKHSLLYEYFTVYNELTKVKYVTEGMRKPAFLSGEQKKAIVDLLFKTNRKVTVKQLKEDYFKKIECFDSVEISGVEDRFNASLGTYHDLLKIIKDKDFLDNEENEDILEDIVLTLTLFEDREMIEERLKTYAHLFDDKVMKQLKRRRYTGWGRLSRKLINGIRDKQSGKTILDFLKSDGFANRNFMQLIHDDSLTFKEDIQKAQVSGQGDSLHEHIANLAGSPAIKKGILQTVKVVDELVKVMGRHKPENIVIEMARENQTTQKGQKNSRERMKRIEEGIKELGSQILKEHPVENTQLQNEKLYLYYLQNGRDMYVDQELDINRLSDYDVDHIVPQSFLKDDSIDNKVLTRSDKARGKSDNVPSEEVVKKMKNYWRQLLNAKLITQRKFDNLTKAERGGLSELDKAGFIKRQLVETRQITKHVAQILDSRMNTKYDENDKLIREVKVITLKSKLVSDFRKDFQFYKVREINNYHHAHDAYLNAVVGTALIKKYPKLESEFVYGDYKVYDVRKMIAKSEQEIGKATAKYFFYSNIMNFFKTEITLANGEIRKRPLIETNGETGEIVWDKGRDFATVRKVLSMPQVNIVKKTEVQTGGFSKESILPKRNSDKLIARKKDWDPKKYGGFDSPTVAYSVLVVAKVEKGKSKKLKSVKELLGITIMERSSFEKNPIDFLEAKGYKEVKKDLIIKLPKYSLFELENGRKRMLASAGELQKGNELALPSKYVNFLYLASHYEKLKGSPEDNEQKQLFVEQHKHYLDEIIEQISEFSKRVILADANLDKVLSAYNKHRDKPIREQAENIIHLFTLTNLGAPAAFKYFDTTIDRKRYTSTKEVLDATLIHQSITGLYETRIDLSQLGGDGGPAPAPGGTAPLEEEYRLFLEAPIQNVTLLEQWKREIPKVWAEINPPGLASTQAPIHVQLLSTALPVRVRQYPITLEAKRSLRETIRKFRAAGILRPVHSPWNTPLLPVRKSGTSEYRMVQDLREVNKRVETIHPTVPNPYTLLSLLPPDRIWYSVLDLKDAFFCIPLAPESQLIFAFEWADAEEGESGQLTWTRLPQGFKNSPTLFNEALNRDLQGFRLDHPSVSLLQYVDDLLIAADTQAACLSATRDLLMTLAELGYRVSGKKAQLCQEEVTYLGFKIHKGSRSLSNSRTQAILQIPVPKTKRQVREFLGTIGYCRLWIPGFAELAQPLYAATRPGNDPLVWGEKEEEAFQSLKLALTQPPALALPSLDKPFQLFVEETSGAAKGVLTQALGPWKRPVAYLSKRLDPVAAGWPRCLRAIAAAALLTREASKLTFGQDIEITSSHNLESLLRSPPDKWLTNARITQYQVLLLDPPRVRFKQTAALNPATLLPETDDTLPIHHCLDTLDSLTSTRPDLTDQPLAQAEATLFTDGSSYIRDGKRYAGAAVVTLDSVIWAEPLPIGTSAQKAELIALTKALEWSKDKSVNIYTDSRYAFATLHVHGMIYRERGWLTAGGKAIKNAPEILALLTAVWLPKRVAVMHCKGHQKDDAPTSTGNRRADEVAREVAIRPLSTQATISAGKRTADGSEFEKRTADGSEFESPKKKAKVE

SEQ ID NO: 1150 - protein, 2096 aa, synthetic construct
MPAAKRVKLDGGDKKYSIGLDIGTNSVGWAVITDEYKVPSKKFKVLGNTDRHSIKKNLIGALLFDSGETAEATRLKRTARRRYTRRKNRICYLQEIFSNEMAKVDDSFFHRLEESFLVEEDKKHERHPIFGNIVDEVAYHEKYPTIYHLRKKLVDSTDKADLRLIYLALAHMIKFRGHFLIEGDLNPDNSDVDKLFIQLVQTYNQLFEENPINASGVDAKAILSARLSKSRRLENLIAQLPGEKKNGLFGNLIALSLGLTPNFKSNFDLAEDAKLQLSKDTYDDDLDNLLAQIGDQYADLFLAAKNLSDAILLSDILRVNTEITKAPLSASMIKRYDEHHQDLTLLKALVRQQLPEKYKEIFFDQSKNGYAGYIDGGASQEEFYKFIKPILEKMDGTEELLVKLNREDLLRKQRTFDNGSIPHQIHLGELHAILRRQEDFYPFLKDNREKIEKILTFRIPYYVGPLARGNSRFAWMTRKSEETITPWNFEEVVDKGASAQSFIERMTNFDKNLPNEKVLPKHSLLYEYFTVYNELTKVKYVTEGMRKPAFLSGEQKKAIVDLLFKTNRKVTVKQLKEDYFKKIECFDSVEISGVEDRFNASLGTYHDLLKIIKDKDFLDNEENEDILEDIVLTLTLFEDREMIEERLKTYAHLFDDKVMKQLKRRRYTGWGRLSRKLINGIRDKQSGKTILDFLKSDGFANRNFMQLIHDDSLTFKEDIQKAQVSGQGDSLHEHIANLAGSPAIKKGILQTVKVVDELVKVMGRHKPENIVIEMARENQTTQKGQKNSRERMKRIEEGIKELGSQILKEHPVENTQLQNEKLYLYYLQNGRDMYVDQELDINRLSDYDVDHIVPQSFLKDDSIDNKVLTRSDKARGKSDNVPSEEVVKKMKNYWRQLLNAKLITQRKFDNLTKAERGGLSELDKAGFIKRQLVETRQITKHVAQILDSRMNTKYDENDKLIREVKVITLKSKLVSDFRKDFQFYKVREINNYHHAHDAYLNAVVGTALIKKYPKLESEFVYGDYKVYDVRKMIAKSEQEIGKATAKYFFYSNIMNFFKTEITLANGEIRKRPLIETNGETGEIVWDKGRDFATVRKVLSMPQVNIVKKTEVQTGGFSKESILPKRNSDKLIARKKDWDPKKYGGFDSPTVAYSVLVVAKVEKGKSKKLKSVKELLGITIMERSSFEKNPIDFLEAKGYKEVKKDLIIKLPKYSLFELENGRKRMLASAGELQKGNELALPSKYVNFLYLASHYEKLKGSPEDNEQKQLFVEQHKHYLDEIIEQISEFSKRVILADANLDKVLSAYNKHRDKPIREQAENIIHLFTLTNLGAPAAFKYFDTTIDRKRYTSTKEVLDATLIHQSITGLYETRIDLSQLGGDGGGGSPAPGGGGGTAPLEEEYRLFLEAPIQNVTLLEQWKREIPKVWAEINPPGLASTQAPIHVQLLSTALPVRVRQYPITLEAKRSLRETIRKFRAAGILRPVHSPWNTPLLPVRKSGTSEYRMVQDLREVNKRVETIHPTVPNPYTLLSLLPPDRIWYSVLDLKDAFFCIPLAPESQLIFAFEWADAEEGESGQLTWTRLPQGFKNSPTLFNEALNRDLQGFRLDHPSVSLLQYVDDLLIAADTQAACLSATRDLLMTLAELGYRVSGKKAQLCQEEVTYLGFKIHKGSRSLSNSRTQAILQIPVPKTKRQVREFLGTIGYCRLWIPGFAELAQPLYAATRPGNDPLVWGEKEEEAFQSLKLALTQPPALALPSLDKPFQLFVEETSGAAKGVLTQALGPWKRPVAYLSKRLDPVAAGWPRCLRAIAAAALLTREASKLTFGQDIEITSSHNLESLLRSPPDKWLTNARITQYQVLLLDPPRVRFKQTAALNPATLLPETDDTLPIHHCLDTLDSLTSTRPDLTDQPLAQAEATLFTDGSSYIRDGKRYAGAAVVTLDSVIWAEPLPIGTSAQKAELIALTKALEWSKDKSVNIYTDSRYAFATLHVHGMIYRERGWLTAGGKAIKNAPEILALLTAVWLPKRVAVMHCKGHQKDDAPTSTGNRRADEVAREVAIRPLSTQATISAGKRTADGSEFEKRTADGSEFESPKKKAKVE

SEQ ID NO: 1151 - protein, 2098 aa, synthetic construct
MPAAKRVKLDGGDKKYSIGLDIGTNSVGWAVITDEYKVPSKKFKVLGNTDRHSIKKNLIGALLFDSGETAEATRLKRTARRRYTRRKNRICYLQEIFSNEMAKVDDSFFHRLEESFLVEEDKKHERHPIFGNIVDEVAYHEKYPTIYHLRKKLVDSTDKADLRLIYLALAHMIKFRGHFLIEGDLNPDNSDVDKLFIQLVQTYNQLFEENPINASGVDAKAILSARLSKSRRLENLIAQLPGEKKNGLFGNLIALSLGLTPNFKSNFDLAEDAKLQLSKDTYDDDLDNLLAQIGDQYADLFLAAKNLSDAILLSDILRVNTEITKAPLSASMIKRYDEHHQDLTLLKALVRQQLPEKYKEIFFDQSKNGYAGYIDGGASQEEFYKFIKPILEKMDGTEELLVKLNREDLLRKQRTFDNGSIPHQIHLGELHAILRRQEDFYPFLKDNREKIEKILTFRIPYYVGPLARGNSRFAWMTRKSEETITPWNFEEVVDKGASAQSFIERMTNFDKNLPNEKVLPKHSLLYEYFTVYNELTKVKYVTEGMRKPAFLSGEQKKAIVDLLFKTNRKVTVKQLKEDYFKKIECFDSVEISGVEDRFNASLGTYHDLLKIIKDKDFLDNEENEDILEDIVLTLTLFEDREMIEERLKTYAHLFDDKVMKQLKRRRYTGWGRLSRKLINGIRDKQSGKTILDFLKSDGFANRNFMQLIHDDSLTFKEDIQKAQVSGQGDSLHEHIANLAGSPAIKKGILQTVKVVDELVKVMGRHKPENIVIEMARENQTTQKGQKNSRERMKRIEEGIKELGSQILKEHPVENTQLQNEKLYLYYLQNGRDMYVDQELDINRLSDYDVDHIVPQSFLKDDSIDNKVLTRSDKARGKSDNVPSEEVVKKMKNYWRQLLNAKLITQRKFDNLTKAERGGLSELDKAGFIKRQLVETRQITKHVAQILDSRMNTKYDENDKLIREVKVITLKSKLVSDFRKDFQFYKVREINNYHHAHDAYLNAVVGTALIKKYPKLESEFVYGDYKVYDVRKMIAKSEQEIGKATAKYFFYSNIMNFFKTEITLANGEIRKRPLIETNGETGEIVWDKGRDFATVRKVLSMPQVNIVKKTEVQTGGFSKESILPKRNSDKLIARKKDWDPKKYGGFDSPTVAYSVLVVAKVEKGKSKKLKSVKELLGITIMERSSFEKNPIDFLEAKGYKEVKKDLIIKLPKYSLFELENGRKRMLASAGELQKGNELALPSKYVNFLYLASHYEKLKGSPEDNEQKQLFVEQHKHYLDEIIEQISEFSKRVILADANLDKVLSAYNKHRDKPIREQAENIIHLFTLTNLGAPAAFKYFDTTIDRKRYTSTKEVLDATLIHQSITGLYETRIDLSQLGGDGGGSSGGGEAAAKGGTAPLEEEYRLFLEAPIQNVTLLEQWKREIPKVWAEINPPGLASTQAPIHVQLLSTALPVRVRQYPITLEAKRSLRETIRKFRAAGILRPVHSPWNTPLLPVRKSGTSEYRMVQDLREVNKRVETIHPTVPNPYTLLSLLPPDRIWYSVLDLKDAFFCIPLAPESQLIFAFEWADAEEGESGQLTWTRLPQGFKNSPTLFNEALNRDLQGFRLDHPSVSLLQYVDDLLIAADTQAACLSATRDLLMTLAELGYRVSGKKAQLCQEEVTYLGFKIHKGSRSLSNSRTQAILQIPVPKTKRQVREFLGTIGYCRLWIPGFAELAQPLYAATRPGNDPLVWGEKEEEAFQSLKLALTQPPALALPSLDKPFQLFVEETSGAAKGVLTQALGPWKRPVAYLSKRLDPVAAGWPRCLRAIAAAALLTREASKLTFGQDIEITSSHNLESLLRSPPDKWLTNARITQYQVLLLDPPRVRFKQTAALNPATLLPETDDTLPIHHCLDTLDSLTSTRPDLTDQPLAQAEATLFTDGSSYIRDGKRYAGAAVVTLDSVIWAEPLPIGTSAQKAELIALTKALEWSKDKSVNIYTDSRYAFATLHVHGMIYRERGWLTAGGKAIKNAPEILALLTAVWLPKRVAVMHCKGHQKDDAPTSTGNRRADEVAREVAIRPLSTQATISAGKRTADGSEFEKRTADGSEFESPKKKAKVE

SEQ ID NO: 1152 - protein, 2097 aa, synthetic construct
MPAAKRVKLDGGDKKYSIGLDIGTNSVGWAVITDEYKVPSKKFKVLGNTDRHSIKKNLIGALLFDSGETAEATRLKRTARRRYTRRKNRICYLQEIFSNEMAKVDDSFFHRLEESFLVEEDKKHERHPIFGNIVDEVAYHEKYPTIYHLRKKLVDSTDKADLRLIYLALAHMIKFRGHFLIEGDLNPDNSDVDKLFIQLVQTYNQLFEENPINASGVDAKAILSARLSKSRRLENLIAQLPGEKKNGLFGNLIALSLGLTPNFKSNFDLAEDAKLQLSKDTYDDDLDNLLAQIGDQYADLFLAAKNLSDAILLSDILRVNTEITKAPLSASMIKRYDEHHQDLTLLKALVRQQLPEKYKEIFFDQSKNGYAGYIDGGASQEEFYKFIKPILEKMDGTEELLVKLNREDLLRKQRTFDNGSIPHQIHLGELHAILRRQEDFYPFLKDNREKIEKILTFRIPYYVGPLARGNSRFAWMTRKSEETITPWNFEEVVDKGASAQSFIERMTNFDKNLPNEKVLPKHSLLYEYFTVYNELTKVKYVTEGMRKPAFLSGEQKKAIVDLLFKTNRKVTVKQLKEDYFKKIECFDSVEISGVEDRFNASLGTYHDLLKIIKDKDFLDNEENEDILEDIVLTLTLFEDREMIEERLKTYAHLFDDKVMKQLKRRRYTGWGRLSRKLINGIRDKQSGKTILDFLKSDGFANRNFMQLIHDDSLTFKEDIQKAQVSGQGDSLHEHIANLAGSPAIKKGILQTVKVVDELVKVMGRHKPENIVIEMARENQTTQKGQKNSRERMKRIEEGIKELGSQILKEHPVENTQLQNEKLYLYYLQNGRDMYVDQELDINRLSDYDVDHIVPQSFLKDDSIDNKVLTRSDKARGKSDNVPSEEVVKKMKNYWRQLLNAKLITQRKFDNLTKAERGGLSELDKAGFIKRQLVETRQITKHVAQILDSRMNTKYDENDKLIREVKVITLKSKLVSDFRKDFQFYKVREINNYHHAHDAYLNAVVGTALIKKYPKLESEFVYGDYKVYDVRKMIAKSEQEIGKATAKYFFYSNIMNFFKTEITLANGEIRKRPLIETNGETGEIVWDKGRDFATVRKVLSMPQVNIVKKTEVQTGGFSKESILPKRNSDKLIARKKDWDPKKYGGFDSPTVAYSVLVVAKVEKGKSKKLKSVKELLGITIMERSSFEKNPIDFLEAKGYKEVKKDLIIKLPKYSLFELENGRKRMLASAGELQKGNELALPSKYVNFLYLASHYEKLKGSPEDNEQKQLFVEQHKHYLDEIIEQISEFSKRVILADANLDKVLSAYNKHRDKPIREQAENIIHLFTLTNLGAPAAFKYFDTTIDRKRYTSTKEVLDATLIHQSITGLYETRIDLSQLGGDGGEAAAKEAAAKGGTAPLEEEYRLFLEAPIQNVTLLEQWKREIPKVWAEINPPGLASTQAPIHVQLLSTALPVRVRQYPITLEAKRSLRETIRKFRAAGILRPVHSPWNTPLLPVRKSGTSEYRMVQDLREVNKRVETIHPTVPNPYTLLSLLPPDRIWYSVLDLKDAFFCIPLAPESQLIFAFEWADAEEGESGQLTWTRLPQGFKNSPTLFNEALNRDLQGFRLDHPSVSLLQYVDDLLIAADTQAACLSATRDLLMTLAELGYRVSGKKAQLCQEEVTYLGFKIHKGSRSLSNSRTQAILQIPVPKTKRQVREFLGTIGYCRLWIPGFAELAQPLYAATRPGNDPLVWGEKEEEAFQSLKLALTQPPALALPSLDKPFQLFVEETSGAAKGVLTQALGPWKRPVAYLSKRLDPVAAGWPRCLRAIAAAALLTREASKLTFGQDIEITSSHNLESLLRSPPDKWLTNARITQYQVLLLDPPRVRFKQTAALNPATLLPETDDTLPIHHCLDTLDSLTSTRPDLTDQPLAQAEATLFTDGSSYIRDGKRYAGAAVVTLDSVIWAEPLPIGTSAQKAELIALTKALEWSKDKSVNIYTDSRYAFATLHVHGMIYRERGWLTAGGKAIKNAPEILALLTAVWLPKRVAVMHCKGHQKDDAPTSTGNRRADEVAREVAIRPLSTQATISAGKRTADGSEFEKRTADGSEFESPKKKAKVE

SEQ ID NO: 1153 - protein, 2096 aa, synthetic construct
MPAAKRVKLDGGDKKYSIGLDIGTNSVGWAVITDEYKVPSKKFKVLGNTDRHSIKKNLIGALLFDSGETAEATRLKRTARRRYTRRKNRICYLQEIFSNEMAKVDDSFFHRLEESFLVEEDKKHERHPIFGNIVDEVAYHEKYPTIYHLRKKLVDSTDKADLRLIYLALAHMIKFRGHFLIEGDLNPDNSDVDKLFIQLVQTYNQLFEENPINASGVDAKAILSARLSKSRRLENLIAQLPGEKKNGLFGNLIALSLGLTPNFKSNFDLAEDAKLQLSKDTYDDDLDNLLAQIGDQYADLFLAAKNLSDAILLSDILRVNTEITKAPLSASMIKRYDEHHQDLTLLKALVRQQLPEKYKEIFFDQSKNGYAGYIDGGASQEEFYKFIKPILEKMDGTEELLVKLNREDLLRKQRTFDNGSIPHQIHLGELHAILRRQEDFYPFLKDNREKIEKILTFRIPYYVGPLARGNSRFAWMTRKSEETITPWNFEEVVDKGASAQSFIERMTNFDKNLPNEKVLPKHSLLYEYFTVYNELTKVKYVTEGMRKPAFLSGEQKKAIVDLLFKTNRKVTVKQLKEDYFKKIECFDSVEISGVEDRFNASLGTYHDLLKIIKDKDFLDNEENEDILEDIVLTLTLFEDREMIEERLKTYAHLFDDKVMKQLKRRRYTGWGRLSRKLINGIRDKQSGKTILDFLKSDGFANRNFMQLIHDDSLTFKEDIQKAQVSGQGDSLHEHIANLAGSPAIKKGILQTVKVVDELVKVMGRHKPENIVIEMARENQTTQKGQKNSRERMKRIEEGIKELGSQILKEHPVENTQLQNEKLYLYYLQNGRDMYVDQELDINRLSDYDVDHIVPQSFLKDDSIDNKVLTRSDKARGKSDNVPSEEVVKKMKNYWRQLLNAKLITQRKFDNLTKAERGGLSELDKAGFIKRQLVETRQITKHVAQILDSRMNTKYDENDKLIREVKVITLKSKLVSDFRKDFQFYKVREINNYHHAHDAYLNAVVGTALIKKYPKLESEFVYGDYKVYDVRKMIAKSEQEIGKATAKYFFYSNIMNFFKTEITLANGEIRKRPLIETNGETGEIVWDKGRDFATVRKVLSMPQVNIVKKTEVQTGGFSKESILPKRNSDKLIARKKDWDPKKYGGFDSPTVAYSVLVVAKVEKGKSKKLKSVKELLGITIMERSSFEKNPIDFLEAKGYKEVKKDLIIKLPKYSLFELENGRKRMLASAGELQKGNELALPSKYVNFLYLASHYEKLKGSPEDNEQKQLFVEQHKHYLDEIIEQISEFSKRVILADANLDKVLSAYNKHRDKPIREQAENIIHLFTLTNLGAPAAFKYFDTTIDRKRYTSTKEVLDATLIHQSITGLYETRIDLSQLGGDGGGGSPAPGSSGGTAPLEEEYRLFLEAPIQNVTLLEQWKREIPKVWAEINPPGLASTQAPIHVQLLSTALPVRVRQYPITLEAKRSLRETIRKFRAAGILRPVHSPWNTPLLPVRKSGTSEYRMVQDLREVNKRVETIHPTVPNPYTLLSLLPPDRIWYSVLDLKDAFFCIPLAPESQLIFAFEWADAEEGESGQLTWTRLPQGFKNSPTLFNEALNRDLQGFRLDHPSVSLLQYVDDLLIAADTQAACLSATRDLLMTLAELGYRVSGKKAQLCQEEVTYLGFKIHKGSRSLSNSRTQAILQIPVPKTKRQVREFLGTIGYCRLWIPGFAELAQPLYAATRPGNDPLVWGEKEEEAFQSLKLALTQPPALALPSLDKPFQLFVEETSGAAKGVLTQALGPWKRPVAYLSKRLDPVAAGWPRCLRAIAAAALLTREASKLTFGQDIEITSSHNLESLLRSPPDKWLTNARITQYQVLLLDPPRVRFKQTAALNPATLLPETDDTLPIHHCLDTLDSLTSTRPDLTDQPLAQAEATLFTDGSSYIRDGKRYAGAAVVTLDSVIWAEPLPIGTSAQKAELIALTKALEWSKDKSVNIYTDSRYAFATLHVHGMIYRERGWLTAGGKAIKNAPEILALLTAVWLPKRVAVMHCKGHQKDDAPTSTGNRRADEVAREVAIRPLSTQATISAGKRTADGSEFEKRTADGSEFESPKKKAKVE

SEQ ID NO: 1154 - protein, 2098 aa, synthetic construct
MPAAKRVKLDGGDKKYSIGLDIGTNSVGWAVITDEYKVPSKKFKVLGNTDRHSIKKNLIGALLFDSGETAEATRLKRTARRRYTRRKNRICYLQEIFSNEMAKVDDSFFHRLEESFLVEEDKKHERHPIFGNIVDEVAYHEKYPTIYHLRKKLVDSTDKADLRLIYLALAHMIKFRGHFLIEGDLNPDNSDVDKLFIQLVQTYNQLFEENPINASGVDAKAILSARLSKSRRLENLIAQLPGEKKNGLFGNLIALSLGLTPNFKSNFDLAEDAKLQLSKDTYDDDLDNLLAQIGDQYADLFLAAKNLSDAILLSDILRVNTEITKAPLSASMIKRYDEHHQDLTLLKALVRQQLPEKYKEIFFDQSKNGYAGYIDGGASQEEFYKFIKPILEKMDGTEELLVKLNREDLLRKQRTFDNGSIPHQIHLGELHAILRRQEDFYPFLKDNREKIEKILTFRIPYYVGPLARGNSRFAWMTRKSEETITPWNFEEVVDKGASAQSFIERMTNFDKNLPNEKVLPKHSLLYEYFTVYNELTKVKYVTEGMRKPAFLSGEQKKAIVDLLFKTNRKVTVKQLKEDYFKKIECFDSVEISGVEDRFNASLGTYHDLLKIIKDKDFLDNEENEDILEDIVLTLTLFEDREMIEERLKTYAHLFDDKVMKQLKRRRYTGWGRLSRKLINGIRDKQSGKTILDFLKSDGFANRNFMQLIHDDSLTFKEDIQKAQVSGQGDSLHEHIANLAGSPAIKKGILQTVKVVDELVKVMGRHKPENIVIEMARENQTTQKGQKNSRERMKRIEEGIKELGSQILKEHPVENTQLQNEKLYLYYLQNGRDMYVDQELDINRLSDYDVDHIVPQSFLKDDSIDNKVLTRSDKARGKSDNVPSEEVVKKMKNYWRQLLNAKLITQRKFDNLTKAERGGLSELDKAGFIKRQLVETRQITKHVAQILDSRMNTKYDENDKLIREVKVITLKSKLVSDFRKDFQFYKVREINNYHHAHDAYLNAVVGTALIKKYPKLESEFVYGDYKVYDVRKMIAKSEQEIGKATAKYFFYSNIMNFFKTEITLANGEIRKRPLIETNGETGEIVWDKGRDFATVRKVLSMPQVNIVKKTEVQTGGFSKESILPKRNSDKLIARKKDWDPKKYGGFDSPTVAYSVLVVAKVEKGKSKKLKSVKELLGITIMERSSFEKNPIDFLEAKGYKEVKKDLIIKLPKYSLFELENGRKRMLASAGELQKGNELALPSKYVNFLYLASHYEKLKGSPEDNEQKQLFVEQHKHYLDEIIEQISEFSKRVILADANLDKVLSAYNKHRDKPIREQAENIIHLFTLTNLGAPAAFKYFDTTIDRKRYTSTKEVLDATLIHQSITGLYETRIDLSQLGGDGGGGGEAAAKGGSGGTAPLEEEYRLFLEAPIQNVTLLEQWKREIPKVWAEINPPGLASTQAPIHVQLLSTALPVRVRQYPITLEAKRSLRETIRKFRAAGILRPVHSPWNTPLLPVRKSGTSEYRMVQDLREVNKRVETIHPTVPNPYTLLSLLPPDRIWYSVLDLKDAFFCIPLAPESQLIFAFEWADAEEGESGQLTWTRLPQGFKNSPTLFNEALNRDLQGFRLDHPSVSLLQYVDDLLIAADTQAACLSATRDLLMTLAELGYRVSGKKAQLCQEEVTYLGFKIHKGSRSLSNSRTQAILQIPVPKTKRQVREFLGTIGYCRLWIPGFAELAQPLYAATRPGNDPLVWGEKEEEAFQSLKLALTQPPALALPSLDKPFQLFVEETSGAAKGVLTQALGPWKRPVAYLSKRLDPVAAGWPRCLRAIAAAALLTREASKLTFGQDIEITSSHNLESLLRSPPDKWLTNARITQYQVLLLDPPRVRFKQTAALNPATLLPETDDTLPIHHCLDTLDSLTSTRPDLTDQPLAQAEATLFTDGSSYIRDGKRYAGAAVVTLDSVIWAEPLPIGTSAQKAELIALTKALEWSKDKSVNIYTDSRYAFATLHVHGMIYRERGWLTAGGKAIKNAPEILALLTAVWLPKRVAVMHCKGHQKDDAPTSTGNRRADEVAREVAIRPLSTQATISAGKRTADGSEFEKRTADGSEFESPKKKAKVE

SEQ ID NO: 1155 - protein, 2098 aa, synthetic construct
MPAAKRVKLDGGDKKYSIGLDIGTNSVGWAVITDEYKVPSKKFKVLGNTDRHSIKKNLIGALLFDSGETAEATRLKRTARRRYTRRKNRICYLQEIFSNEMAKVDDSFFHRLEESFLVEEDKKHERHPIFGNIVDEVAYHEKYPTIYHLRKKLVDSTDKADLRLIYLALAHMIKFRGHFLIEGDLNPDNSDVDKLFIQLVQTYNQLFEENPINASGVDAKAILSARLSKSRRLENLIAQLPGEKKNGLFGNLIALSLGLTPNFKSNFDLAEDAKLQLSKDTYDDDLDNLLAQIGDQYADLFLAAKNLSDAILLSDILRVNTEITKAPLSASMIKRYDEHHQDLTLLKALVRQQLPEKYKEIFFDQSKNGYAGYIDGGASQEEFYKFIKPILEKMDGTEELLVKLNREDLLRKQRTFDNGSIPHQIHLGELHAILRRQEDFYPFLKDNREKIEKILTFRIPYYVGPLARGNSRFAWMTRKSEETITPWNFEEVVDKGASAQSFIERMTNFDKNLPNEKVLPKHSLLYEYFTVYNELTKVKYVTEGMRKPAFLSGEQKKAIVDLLFKTNRKVTVKQLKEDYFKKIECFDSVEISGVEDRFNASLGTYHDLLKIIKDKDFLDNEENEDILEDIVLTLTLFEDREMIEERLKTYAHLFDDKVMKQLKRRRYTGWGRLSRKLINGIRDKQSGKTILDFLKSDGFANRNFMQLIHDDSLTFKEDIQKAQVSGQGDSLHEHIANLAGSPAIKKGILQTVKVVDELVKVMGRHKPENIVIEMARENQTTQKGQKNSRERMKRIEEGIKELGSQILKEHPVENTQLQNEKLYLYYLQNGRDMYVDQELDINRLSDYDVDHIVPQSFLKDDSIDNKVLTRSDKARGKSDNVPSEEVVKKMKNYWRQLLNAKLITQRKFDNLTKAERGGLSELDKAGFIKRQLVETRQITKHVAQILDSRMNTKYDENDKLIREVKVITLKSKLVSDFRKDFQFYKVREINNYHHAHDAYLNAVVGTALIKKYPKLESEFVYGDYKVYDVRKMIAKSEQEIGKATAKYFFYSNIMNFFKTEITLANGEIRKRPLIETNGETGEIVWDKGRDFATVRKVLSMPQVNIVKKTEVQTGGFSKESILPKRNSDKLIARKKDWDPKKYGGFDSPTVAYSVLVVAKVEKGKSKKLKSVKELLGITIMERSSFEKNPIDFLEAKGYKEVKKDLIIKLPKYSLFELENGRKRMLASAGELQKGNELALPSKYVNFLYLASHYEKLKGSPEDNEQKQLFVEQHKHYLDEIIEQISEFSKRVILADANLDKVLSAYNKHRDKPIREQAENIIHLFTLTNLGAPAAFKYFDTTIDRKRYTSTKEVLDATLIHQSITGLYETRIDLSQLGGDGGGGGEAAAKPAPGGTAPLEEEYRLFLEAPIQNVTLLEQWKREIPKVWAEINPPGLASTQAPIHVQLLSTALPVRVRQYPITLEAKRSLRETIRKFRAAGILRPVHSPWNTPLLPVRKSGTSEYRMVQDLREVNKRVETIHPTVPNPYTLLSLLPPDRIWYSVLDLKDAFFCIPLAPESQLIFAFEWADAEEGESGQLTWTRLPQGFKNSPTLFNEALNRDLQGFRLDHPSVSLLQYVDDLLIAADTQAACLSATRDLLMTLAELGYRVSGKKAQLCQEEVTYLGFKIHKGSRSLSNSRTQAILQIPVPKTKRQVREFLGTIGYCRLWIPGFAELAQPLYAATRPGNDPLVWGEKEEEAFQSLKLALTQPPALALPSLDKPFQLFVEETSGAAKGVLTQALGPWKRPVAYLSKRLDPVAAGWPRCLRAIAAAALLTREASKLTFGQDIEITSSHNLESLLRSPPDKWLTNARITQYQVLLLDPPRVRFKQTAALNPATLLPETDDTLPIHHCLDTLDSLTSTRPDLTDQPLAQAEATLFTDGSSYIRDGKRYAGAAVVTLDSVIWAEPLPIGTSAQKAELIALTKALEWSKDKSVNIYTDSRYAFATLHVHGMIYRERGWLTAGGKAIKNAPEILALLTAVWLPKRVAVMHCKGHQKDDAPTSTGNRRADEVAREVAIRPLSTQATISAGKRTADGSEFEKRTADGSEFESPKKKAKVE

SEQ ID NO: 1156 - protein, 2098 aa, synthetic construct
MPAAKRVKLDGGDKKYSIGLDIGTNSVGWAVITDEYKVPSKKFKVLGNTDRHSIKKNLIGALLFDSGETAEATRLKRTARRRYTRRKNRICYLQEIFSNEMAKVDDSFFHRLEESFLVEEDKKHERHPIFGNIVDEVAYHEKYPTIYHLRKKLVDSTDKADLRLIYLALAHMIKFRGHFLIEGDLNPDNSDVDKLFIQLVQTYNQLFEENPINASGVDAKAILSARLSKSRRLENLIAQLPGEKKNGLFGNLIALSLGLTPNFKSNFDLAEDAKLQLSKDTYDDDLDNLLAQIGDQYADLFLAAKNLSDAILLSDILRVNTEITKAPLSASMIKRYDEHHQDLTLLKALVRQQLPEKYKEIFFDQSKNGYAGYIDGGASQEEFYKFIKPILEKMDGTEELLVKLNREDLLRKQRTFDNGSIPHQIHLGELHAILRRQEDFYPFLKDNREKIEKILTFRIPYYVGPLARGNSRFAWMTRKSEETITPWNFEEVVDKGASAQSFIERMTNFDKNLPNEKVLPKHSLLYEYFTVYNELTKVKYVTEGMRKPAFLSGEQKKAIVDLLFKTNRKVTVKQLKEDYFKKIECFDSVEISGVEDRFNASLGTYHDLLKIIKDKDFLDNEENEDILEDIVLTLTLFEDREMIEERLKTYAHLFDDKVMKQLKRRRYTGWGRLSRKLINGIRDKQSGKTILDFLKSDGFANRNFMQLIHDDSLTFKEDIQKAQVSGQGDSLHEHIANLAGSPAIKKGILQTVKVVDELVKVMGRHKPENIVIEMARENQTTQKGQKNSRERMKRIEEGIKELGSQILKEHPVENTQLQNEKLYLYYLQNGRDMYVDQELDINRLSDYDVDHIVPQSFLKDDSIDNKVLTRSDKARGKSDNVPSEEVVKKMKNYWRQLLNAKLITQRKFDNLTKAERGGLSELDKAGFIKRQLVETRQITKHVAQILDSRMNTKYDENDKLIREVKVITLKSKLVSDFRKDFQFYKVREINNYHHAHDAYLNAVVGTALIKKYPKLESEFVYGDYKVYDVRKMIAKSEQEIGKATAKYFFYSNIMNFFKTEITLANGEIRKRPLIETNGETGEIVWDKGRDFATVRKVLSMPQVNIVKKTEVQTGGFSKESILPKRNSDKLIARKKDWDPKKYGGFDSPTVAYSVLVVAKVEKGKSKKLKSVKELLGITIMERSSFEKNPIDFLEAKGYKEVKKDLIIKLPKYSLFELENGRKRMLASAGELQKGNELALPSKYVNFLYLASHYEKLKGSPEDNEQKQLFVEQHKHYLDEIIEQISEFSKRVILADANLDKVLSAYNKHRDKPIREQAENIIHLFTLTNLGAPAAFKYFDTTIDRKRYTSTKEVLDATLIHQSITGLYETRIDLSQLGGDGGEAAAKPAPGGSGGTAPLEEEYRLFLEAPIQNVTLLEQWKREIPKVWAEINPPGLASTQAPIHVQLLSTALPVRVRQYPITLEAKRSLRETIRKFRAAGILRPVHSPWNTPLLPVRKSGTSEYRMVQDLREVNKRVETIHPTVPNPYTLLSLLPPDRIWYSVLDLKDAFFCIPLAPESQLIFAFEWADAEEGESGQLTWTRLPQGFKNSPTLFNEALNRDLQGFRLDHPSVSLLQYVDDLLIAADTQAACLSATRDLLMTLAELGYRVSGKKAQLCQEEVTYLGFKIHKGSRSLSNSRTQAILQIPVPKTKRQVREFLGTIGYCRLWIPGFAELAQPLYAATRPGNDPLVWGEKEEEAFQSLKLALTQPPALALPSLDKPFQLFVEETSGAAKGVLTQALGPWKRPVAYLSKRLDPVAAGWPRCLRAIAAAALLTREASKLTFGQDIEITSSHNLESLLRSPPDKWLTNARITQYQVLLLDPPRVRFKQTAALNPATLLPETDDTLPIHHCLDTLDSLTSTRPDLTDQPLAQAEATLFTDGSSYIRDGKRYAGAAVVTLDSVIWAEPLPIGTSAQKAELIALTKALEWSKDKSVNIYTDSRYAFATLHVHGMIYRERGWLTAGGKAIKNAPEILALLTAVWLPKRVAVMHCKGHQKDDAPTSTGNRRADEVAREVAIRPLSTQATISAGKRTADGSEFEKRTADGSEFESPKKKAKVE

SEQ ID NO: 1157 - protein, 2098 aa, synthetic construct
MPAAKRVKLDGGDKKYSIGLDIGTNSVGWAVITDEYKVPSKKFKVLGNTDRHSIKKNLIGALLFDSGETAEATRLKRTARRRYTRRKNRICYLQEIFSNEMAKVDDSFFHRLEESFLVEEDKKHERHPIFGNIVDEVAYHEKYPTIYHLRKKLVDSTDKADLRLIYLALAHMIKFRGHFLIEGDLNPDNSDVDKLFIQLVQTYNQLFEENPINASGVDAKAILSARLSKSRRLENLIAQLPGEKKNGLFGNLIALSLGLTPNFKSNFDLAEDAKLQLSKDTYDDDLDNLLAQIGDQYADLFLAAKNLSDAILLSDILRVNTEITKAPLSASMIKRYDEHHQDLTLLKALVRQQLPEKYKEIFFDQSKNGYAGYIDGGASQEEFYKFIKPILEKMDGTEELLVKLNREDLLRKQRTFDNGSIPHQIHLGELHAILRRQEDFYPFLKDNREKIEKILTFRIPYYVGPLARGNSRFAWMTRKSEETITPWNFEEVVDKGASAQSFIERMTNFDKNLPNEKVLPKHSLLYEYFTVYNELTKVKYVTEGMRKPAFLSGEQKKAIVDLLFKTNRKVTVKQLKEDYFKKIECFDSVEISGVEDRFNASLGTYHDLLKIIKDKDFLDNEENEDILEDIVLTLTLFEDREMIEERLKTYAHLFDDKVMKQLKRRRYTGWGRLSRKLINGIRDKQSGKTILDFLKSDGFANRNFMQLIHDDSLTFKEDIQKAQVSGQGDSLHEHIANLAGSPAIKKGILQTVKVVDELVKVMGRHKPENIVIEMARENQTTQKGQKNSRERMKRIEEGIKELGSQILKEHPVENTQLQNEKLYLYYLQNGRDMYVDQELDINRLSDYDVDHIVPQSFLKDDSIDNKVLTRSDKARGKSDNVPSEEVVKKMKNYWRQLLNAKLITQRKFDNLTKAERGGLSELDKAGFIKRQLVETRQITKHVAQILDSRMNTKYDENDKLIREVKVITLKSKLVSDFRKDFQFYKVREINNYHHAHDAYLNAVVGTALIKKYPKLESEFVYGDYKVYDVRKMIAKSEQEIGKATAKYFFYSNIMNFFKTEITLANGEIRKRPLIETNGETGEIVWDKGRDFATVRKVLSMPQVNIVKKTEVQTGGFSKESILPKRNSDKLIARKKDWDPKKYGGFDSPTVAYSVLVVAKVEKGKSKKLKSVKELLGITIMERSSFEKNPIDFLEAKGYKEVKKDLIIKLPKYSLFELENGRKRMLASAGELQKGNELALPSKYVNFLYLASHYEKLKGSPEDNEQKQLFVEQHKHYLDEIIEQISEFSKRVILADANLDKVLSAYNKHRDKPIREQAENIIHLFTLTNLGAPAAFKYFDTTIDRKRYTSTKEVLDATLIHQSITGLYETRIDLSQLGGDGGEAAAKGGGGGSGGTAPLEEEYRLFLEAPIQNVTLLEQWKREIPKVWAEINPPGLASTQAPIHVQLLSTALPVRVRQYPITLEAKRSLRETIRKFRAAGILRPVHSPWNTPLLPVRKSGTSEYRMVQDLREVNKRVETIHPTVPNPYTLLSLLPPDRIWYSVLDLKDAFFCIPLAPESQLIFAFEWADAEEGESGQLTWTRLPQGFKNSPTLFNEALNRDLQGFRLDHPSVSLLQYVDDLLIAADTQAACLSATRDLLMTLAELGYRVSGKKAQLCQEEVTYLGFKIHKGSRSLSNSRTQAILQIPVPKTKRQVREFLGTIGYCRLWIPGFAELAQPLYAATRPGNDPLVWGEKEEEAFQSLKLALTQPPALALPSLDKPFQLFVEETSGAAKGVLTQALGPWKRPVAYLSKRLDPVAAGWPRCLRAIAAAALLTREASKLTFGQDIEITSSHNLESLLRSPPDKWLTNARITQYQVLLLDPPRVRFKQTAALNPATLLPETDDTLPIHHCLDTLDSLTSTRPDLTDQPLAQAEATLFTDGSSYIRDGKRYAGAAVVTLDSVIWAEPLPIGTSAQKAELIALTKALEWSKDKSVNIYTDSRYAFATLHVHGMIYRERGWLTAGGKAIKNAPEILALLTAVWLPKRVAVMHCKGHQKDDAPTSTGNRRADEVAREVAIRPLSTQATISAGKRTADGSEFEKRTADGSEFESPKKKAKVE

SEQ ID NO: 1158 - protein, 2102 aa, synthetic construct
MPAAKRVKLDGGDKKYSIGLDIGTNSVGWAVITDEYKVPSKKFKVLGNTDRHSIKKNLIGALLFDSGETAEATRLKRTARRRYTRRKNRICYLQEIFSNEMAKVDDSFFHRLEESFLVEEDKKHERHPIFGNIVDEVAYHEKYPTIYHLRKKLVDSTDKADLRLIYLALAHMIKFRGHFLIEGDLNPDNSDVDKLFIQLVQTYNQLFEENPINASGVDAKAILSARLSKSRRLENLIAQLPGEKKNGLFGNLIALSLGLTPNFKSNFDLAEDAKLQLSKDTYDDDLDNLLAQIGDQYADLFLAAKNLSDAILLSDILRVNTEITKAPLSASMIKRYDEHHQDLTLLKALVRQQLPEKYKEIFFDQSKNGYAGYIDGGASQEEFYKFIKPILEKMDGTEELLVKLNREDLLRKQRTFDNGSIPHQIHLGELHAILRRQEDFYPFLKDNREKIEKILTFRIPYYVGPLARGNSRFAWMTRKSEETITPWNFEEVVDKGASAQSFIERMTNFDKNLPNEKVLPKHSLLYEYFTVYNELTKVKYVTEGMRKPAFLSGEQKKAIVDLLFKTNRKVTVKQLKEDYFKKIECFDSVEISGVEDRFNASLGTYHDLLKIIKDKDFLDNEENEDILEDIVLTLTLFEDREMIEERLKTYAHLFDDKVMKQLKRRRYTGWGRLSRKLINGIRDKQSGKTILDFLKSDGFANRNFMQLIHDDSLTFKEDIQKAQVSGQGDSLHEHIANLAGSPAIKKGILQTVKVVDELVKVMGRHKPENIVIEMARENQTTQKGQKNSRERMKRIEEGIKELGSQILKEHPVENTQLQNEKLYLYYLQNGRDMYVDQELDINRLSDYDVDHIVPQSFLKDDSIDNKVLTRSDKARGKSDNVPSEEVVKKMKNYWRQLLNAKLITQRKFDNLTKAERGGLSELDKAGFIKRQLVETRQITKHVAQILDSRMNTKYDENDKLIREVKVITLKSKLVSDFRKDFQFYKVREINNYHHAHDAYLNAVVGTALIKKYPKLESEFVYGDYKVYDVRKMIAKSEQEIGKATAKYFFYSNIMNFFKTEITLANGEIRKRPLIETNGETGEIVWDKGRDFATVRKVLSMPQVNIVKKTEVQTGGFSKESILPKRNSDKLIARKKDWDPKKYGGFDSPTVAYSVLVVAKVEKGKSKKLKSVKELLGITIMERSSFEKNPIDFLEAKGYKEVKKDLIIKLPKYSLFELENGRKRMLASAGELQKGNELALPSKYVNFLYLASHYEKLKGSPEDNEQKQLFVEQHKHYLDEIIEQISEFSKRVILADANLDKVLSAYNKHRDKPIREQAENIIHLFTLTNLGAPAAFKYFDTTIDRKRYTSTKEVLDATLIHQSITGLYETRIDLSQLGGDGGGGGGSEAAAKGGGGSGGTAPLEEEYRLFLEAPIQNVTLLEQWKREIPKVWAEINPPGLASTQAPIHVQLLSTALPVRVRQYPITLEAKRSLRETIRKFRAAGILRPVHSPWNTPLLPVRKSGTSEYRMVQDLREVNKRVETIHPTVPNPYTLLSLLPPDRIWYSVLDLKDAFFCIPLAPESQLIFAFEWADAEEGESGQLTWTRLPQGFKNSPTLFNEALNRDLQGFRLDHPSVSLLQYVDDLLIAADTQAACLSATRDLLMTLAELGYRVSGKKAQLCQEEVTYLGFKIHKGSRSLSNSRTQAILQIPVPKTKRQVREFLGTIGYCRLWIPGFAELAQPLYAATRPGNDPLVWGEKEEEAFQSLKLALTQPPALALPSLDKPFQLFVEETSGAAKGVLTQALGPWKRPVAYLSKRLDPVAAGWPRCLRAIAAAALLTREASKLTFGQDIEITSSHNLESLLRSPPDKWLTNARITQYQVLLLDPPRVRFKQTAALNPATLLPETDDTLPIHHCLDTLDSLTSTRPDLTDQPLAQAEATLFTDGSSYIRDGKRYAGAAVVTLDSVIWAEPLPIGTSAQKAELIALTKALEWSKDKSVNIYTDSRYAFATLHVHGMIYRERGWLTAGGKAIKNAPEILALLTAVWLPKRVAVMHCKGHQKDDAPTSTGNRRADEVAREVAIRPLSTQATISAGKRTADGSEFEKRTADGSEFESPKKKAKVE

SEQ ID NO: 1159 - protein, 2096 aa, synthetic construct
MPAAKRVKLDGGDKKYSIGLDIGTNSVGWAVITDEYKVPSKKFKVLGNTDRHSIKKNLIGALLFDSGETAEATRLKRTARRRYTRRKNRICYLQEIFSNEMAKVDDSFFHRLEESFLVEEDKKHERHPIFGNIVDEVAYHEKYPTIYHLRKKLVDSTDKADLRLIYLALAHMIKFRGHFLIEGDLNPDNSDVDKLFIQLVQTYNQLFEENPINASGVDAKAILSARLSKSRRLENLIAQLPGEKKNGLFGNLIALSLGLTPNFKSNFDLAEDAKLQLSKDTYDDDLDNLLAQIGDQYADLFLAAKNLSDAILLSDILRVNTEITKAPLSASMIKRYDEHHQDLTLLKALVRQQLPEKYKEIFFDQSKNGYAGYIDGGASQEEFYKFIKPILEKMDGTEELLVKLNREDLLRKQRTFDNGSIPHQIHLGELHAILRRQEDFYPFLKDNREKIEKILTFRIPYYVGPLARGNSRFAWMTRKSEETITPWNFEEVVDKGASAQSFIERMTNFDKNLPNEKVLPKHSLLYEYFTVYNELTKVKYVTEGMRKPAFLSGEQKKAIVDLLFKTNRKVTVKQLKEDYFKKIECFDSVEISGVEDRFNASLGTYHDLLKIIKDKDFLDNEENEDILEDIVLTLTLFEDREMIEERLKTYAHLFDDKVMKQLKRRRYTGWGRLSRKLINGIRDKQSGKTILDFLKSDGFANRNFMQLIHDDSLTFKEDIQKAQVSGQGDSLHEHIANLAGSPAIKKGILQTVKVVDELVKVMGRHKPENIVIEMARENQTTQKGQKNSRERMKRIEEGIKELGSQILKEHPVENTQLQNEKLYLYYLQNGRDMYVDQELDINRLSDYDVDHIVPQSFLKDDSIDNKVLTRSDKARGKSDNVPSEEVVKKMKNYWRQLLNAKLITQRKFDNLTKAERGGLSELDKAGFIKRQLVETRQITKHVAQILDSRMNTKYDENDKLIREVKVITLKSKLVSDFRKDFQFYKVREINNYHHAHDAYLNAVVGTALIKKYPKLESEFVYGDYKVYDVRKMIAKSEQEIGKATAKYFFYSNIMNFFKTEITLANGEIRKRPLIETNGETGEIVWDKGRDFATVRKVLSMPQVNIVKKTEVQTGGFSKESILPKRNSDKLIARKKDWDPKKYGGFDSPTVAYSVLVVAKVEKGKSKKLKSVKELLGITIMERSSFEKNPIDFLEAKGYKEVKKDLIIKLPKYSLFELENGRKRMLASAGELQKGNELALPSKYVNFLYLASHYEKLKGSPEDNEQKQLFVEQHKHYLDEIIEQISEFSKRVILADANLDKVLSAYNKHRDKPIREQAENIIHLFTLTNLGAPAAFKYFDTTIDRKRYTSTKEVLDATLIHQSITGLYETRIDLSQLGGDGGPAPGGGGGSGGTAPLEEEYRLFLEAPIQNVTLLEQWKREIPKVWAEINPPGLASTQAPIHVQLLSTALPVRVRQYPITLEAKRSLRETIRKFRAAGILRPVHSPWNTPLLPVRKSGTSEYRMVQDLREVNKRVETIHPTVPNPYTLLSLLPPDRIWYSVLDLKDAFFCIPLAPESQLIFAFEWADAEEGESGQLTWTRLPQGFKNSPTLFNEALNRDLQGFRLDHPSVSLLQYVDDLLIAADTQAACLSATRDLLMTLAELGYRVSGKKAQLCQEEVTYLGFKIHKGSRSLSNSRTQAILQIPVPKTKRQVREFLGTIGYCRLWIPGFAELAQPLYAATRPGNDPLVWGEKEEEAFQSLKLALTQPPALALPSLDKPFQLFVEETSGAAKGVLTQALGPWKRPVAYLSKRLDPVAAGWPRCLRAIAAAALLTREASKLTFGQDIEITSSHNLESLLRSPPDKWLTNARITQYQVLLLDPPRVRFKQTAALNPATLLPETDDTLPIHHCLDTLDSLTSTRPDLTDQPLAQAEATLFTDGSSYIRDGKRYAGAAVVTLDSVIWAEPLPIGTSAQKAELIALTKALEWSKDKSVNIYTDSRYAFATLHVHGMIYRERGWLTAGGKAIKNAPEILALLTAVWLPKRVAVMHCKGHQKDDAPTSTGNRRADEVAREVAIRPLSTQATISAGKRTADGSEFEKRTADGSEFESPKKKAKVE

SEQ ID NO: 1160 - protein, 2098 aa, synthetic construct
MPAAKRVKLDGGDKKYSIGLDIGTNSVGWAVITDEYKVPSKKFKVLGNTDRHSIKKNLIGALLFDSGETAEATRLKRTARRRYTRRKNRICYLQEIFSNEMAKVDDSFFHRLEESFLVEEDKKHERHPIFGNIVDEVAYHEKYPTIYHLRKKLVDSTDKADLRLIYLALAHMIKFRGHFLIEGDLNPDNSDVDKLFIQLVQTYNQLFEENPINASGVDAKAILSARLSKSRRLENLIAQLPGEKKNGLFGNLIALSLGLTPNFKSNFDLAEDAKLQLSKDTYDDDLDNLLAQIGDQYADLFLAAKNLSDAILLSDILRVNTEITKAPLSASMIKRYDEHHQDLTLLKALVRQQLPEKYKEIFFDQSKNGYAGYIDGGASQEEFYKFIKPILEKMDGTEELLVKLNREDLLRKQRTFDNGSIPHQIHLGELHAILRRQEDFYPFLKDNREKIEKILTFRIPYYVGPLARGNSRFAWMTRKSEETITPWNFEEVVDKGASAQSFIERMTNFDKNLPNEKVLPKHSLLYEYFTVYNELTKVKYVTEGMRKPAFLSGEQKKAIVDLLFKTNRKVTVKQLKEDYFKKIECFDSVEISGVEDRFNASLGTYHDLLKIIKDKDFLDNEENEDILEDIVLTLTLFEDREMIEERLKTYAHLFDDKVMKQLKRRRYTGWGRLSRKLINGIRDKQSGKTILDFLKSDGFANRNFMQLIHDDSLTFKEDIQKAQVSGQGDSLHEHIANLAGSPAIKKGILQTVKVVDELVKVMGRHKPENIVIEMARENQTTQKGQKNSRERMKRIEEGIKELGSQILKEHPVENTQLQNEKLYLYYLQNGRDMYVDQELDINRLSDYDVDHIVPQSFLKDDSIDNKVLTRSDKARGKSDNVPSEEVVKKMKNYWRQLLNAKLITQRKFDNLTKAERGGLSELDKAGFIKRQLVETRQITKHVAQILDSRMNTKYDENDKLIREVKVITLKSKLVSDFRKDFQFYKVREINNYHHAHDAYLNAVVGTALIKKYPKLESEFVYGDYKVYDVRKMIAKSEQEIGKATAKYFFYSNIMNFFKTEITLANGEIRKRPLIETNGETGEIVWDKGRDFATVRKVLSMPQVNIVKKTEVQTGGFSKESILPKRNSDKLIARKKDWDPKKYGGFDSPTVAYSVLVVAKVEKGKSKKLKSVKELLGITIMERSSFEKNPIDFLEAKGYKEVKKDLIIKLPKYSLFELENGRKRMLASAGELQKGNELALPSKYVNFLYLASHYEKLKGSPEDNEQKQLFVEQHKHYLDEIIEQISEFSKRVILADANLDKVLSAYNKHRDKPIREQAENIIHLFTLTNLGAPAAFKYFDTTIDRKRYTSTKEVLDATLIHQSITGLYETRIDLSQLGGDGGGGSPAPEAAAKGGTAPLEEEYRLFLEAPIQNVTLLEQWKREIPKVWAEINPPGLASTQAPIHVQLLSTALPVRVRQYPITLEAKRSLRETIRKFRAAGILRPVHSPWNTPLLPVRKSGTSEYRMVQDLREVNKRVETIHPTVPNPYTLLSLLPPDRIWYSVLDLKDAFFCIPLAPESQLIFAFEWADAEEGESGQLTWTRLPQGFKNSPTLFNEALNRDLQGFRLDHPSVSLLQYVDDLLIAADTQAACLSATRDLLMTLAELGYRVSGKKAQLCQEEVTYLGFKIHKGSRSLSNSRTQAILQIPVPKTKRQVREFLGTIGYCRLWIPGFAELAQPLYAATRPGNDPLVWGEKEEEAFQSLKLALTQPPALALPSLDKPFQLFVEETSGAAKGVLTQALGPWKRPVAYLSKRLDPVAAGWPRCLRAIAAAALLTREASKLTFGQDIEITSSHNLESLLRSPPDKWLTNARITQYQVLLLDPPRVRFKQTAALNPATLLPETDDTLPIHHCLDTLDSLTSTRPDLTDQPLAQAEATLFTDGSSYIRDGKRYAGAAVVTLDSVIWAEPLPIGTSAQKAELIALTKALEWSKDKSVNIYTDSRYAFATLHVHGMIYRERGWLTAGGKAIKNAPEILALLTAVWLPKRVAVMHCKGHQKDDAPTSTGNRRADEVAREVAIRPLSTQATISAGKRTADGSEFEKRTADGSEFESPKKKAKVE

SEQ ID NO: 1161 - protein, 2098 aa, synthetic construct
MPAAKRVKLDGGDKKYSIGLDIGTNSVGWAVITDEYKVPSKKFKVLGNTDRHSIKKNLIGALLFDSGETAEATRLKRTARRRYTRRKNRICYLQEIFSNEMAKVDDSFFHRLEESFLVEEDKKHERHPIFGNIVDEVAYHEKYPTIYHLRKKLVDSTDKADLRLIYLALAHMIKFRGHFLIEGDLNPDNSDVDKLFIQLVQTYNQLFEENPINASGVDAKAILSARLSKSRRLENLIAQLPGEKKNGLFGNLIALSLGLTPNFKSNFDLAEDAKLQLSKDTYDDDLDNLLAQIGDQYADLFLAAKNLSDAILLSDILRVNTEITKAPLSASMIKRYDEHHQDLTLLKALVRQQLPEKYKEIFFDQSKNGYAGYIDGGASQEEFYKFIKPILEKMDGTEELLVKLNREDLLRKQRTFDNGSIPHQIHLGELHAILRRQEDFYPFLKDNREKIEKILTFRIPYYVGPLARGNSRFAWMTRKSEETITPWNFEEVVDKGASAQSFIERMTNFDKNLPNEKVLPKHSLLYEYFTVYNELTKVKYVTEGMRKPAFLSGEQKKAIVDLLFKTNRKVTVKQLKEDYFKKIECFDSVEISGVEDRFNASLGTYHDLLKIIKDKDFLDNEENEDILEDIVLTLTLFEDREMIEERLKTYAHLFDDKVMKQLKRRRYTGWGRLSRKLINGIRDKQSGKTILDFLKSDGFANRNFMQLIHDDSLTFKEDIQKAQVSGQGDSLHEHIANLAGSPAIKKGILQTVKVVDELVKVMGRHKPENIVIEMARENQTTQKGQKNSRERMKRIEEGIKELGSQILKEHPVENTQLQNEKLYLYYLQNGRDMYVDQELDINRLSDYDVDHIVPQSFLKDDSIDNKVLTRSDKARGKSDNVPSEEVVKKMKNYWRQLLNAKLITQRKFDNLTKAERGGLSELDKAGFIKRQLVETRQITKHVAQILDSRMNTKYDENDKLIREVKVITLKSKLVSDFRKDFQFYKVREINNYHHAHDAYLNAVVGTALIKKYPKLESEFVYGDYKVYDVRKMIAKSEQEIGKATAKYFFYSNIMNFFKTEITLANGEIRKRPLIETNGETGEIVWDKGRDFATVRKVLSMPQVNIVKKTEVQTGGFSKESILPKRNSDKLIARKKDWDPKKYGGFDSPTVAYSVLVVAKVEKGKSKKLKSVKELLGITIMERSSFEKNPIDFLEAKGYKEVKKDLIIKLPKYSLFELENGRKRMLASAGELQKGNELALPSKYVNFLYLASHYEKLKGSPEDNEQKQLFVEQHKHYLDEIIEQISEFSKRVILADANLDKVLSAYNKHRDKPIREQAENIIHLFTLTNLGAPAAFKYFDTTIDRKRYTSTKEVLDATLIHQSITGLYETRIDLSQLGGDGGPAPEAAAKGGSGGTAPLEEEYRLFLEAPIQNVTLLEQWKREIPKVWAEINPPGLASTQAPIHVQLLSTALPVRVRQYPITLEAKRSLRETIRKFRAAGILRPVHSPWNTPLLPVRKSGTSEYRMVQDLREVNKRVETIHPTVPNPYTLLSLLPPDRIWYSVLDLKDAFFCIPLAPESQLIFAFEWADAEEGESGQLTWTRLPQGFKNSPTLFNEALNRDLQGFRLDHPSVSLLQYVDDLLIAADTQAACLSATRDLLMTLAELGYRVSGKKAQLCQEEVTYLGFKIHKGSRSLSNSRTQAILQIPVPKTKRQVREFLGTIGYCRLWIPGFAELAQPLYAATRPGNDPLVWGEKEEEAFQSLKLALTQPPALALPSLDKPFQLFVEETSGAAKGVLTQALGPWKRPVAYLSKRLDPVAAGWPRCLRAIAAAALLTREASKLTFGQDIEITSSHNLESLLRSPPDKWLTNARITQYQVLLLDPPRVRFKQTAALNPATLLPETDDTLPIHHCLDTLDSLTSTRPDLTDQPLAQAEATLFTDGSSYIRDGKRYAGAAVVTLDSVIWAEPLPIGTSAQKAELIALTKALEWSKDKSVNIYTDSRYAFATLHVHGMIYRERGWLTAGGKAIKNAPEILALLTAVWLPKRVAVMHCKGHQKDDAPTSTGNRRADEVAREVAIRPLSTQATISAGKRTADGSEFEKRTADGSEFESPKKKAKVE

SEQ ID NO: 1162 - protein, 2098 aa, synthetic construct
MPAAKRVKLDGGDKKYSIGLDIGTNSVGWAVITDEYKVPSKKFKVLGNTDRHSIKKNLIGALLFDSGETAEATRLKRTARRRYTRRKNRICYLQEIFSNEMAKVDDSFFHRLEESFLVEEDKKHERHPIFGNIVDEVAYHEKYPTIYHLRKKLVDSTDKADLRLIYLALAHMIKFRGHFLIEGDLNPDNSDVDKLFIQLVQTYNQLFEENPINASGVDAKAILSARLSKSRRLENLIAQLPGEKKNGLFGNLIALSLGLTPNFKSNFDLAEDAKLQLSKDTYDDDLDNLLAQIGDQYADLFLAAKNLSDAILLSDILRVNTEITKAPLSASMIKRYDEHHQDLTLLKALVRQQLPEKYKEIFFDQSKNGYAGYIDGGASQEEFYKFIKPILEKMDGTEELLVKLNREDLLRKQRTFDNGSIPHQIHLGELHAILRRQEDFYPFLKDNREKIEKILTFRIPYYVGPLARGNSRFAWMTRKSEETITPWNFEEVVDKGASAQSFIERMTNFDKNLPNEKVLPKHSLLYEYFTVYNELTKVKYVTEGMRKPAFLSGEQKKAIVDLLFKTNRKVTVKQLKEDYFKKIECFDSVEISGVEDRFNASLGTYHDLLKIIKDKDFLDNEENEDILEDIVLTLTLFEDREMIEERLKTYAHLFDDKVMKQLKRRRYTGWGRLSRKLINGIRDKQSGKTILDFLKSDGFANRNFMQLIHDDSLTFKEDIQKAQVSGQGDSLHEHIANLAGSPAIKKGILQTVKVVDELVKVMGRHKPENIVIEMARENQTTQKGQKNSRERMKRIEEGIKELGSQILKEHPVENTQLQNEKLYLYYLQNGRDMYVDQELDINRLSDYDVDHIVPQSFLKDDSIDNKVLTRSDKARGKSDNVPSEEVVKKMKNYWRQLLNAKLITQRKFDNLTKAERGGLSELDKAGFIKRQLVETRQITKHVAQILDSRMNTKYDENDKLIREVKVITLKSKLVSDFRKDFQFYKVREINNYHHAHDAYLNAVVGTALIKKYPKLESEFVYGDYKVYDVRKMIAKSEQEIGKATAKYFFYSNIMNFFKTEITLANGEIRKRPLIETNGETGEIVWDKGRDFATVRKVLSMPQVNIVKKTEVQTGGFSKESILPKRNSDKLIARKKDWDPKKYGGFDSPTVAYSVLVVAKVEKGKSKKLKSVKELLGITIMERSSFEKNPIDFLEAKGYKEVKKDLIIKLPKYSLFELENGRKRMLASAGELQKGNELALPSKYVNFLYLASHYEKLKGSPEDNEQKQLFVEQHKHYLDEIIEQISEFSKRVILADANLDKVLSAYNKHRDKPIREQAENIIHLFTLTNLGAPAAFKYFDTTIDRKRYTSTKEVLDATLIHQSITGLYETRIDLSQLGGDGGGSSEAAAKGGGGGTAPLEEEYRLFLEAPIQNVTLLEQWKREIPKVWAEINPPGLASTQAPIHVQLLSTALPVRVRQYPITLEAKRSLRETIRKFRAAGILRPVHSPWNTPLLPVRKSGTSEYRMVQDLREVNKRVETIHPTVPNPYTLLSLLPPDRIWYSVLDLKDAFFCIPLAPESQLIFAFEWADAEEGESGQLTWTRLPQGFKNSPTLFNEALNRDLQGFRLDHPSVSLLQYVDDLLIAADTQAACLSATRDLLMTLAELGYRVSGKKAQLCQEEVTYLGFKIHKGSRSLSNSRTQAILQIPVPKTKRQVREFLGTIGYCRLWIPGFAELAQPLYAATRPGNDPLVWGEKEEEAFQSLKLALTQPPALALPSLDKPFQLFVEETSGAAKGVLTQALGPWKRPVAYLSKRLDPVAAGWPRCLRAIAAAALLTREASKLTFGQDIEITSSHNLESLLRSPPDKWLTNARITQYQVLLLDPPRVRFKQTAALNPATLLPETDDTLPIHHCLDTLDSLTSTRPDLTDQPLAQAEATLFTDGSSYIRDGKRYAGAAVVTLDSVIWAEPLPIGTSAQKAELIALTKALEWSKDKSVNIYTDSRYAFATLHVHGMIYRERGWLTAGGKAIKNAPEILALLTAVWLPKRVAVMHCKGHQKDDAPTSTGNRRADEVAREVAIRPLSTQATISAGKRTADGSEFEKRTADGSEFESPKKKAKVE

SEQ ID NO: 1163 - protein, 2096 aa, synthetic construct
MPAAKRVKLDGGDKKYSIGLDIGTNSVGWAVITDEYKVPSKKFKVLGNTDRHSIKKNLIGALLFDSGETAEATRLKRTARRRYTRRKNRICYLQEIFSNEMAKVDDSFFHRLEESFLVEEDKKHERHPIFGNIVDEVAYHEKYPTIYHLRKKLVDSTDKADLRLIYLALAHMIKFRGHFLIEGDLNPDNSDVDKLFIQLVQTYNQLFEENPINASGVDAKAILSARLSKSRRLENLIAQLPGEKKNGLFGNLIALSLGLTPNFKSNFDLAEDAKLQLSKDTYDDDLDNLLAQIGDQYADLFLAAKNLSDAILLSDILRVNTEITKAPLSASMIKRYDEHHQDLTLLKALVRQQLPEKYKEIFFDQSKNGYAGYIDGGASQEEFYKFIKPILEKMDGTEELLVKLNREDLLRKQRTFDNGSIPHQIHLGELHAILRRQEDFYPFLKDNREKIEKILTFRIPYYVGPLARGNSRFAWMTRKSEETITPWNFEEVVDKGASAQSFIERMTNFDKNLPNEKVLPKHSLLYEYFTVYNELTKVKYVTEGMRKPAFLSGEQKKAIVDLLFKTNRKVTVKQLKEDYFKKIECFDSVEISGVEDRFNASLGTYHDLLKIIKDKDFLDNEENEDILEDIVLTLTLFEDREMIEERLKTYAHLFDDKVMKQLKRRRYTGWGRLSRKLINGIRDKQSGKTILDFLKSDGFANRNFMQLIHDDSLTFKEDIQKAQVSGQGDSLHEHIANLAGSPAIKKGILQTVKVVDELVKVMGRHKPENIVIEMARENQTTQKGQKNSRERMKRIEEGIKELGSQILKEHPVENTQLQNEKLYLYYLQNGRDMYVDQELDINRLSDYDVDHIVPQSFLKDDSIDNKVLTRSDKARGKSDNVPSEEVVKKMKNYWRQLLNAKLITQRKFDNLTKAERGGLSELDKAGFIKRQLVETRQITKHVAQILDSRMNTKYDENDKLIREVKVITLKSKLVSDFRKDFQFYKVREINNYHHAHDAYLNAVVGTALIKKYPKLESEFVYGDYKVYDVRKMIAKSEQEIGKATAKYFFYSNIMNFFKTEITLANGEIRKRPLIETNGETGEIVWDKGRDFATVRKVLSMPQVNIVKKTEVQTGGFSKESILPKRNSDKLIARKKDWDPKKYGGFDSPTVAYSVLVVAKVEKGKSKKLKSVKELLGITIMERSSFEKNPIDFLEAKGYKEVKKDLIIKLPKYSLFELENGRKRMLASAGELQKGNELALPSKYVNFLYLASHYEKLKGSPEDNEQKQLFVEQHKHYLDEIIEQISEFSKRVILADANLDKVLSAYNKHRDKPIREQAENIIHLFTLTNLGAPAAFKYFDTTIDRKRYTSTKEVLDATLIHQSITGLYETRIDLSQLGGDGGGGGGGSPAPGGTAPLEEEYRLFLEAPIQNVTLLEQWKREIPKVWAEINPPGLASTQAPIHVQLLSTALPVRVRQYPITLEAKRSLRETIRKFRAAGILRPVHSPWNTPLLPVRKSGTSEYRMVQDLREVNKRVETIHPTVPNPYTLLSLLPPDRIWYSVLDLKDAFFCIPLAPESQLIFAFEWADAEEGESGQLTWTRLPQGFKNSPTLFNEALNRDLQGFRLDHPSVSLLQYVDDLLIAADTQAACLSATRDLLMTLAELGYRVSGKKAQLCQEEVTYLGFKIHKGSRSLSNSRTQAILQIPVPKTKRQVREFLGTIGYCRLWIPGFAELAQPLYAATRPGNDPLVWGEKEEEAFQSLKLALTQPPALALPSLDKPFQLFVEETSGAAKGVLTQALGPWKRPVAYLSKRLDPVAAGWPRCLRAIAAAALLTREASKLTFGQDIEITSSHNLESLLRSPPDKWLTNARITQYQVLLLDPPRVRFKQTAALNPATLLPETDDTLPIHHCLDTLDSLTSTRPDLTDQPLAQAEATLFTDGSSYIRDGKRYAGAAVVTLDSVIWAEPLPIGTSAQKAELIALTKALEWSKDKSVNIYTDSRYAFATLHVHGMIYRERGWLTAGGKAIKNAPEILALLTAVWLPKRVAVMHCKGHQKDDAPTSTGNRRADEVAREVAIRPLSTQATISAGKRTADGSEFEKRTADGSEFESPKKKAKVE

SEQ ID NO: 1164 - protein, 2098 aa, synthetic construct
MPAAKRVKLDGGDKKYSIGLDIGTNSVGWAVITDEYKVPSKKFKVLGNTDRHSIKKNLIGALLFDSGETAEATRLKRTARRRYTRRKNRICYLQEIFSNEMAKVDDSFFHRLEESFLVEEDKKHERHPIFGNIVDEVAYHEKYPTIYHLRKKLVDSTDKADLRLIYLALAHMIKFRGHFLIEGDLNPDNSDVDKLFIQLVQTYNQLFEENPINASGVDAKAILSARLSKSRRLENLIAQLPGEKKNGLFGNLIALSLGLTPNFKSNFDLAEDAKLQLSKDTYDDDLDNLLAQIGDQYADLFLAAKNLSDAILLSDILRVNTEITKAPLSASMIKRYDEHHQDLTLLKALVRQQLPEKYKEIFFDQSKNGYAGYIDGGASQEEFYKFIKPILEKMDGTEELLVKLNREDLLRKQRTFDNGSIPHQIHLGELHAILRRQEDFYPFLKDNREKIEKILTFRIPYYVGPLARGNSRFAWMTRKSEETITPWNFEEVVDKGASAQSFIERMTNFDKNLPNEKVLPKHSLLYEYFTVYNELTKVKYVTEGMRKPAFLSGEQKKAIVDLLFKTNRKVTVKQLKEDYFKKIECFDSVEISGVEDRFNASLGTYHDLLKIIKDKDFLDNEENEDILEDIVLTLTLFEDREMIEERLKTYAHLFDDKVMKQLKRRRYTGWGRLSRKLINGIRDKQSGKTILDFLKSDGFANRNFMQLIHDDSLTFKEDIQKAQVSGQGDSLHEHIANLAGSPAIKKGILQTVKVVDELVKVMGRHKPENIVIEMARENQTTQKGQKNSRERMKRIEEGIKELGSQILKEHPVENTQLQNEKLYLYYLQNGRDMYVDQELDINRLSDYDVDHIVPQSFLKDDSIDNKVLTRSDKARGKSDNVPSEEVVKKMKNYWRQLLNAKLITQRKFDNLTKAERGGLSELDKAGFIKRQLVETRQITKHVAQILDSRMNTKYDENDKLIREVKVITLKSKLVSDFRKDFQFYKVREINNYHHAHDAYLNAVVGTALIKKYPKLESEFVYGDYKVYDVRKMIAKSEQEIGKATAKYFFYSNIMNFFKTEITLANGEIRKRPLIETNGETGEIVWDKGRDFATVRKVLSMPQVNIVKKTEVQTGGFSKESILPKRNSDKLIARKKDWDPKKYGGFDSPTVAYSVLVVAKVEKGKSKKLKSVKELLGITIMERSSFEKNPIDFLEAKGYKEVKKDLIIKLPKYSLFELENGRKRMLASAGELQKGNELALPSKYVNFLYLASHYEKLKGSPEDNEQKQLFVEQHKHYLDEIIEQISEFSKRVILADANLDKVLSAYNKHRDKPIREQAENIIHLFTLTNLGAPAAFKYFDTTIDRKRYTSTKEVLDATLIHQSITGLYETRIDLSQLGGDGGGSSPAPEAAAKGGTAPLEEEYRLFLEAPIQNVTLLEQWKREIPKVWAEINPPGLASTQAPIHVQLLSTALPVRVRQYPITLEAKRSLRETIRKFRAAGILRPVHSPWNTPLLPVRKSGTSEYRMVQDLREVNKRVETIHPTVPNPYTLLSLLPPDRIWYSVLDLKDAFFCIPLAPESQLIFAFEWADAEEGESGQLTWTRLPQGFKNSPTLFNEALNRDLQGFRLDHPSVSLLQYVDDLLIAADTQAACLSATRDLLMTLAELGYRVSGKKAQLCQEEVTYLGFKIHKGSRSLSNSRTQAILQIPVPKTKRQVREFLGTIGYCRLWIPGFAELAQPLYAATRPGNDPLVWGEKEEEAFQSLKLALTQPPALALPSLDKPFQLFVEETSGAAKGVLTQALGPWKRPVAYLSKRLDPVAAGWPRCLRAIAAAALLTREASKLTFGQDIEITSSHNLESLLRSPPDKWLTNARITQYQVLLLDPPRVRFKQTAALNPATLLPETDDTLPIHHCLDTLDSLTSTRPDLTDQPLAQAEATLFTDGSSYIRDGKRYAGAAVVTLDSVIWAEPLPIGTSAQKAELIALTKALEWSKDKSVNIYTDSRYAFATLHVHGMIYRERGWLTAGGKAIKNAPEILALLTAVWLPKRVAVMHCKGHQKDDAPTSTGNRRADEVAREVAIRPLSTQATISAGKRTADGSEFEKRTADGSEFESPKKKAKVE

SEQ ID NO: 1165 - protein, 2096 aa, synthetic construct
MPAAKRVKLDGGDKKYSIGLDIGTNSVGWAVITDEYKVPSKKFKVLGNTDRHSIKKNLIGALLFDSGETAEATRLKRTARRRYTRRKNRICYLQEIFSNEMAKVDDSFFHRLEESFLVEEDKKHERHPIFGNIVDEVAYHEKYPTIYHLRKKLVDSTDKADLRLIYLALAHMIKFRGHFLIEGDLNPDNSDVDKLFIQLVQTYNQLFEENPINASGVDAKAILSARLSKSRRLENLIAQLPGEKKNGLFGNLIALSLGLTPNFKSNFDLAEDAKLQLSKDTYDDDLDNLLAQIGDQYADLFLAAKNLSDAILLSDILRVNTEITKAPLSASMIKRYDEHHQDLTLLKALVRQQLPEKYKEIFFDQSKNGYAGYIDGGASQEEFYKFIKPILEKMDGTEELLVKLNREDLLRKQRTFDNGSIPHQIHLGELHAILRRQEDFYPFLKDNREKIEKILTFRIPYYVGPLARGNSRFAWMTRKSEETITPWNFEEVVDKGASAQSFIERMTNFDKNLPNEKVLPKHSLLYEYFTVYNELTKVKYVTEGMRKPAFLSGEQKKAIVDLLFKTNRKVTVKQLKEDYFKKIECFDSVEISGVEDRFNASLGTYHDLLKIIKDKDFLDNEENEDILEDIVLTLTLFEDREMIEERLKTYAHLFDDKVMKQLKRRRYTGWGRLSRKLINGIRDKQSGKTILDFLKSDGFANRNFMQLIHDDSLTFKEDIQKAQVSGQGDSLHEHIANLAGSPAIKKGILQTVKVVDELVKVMGRHKPENIVIEMARENQTTQKGQKNSRERMKRIEEGIKELGSQILKEHPVENTQLQNEKLYLYYLQNGRDMYVDQELDINRLSDYDVDHIVPQSFLKDDSIDNKVLTRSDKARGKSDNVPSEEVVKKMKNYWRQLLNAKLITQRKFDNLTKAERGGLSELDKAGFIKRQLVETRQITKHVAQILDSRMNTKYDENDKLIREVKVITLKSKLVSDFRKDFQFYKVREINNYHHAHDAYLNAVVGTALIKKYPKLESEFVYGDYKVYDVRKMIAKSEQEIGKATAKYFFYSNIMNFFKTEITLANGEIRKRPLIETNGETGEIVWDKGRDFATVRKVLSMPQVNIVKKTEVQTGGFSKESILPKRNSDKLIARKKDWDPKKYGGFDSPTVAYSVLVVAKVEKGKSKKLKSVKELLGITIMERSSFEKNPIDFLEAKGYKEVKKDLIIKLPKYSLFELENGRKRMLASAGELQKGNELALPSKYVNFLYLASHYEKLKGSPEDNEQKQLFVEQHKHYLDEIIEQISEFSKRVILADANLDKVLSAYNKHRDKPIREQAENIIHLFTLTNLGAPAAFKYFDTTIDRKRYTSTKEVLDATLIHQSITGLYETRIDLSQLGGDGGGSSGGSPAPGGTAPLEEEYRLFLEAPIQNVTLLEQWKREIPKVWAEINPPGLASTQAPIHVQLLSTALPVRVRQYPITLEAKRSLRETIRKFRAAGILRPVHSPWNTPLLPVRKSGTSEYRMVQDLREVNKRVETIHPTVPNPYTLLSLLPPDRIWYSVLDLKDAFFCIPLAPESQLIFAFEWADAEEGESGQLTWTRLPQGFKNSPTLFNEALNRDLQGFRLDHPSVSLLQYVDDLLIAADTQAACLSATRDLLMTLAELGYRVSGKKAQLCQEEVTYLGFKIHKGSRSLSNSRTQAILQIPVPKTKRQVREFLGTIGYCRLWIPGFAELAQPLYAATRPGNDPLVWGEKEEEAFQSLKLALTQPPALALPSLDKPFQLFVEETSGAAKGVLTQALGPWKRPVAYLSKRLDPVAAGWPRCLRAIAAAALLTREASKLTFGQDIEITSSHNLESLLRSPPDKWLTNARITQYQVLLLDPPRVRFKQTAALNPATLLPETDDTLPIHHCLDTLDSLTSTRPDLTDQPLAQAEATLFTDGSSYIRDGKRYAGAAVVTLDSVIWAEPLPIGTSAQKAELIALTKALEWSKDKSVNIYTDSRYAFATLHVHGMIYRERGWLTAGGKAIKNAPEILALLTAVWLPKRVAVMHCKGHQKDDAPTSTGNRRADEVAREVAIRPLSTQATISAGKRTADGSEFEKRTADGSEFESPKKKAKVE

SEQ ID NO: 1166 - protein, 2093 aa, synthetic construct
MPAAKRVKLDGGDKKYSIGLDIGTNSVGWAVITDEYKVPSKKFKVLGNTDRHSIKKNLIGALLFDSGETAEATRLKRTARRRYTRRKNRICYLQEIFSNEMAKVDDSFFHRLEESFLVEEDKKHERHPIFGNIVDEVAYHEKYPTIYHLRKKLVDSTDKADLRLIYLALAHMIKFRGHFLIEGDLNPDNSDVDKLFIQLVQTYNQLFEENPINASGVDAKAILSARLSKSRRLENLIAQLPGEKKNGLFGNLIALSLGLTPNFKSNFDLAEDAKLQLSKDTYDDDLDNLLAQIGDQYADLFLAAKNLSDAILLSDILRVNTEITKAPLSASMIKRYDEHHQDLTLLKALVRQQLPEKYKEIFFDQSKNGYAGYIDGGASQEEFYKFIKPILEKMDGTEELLVKLNREDLLRKQRTFDNGSIPHQIHLGELHAILRRQEDFYPFLKDNREKIEKILTFRIPYYVGPLARGNSRFAWMTRKSEETITPWNFEEVVDKGASAQSFIERMTNFDKNLPNEKVLPKHSLLYEYFTVYNELTKVKYVTEGMRKPAFLSGEQKKAIVDLLFKTNRKVTVKQLKEDYFKKIECFDSVEISGVEDRFNASLGTYHDLLKIIKDKDFLDNEENEDILEDIVLTLTLFEDREMIEERLKTYAHLFDDKVMKQLKRRRYTGWGRLSRKLINGIRDKQSGKTILDFLKSDGFANRNFMQLIHDDSLTFKEDIQKAQVSGQGDSLHEHIANLAGSPAIKKGILQTVKVVDELVKVMGRHKPENIVIEMARENQTTQKGQKNSRERMKRIEEGIKELGSQILKEHPVENTQLQNEKLYLYYLQNGRDMYVDQELDINRLSDYDVDHIVPQSFLKDDSIDNKVLTRSDKARGKSDNVPSEEVVKKMKNYWRQLLNAKLITQRKFDNLTKAERGGLSELDKAGFIKRQLVETRQITKHVAQILDSRMNTKYDENDKLIREVKVITLKSKLVSDFRKDFQFYKVREINNYHHAHDAYLNAVVGTALIKKYPKLESEFVYGDYKVYDVRKMIAKSEQEIGKATAKYFFYSNIMNFFKTEITLANGEIRKRPLIETNGETGEIVWDKGRDFATVRKVLSMPQVNIVKKTEVQTGGFSKESILPKRNSDKLIARKKDWDPKKYGGFDSPTVAYSVLVVAKVEKGKSKKLKSVKELLGITIMERSSFEKNPIDFLEAKGYKEVKKDLIIKLPKYSLFELENGRKRMLASAGELQKGNELALPSKYVNFLYLASHYEKLKGSPEDNEQKQLFVEQHKHYLDEIIEQISEFSKRVILADANLDKVLSAYNKHRDKPIREQAENIIHLFTLTNLGAPAAFKYFDTTIDRKRYTSTKEVLDATLIHQSITGLYETRIDLSQLGGDGGGGSGSSGGTAPLEEEYRLFLEAPIQNVTLLEQWKREIPKVWAEINPPGLASTQAPIHVQLLSTALPVRVRQYPITLEAKRSLRETIRKFRAAGILRPVHSPWNTPLLPVRKSGTSEYRMVQDLREVNKRVETIHPTVPNPYTLLSLLPPDRIWYSVLDLKDAFFCIPLAPESQLIFAFEWADAEEGESGQLTWTRLPQGFKNSPTLFNEALNRDLQGFRLDHPSVSLLQYVDDLLIAADTQAACLSATRDLLMTLAELGYRVSGKKAQLCQEEVTYLGFKIHKGSRSLSNSRTQAILQIPVPKTKRQVREFLGTIGYCRLWIPGFAELAQPLYAATRPGNDPLVWGEKEEEAFQSLKLALTQPPALALPSLDKPFQLFVEETSGAAKGVLTQALGPWKRPVAYLSKRLDPVAAGWPRCLRAIAAAALLTREASKLTFGQDIEITSSHNLESLLRSPPDKWLTNARITQYQVLLLDPPRVRFKQTAALNPATLLPETDDTLPIHHCLDTLDSLTSTRPDLTDQPLAQAEATLFTDGSSYIRDGKRYAGAAVVTLDSVIWAEPLPIGTSAQKAELIALTKALEWSKDKSVNIYTDSRYAFATLHVHGMIYRERGWLTAGGKAIKNAPEILALLTAVWLPKRVAVMHCKGHQKDDAPTSTGNRRADEVAREVAIRPLSTQATISAGKRTADGSEFEKRTADGSEFESPKKKAKVE

SEQ ID NO: 1167 - protein, 2098 aa, synthetic construct
MPAAKRVKLDGGDKKYSIGLDIGTNSVGWAVITDEYKVPSKKFKVLGNTDRHSIKKNLIGALLFDSGETAEATRLKRTARRRYTRRKNRICYLQEIFSNEMAKVDDSFFHRLEESFLVEEDKKHERHPIFGNIVDEVAYHEKYPTIYHLRKKLVDSTDKADLRLIYLALAHMIKFRGHFLIEGDLNPDNSDVDKLFIQLVQTYNQLFEENPINASGVDAKAILSARLSKSRRLENLIAQLPGEKKNGLFGNLIALSLGLTPNFKSNFDLAEDAKLQLSKDTYDDDLDNLLAQIGDQYADLFLAAKNLSDAILLSDILRVNTEITKAPLSASMIKRYDEHHQDLTLLKALVRQQLPEKYKEIFFDQSKNGYAGYIDGGASQEEFYKFIKPILEKMDGTEELLVKLNREDLLRKQRTFDNGSIPHQIHLGELHAILRRQEDFYPFLKDNREKIEKILTFRIPYYVGPLARGNSRFAWMTRKSEETITPWNFEEVVDKGASAQSFIERMTNFDKNLPNEKVLPKHSLLYEYFTVYNELTKVKYVTEGMRKPAFLSGEQKKAIVDLLFKTNRKVTVKQLKEDYFKKIECFDSVEISGVEDRFNASLGTYHDLLKIIKDKDFLDNEENEDILEDIVLTLTLFEDREMIEERLKTYAHLFDDKVMKQLKRRRYTGWGRLSRKLINGIRDKQSGKTILDFLKSDGFANRNFMQLIHDDSLTFKEDIQKAQVSGQGDSLHEHIANLAGSPAIKKGILQTVKVVDELVKVMGRHKPENIVIEMARENQTTQKGQKNSRERMKRIEEGIKELGSQILKEHPVENTQLQNEKLYLYYLQNGRDMYVDQELDINRLSDYDVDHIVPQSFLKDDSIDNKVLTRSDKARGKSDNVPSEEVVKKMKNYWRQLLNAKLITQRKFDNLTKAERGGLSELDKAGFIKRQLVETRQITKHVAQILDSRMNTKYDENDKLIREVKVITLKSKLVSDFRKDFQFYKVREINNYHHAHDAYLNAVVGTALIKKYPKLESEFVYGDYKVYDVRKMIAKSEQEIGKATAKYFFYSNIMNFFKTEITLANGEIRKRPLIETNGETGEIVWDKGRDFATVRKVLSMPQVNIVKKTEVQTGGFSKESILPKRNSDKLIARKKDWDPKKYGGFDSPTVAYSVLVVAKVEKGKSKKLKSVKELLGITIMERSSFEKNPIDFLEAKGYKEVKKDLIIKLPKYSLFELENGRKRMLASAGELQKGNELALPSKYVNFLYLASHYEKLKGSPEDNEQKQLFVEQHKHYLDEIIEQISEFSKRVILADANLDKVLSAYNKHRDKPIREQAENIIHLFTLTNLGAPAAFKYFDTTIDRKRYTSTKEVLDATLIHQSITGLYETRIDLSQLGGDGGEAAAKPAPGGGGGTAPLEEEYRLFLEAPIQNVTLLEQWKREIPKVWAEINPPGLASTQAPIHVQLLSTALPVRVRQYPITLEAKRSLRETIRKFRAAGILRPVHSPWNTPLLPVRKSGTSEYRMVQDLREVNKRVETIHPTVPNPYTLLSLLPPDRIWYSVLDLKDAFFCIPLAPESQLIFAFEWADAEEGESGQLTWTRLPQGFKNSPTLFNEALNRDLQGFRLDHPSVSLLQYVDDLLIAADTQAACLSATRDLLMTLAELGYRVSGKKAQLCQEEVTYLGFKIHKGSRSLSNSRTQAILQIPVPKTKRQVREFLGTIGYCRLWIPGFAELAQPLYAATRPGNDPLVWGEKEEEAFQSLKLALTQPPALALPSLDKPFQLFVEETSGAAKGVLTQALGPWKRPVAYLSKRLDPVAAGWPRCLRAIAAAALLTREASKLTFGQDIEITSSHNLESLLRSPPDKWLTNARITQYQVLLLDPPRVRFKQTAALNPATLLPETDDTLPIHHCLDTLDSLTSTRPDLTDQPLAQAEATLFTDGSSYIRDGKRYAGAAVVTLDSVIWAEPLPIGTSAQKAELIALTKALEWSKDKSVNIYTDSRYAFATLHVHGMIYRERGWLTAGGKAIKNAPEILALLTAVWLPKRVAVMHCKGHQKDDAPTSTGNRRADEVAREVAIRPLSTQATISAGKRTADGSEFEKRTADGSEFESPKKKAKVE

SEQ ID NO: 1168 - protein, 2093 aa, synthetic construct
MPAAKRVKLDGGDKKYSIGLDIGTNSVGWAVITDEYKVPSKKFKVLGNTDRHSIKKNLIGALLFDSGETAEATRLKRTARRRYTRRKNRICYLQEIFSNEMAKVDDSFFHRLEESFLVEEDKKHERHPIFGNIVDEVAYHEKYPTIYHLRKKLVDSTDKADLRLIYLALAHMIKFRGHFLIEGDLNPDNSDVDKLFIQLVQTYNQLFEENPINASGVDAKAILSARLSKSRRLENLIAQLPGEKKNGLFGNLIALSLGLTPNFKSNFDLAEDAKLQLSKDTYDDDLDNLLAQIGDQYADLFLAAKNLSDAILLSDILRVNTEITKAPLSASMIKRYDEHHQDLTLLKALVRQQLPEKYKEIFFDQSKNGYAGYIDGGASQEEFYKFIKPILEKMDGTEELLVKLNREDLLRKQRTFDNGSIPHQIHLGELHAILRRQEDFYPFLKDNREKIEKILTFRIPYYVGPLARGNSRFAWMTRKSEETITPWNFEEVVDKGASAQSFIERMTNFDKNLPNEKVLPKHSLLYEYFTVYNELTKVKYVTEGMRKPAFLSGEQKKAIVDLLFKTNRKVTVKQLKEDYFKKIECFDSVEISGVEDRFNASLGTYHDLLKIIKDKDFLDNEENEDILEDIVLTLTLFEDREMIEERLKTYAHLFDDKVMKQLKRRRYTGWGRLSRKLINGIRDKQSGKTILDFLKSDGFANRNFMQLIHDDSLTFKEDIQKAQVSGQGDSLHEHIANLAGSPAIKKGILQTVKVVDELVKVMGRHKPENIVIEMARENQTTQKGQKNSRERMKRIEEGIKELGSQILKEHPVENTQLQNEKLYLYYLQNGRDMYVDQELDINRLSDYDVDHIVPQSFLKDDSIDNKVLTRSDKARGKSDNVPSEEVVKKMKNYWRQLLNAKLITQRKFDNLTKAERGGLSELDKAGFIKRQLVETRQITKHVAQILDSRMNTKYDENDKLIREVKVITLKSKLVSDFRKDFQFYKVREINNYHHAHDAYLNAVVGTALIKKYPKLESEFVYGDYKVYDVRKMIAKSEQEIGKATAKYFFYSNIMNFFKTEITLANGEIRKRPLIETNGETGEIVWDKGRDFATVRKVLSMPQVNIVKKTEVQTGGFSKESILPKRNSDKLIARKKDWDPKKYGGFDSPTVAYSVLVVAKVEKGKSKKLKSVKELLGITIMERSSFEKNPIDFLEAKGYKEVKKDLIIKLPKYSLFELENGRKRMLASAGELQKGNELALPSKYVNFLYLASHYEKLKGSPEDNEQKQLFVEQHKHYLDEIIEQISEFSKRVILADANLDKVLSAYNKHRDKPIREQAENIIHLFTLTNLGAPAAFKYFDTTIDRKRYTSTKEVLDATLIHQSITGLYETRIDLSQLGGDGGGGGGGSPAPGGTLQLEEEYRLFEPESTQKQEMDIWLKNFPQAWAETGGMGTAHCQAPVLIQLKATATPISIRQYPMPHEAYQGIKPHIRRMLDQGILKPCQSPWNTPLLPVKKPGTEDYRPVQDLREVNKRVEDIHPTVPNPYNLLSTLPPSHPWYTVLDLKDAFFCLRLHSESQLLFAFEWRDPEIGLSGQLTWTRLPQGFKNSPTLFNEALHSDLADFRVRYPALVLLQYVDDLLLAAATRTECLEGTKALLETLGNKGYRASAKKAQICLQEVTYLGYSLKDGQRWLTKARKEAILSIPVPKNSRQVREFLGTAGYCRLWIPGFAELAAPLYPLTRPGTLFQWGTEQQLAFEDIKKALLSSPALGLPDITKPFELFIDENSGFAKGVLVQKLGPWKRPVAYLSKKLDTVASGWPPCLRMVAAIAILVKDAGKLTLGQPLTILTSHPVEALVRQPPNKWLSNARMTHYQAMLLDAERVHFGPTVSLNPATLLPLPSGGNHHDCLQILAETHGTRPDLTDQPLPDADLTWYTDGSSFIRNGEREAGAAVTTESEVIWAAPLPPGTSAQRAELIALTQALKMAEGKKLTVYTDSRYAFATTHVHGEIYRRRGWLTSEGKEIKNKNEILALLEALFLPKRLSIIHCPGHQKGDSPQAKGNRLADDTAKKAATETHSSLTVLPAGKRTADGSEFEKRTADGSEFESPKKKAKVE

SEQ ID NO: 1169 - protein, 2117 aa, synthetic construct
MPAAKRVKLDGGDKKYSIGLDIGTNSVGWAVITDEYKVPSKKFKVLGNTDRHSIKKNLIGALLFDSGETAEATRLKRTARRRYTRRKNRICYLQEIFSNEMAKVDDSFFHRLEESFLVEEDKKHERHPIFGNIVDEVAYHEKYPTIYHLRKKLVDSTDKADLRLIYLALAHMIKFRGHFLIEGDLNPDNSDVDKLFIQLVQTYNQLFEENPINASGVDAKAILSARLSKSRRLENLIAQLPGEKKNGLFGNLIALSLGLTPNFKSNFDLAEDAKLQLSKDTYDDDLDNLLAQIGDQYADLFLAAKNLSDAILLSDILRVNTEITKAPLSASMIKRYDEHHQDLTLLKALVRQQLPEKYKEIFFDQSKNGYAGYIDGGASQEEFYKFIKPILEKMDGTEELLVKLNREDLLRKQRTFDNGSIPHQIHLGELHAILRRQEDFYPFLKDNREKIEKILTFRIPYYVGPLARGNSRFAWMTRKSEETITPWNFEEVVDKGASAQSFIERMTNFDKNLPNEKVLPKHSLLYEYFTVYNELTKVKYVTEGMRKPAFLSGEQKKAIVDLLFKTNRKVTVKQLKEDYFKKIECFDSVEISGVEDRFNASLGTYHDLLKIIKDKDFLDNEENEDILEDIVLTLTLFEDREMIEERLKTYAHLFDDKVMKQLKRRRYTGWGRLSRKLINGIRDKQSGKTILDFLKSDGFANRNFMQLIHDDSLTFKEDIQKAQVSGQGDSLHEHIANLAGSPAIKKGILQTVKVVDELVKVMGRHKPENIVIEMARENQTTQKGQKNSRERMKRIEEGIKELGSQILKEHPVENTQLQNEKLYLYYLQNGRDMYVDQELDINRLSDYDVDHIVPQSFLKDDSIDNKVLTRSDKARGKSDNVPSEEVVKKMKNYWRQLLNAKLITQRKFDNLTKAERGGLSELDKAGFIKRQLVETRQITKHVAQILDSRMNTKYDENDKLIREVKVITLKSKLVSDFRKDFQFYKVREINNYHHAHDAYLNAVVGTALIKKYPKLESEFVYGDYKVYDVRKMIAKSEQEIGKATAKYFFYSNIMNFFKTEITLANGEIRKRPLIETNGETGEIVWDKGRDFATVRKVLSMPQVNIVKKTEVQTGGFSKESILPKRNSDKLIARKKDWDPKKYGGFDSPTVAYSVLVVAKVEKGKSKKLKSVKELLGITIMERSSFEKNPIDFLEAKGYKEVKKDLIIKLPKYSLFELENGRKRMLASAGELQKGNELALPSKYVNFLYLASHYEKLKGSPEDNEQKQLFVEQHKHYLDEIIEQISEFSKRVILADANLDKVLSAYNKHRDKPIREQAENIIHLFTLTNLGAPAAFKYFDTTIDRKRYTSTKEVLDATLIHQSITGLYETRIDLSQLGGDGGSGGSSGGSSGSETPGTSESATPESSGGSSGGSSGGTLQLEEEYRLFEPESTQKQEMDIWLKNFPQAWAETGGMGTAHCQAPVLIQLKATATPISIRQYPMPHEAYQGIKPHIRRMLDQGILKPCQSPWNTPLLPVKKPGTEDYRPVQDLREVNKRVEDIHPTVPNPYNLLSTLPPSHPWYTVLDLKDAFFCLRLHSESQLLFAFEWRDPEIGLSGQLTWTRLPQGFKNSPTLFNEALHSDLADFRVRYPALVLLQYVDDLLLAAATRTECLEGTKALLETLGNKGYRASAKKAQICLQEVTYLGYSLKDGQRWLTKARKEAILSIPVPKNSRQVREFLGTAGYCRLWIPGFAELAAPLYPLTRPGTLFQWGTEQQLAFEDIKKALLSSPALGLPDITKPFELFIDENSGFAKGVLVQKLGPWKRPVAYLSKKLDTVASGWPPCLRMVAAIAILVKDAGKLTLGQPLTILTSHPVEALVRQPPNKWLSNARMTHYQAMLLDAERVHFGPTVSLNPATLLPLPSGGNHHDCLQILAETHGTRPDLTDQPLPDADLTWYTDGSSFIRNGEREAGAAVTTESEVIWAAPLPPGTSAQRAELIALTQALKMAEGKKLTVYTDSRYAFATTHVHGEIYRRRGWLTSEGKEIKNKNEILALLEALFLPKRLSIIHCPGHQKGDSPQAKGNRLADDTAKKAATETHSSLTVLPAGKRTADGSEFEKRTADGSEFESPKKKAKVE

SEQ ID NO: 1170 - protein, 2130 aa, synthetic construct
MPAAKRVKLDGGDKKYSIGLDIGTNSVGWAVITDEYKVPSKKFKVLGNTDRHSIKKNLIGALLFDSGETAEATRLKRTARRRYTRRKNRICYLQEIFSNEMAKVDDSFFHRLEESFLVEEDKKHERHPIFGNIVDEVAYHEKYPTIYHLRKKLVDSTDKADLRLIYLALAHMIKFRGHFLIEGDLNPDNSDVDKLFIQLVQTYNQLFEENPINASGVDAKAILSARLSKSRRLENLIAQLPGEKKNGLFGNLIALSLGLTPNFKSNFDLAEDAKLQLSKDTYDDDLDNLLAQIGDQYADLFLAAKNLSDAILLSDILRVNTEITKAPLSASMIKRYDEHHQDLTLLKALVRQQLPEKYKEIFFDQSKNGYAGYIDGGASQEEFYKFIKPILEKMDGTEELLVKLNREDLLRKQRTFDNGSIPHQIHLGELHAILRRQEDFYPFLKDNREKIEKILTFRIPYYVGPLARGNSRFAWMTRKSEETITPWNFEEVVDKGASAQSFIERMTNFDKNLPNEKVLPKHSLLYEYFTVYNELTKVKYVTEGMRKPAFLSGEQKKAIVDLLFKTNRKVTVKQLKEDYFKKIECFDSVEISGVEDRFNASLGTYHDLLKIIKDKDFLDNEENEDILEDIVLTLTLFEDREMIEERLKTYAHLFDDKVMKQLKRRRYTGWGRLSRKLINGIRDKQSGKTILDFLKSDGFANRNFMQLIHDDSLTFKEDIQKAQVSGQGDSLHEHIANLAGSPAIKKGILQTVKVVDELVKVMGRHKPENIVIEMARENQTTQKGQKNSRERMKRIEEGIKELGSQILKEHPVENTQLQNEKLYLYYLQNGRDMYVDQELDINRLSDYDVDHIVPQSFLKDDSIDNKVLTRSDKARGKSDNVPSEEVVKKMKNYWRQLLNAKLITQRKFDNLTKAERGGLSELDKAGFIKRQLVETRQITKHVAQILDSRMNTKYDENDKLIREVKVITLKSKLVSDFRKDFQFYKVREINNYHHAHDAYLNAVVGTALIKKYPKLESEFVYGDYKVYDVRKMIAKSEQEIGKATAKYFFYSNIMNFFKTEITLANGEIRKRPLIETNGETGEIVWDKGRDFATVRKVLSMPQVNIVKKTEVQTGGFSKESILPKRNSDKLIARKKDWDPKKYGGFDSPTVAYSVLVVAKVEKGKSKKLKSVKELLGITIMERSSFEKNPIDFLEAKGYKEVKKDLIIKLPKYSLFELENGRKRMLASAGELQKGNELALPSKYVNFLYLASHYEKLKGSPEDNEQKQLFVEQHKHYLDEIIEQISEFSKRVILADANLDKVLSAYNKHRDKPIREQAENIIHLFTLTNLGAPAAFKYFDTTIDRKRYTSTKEVLDATLIHQSITGLYETRIDLSQLGGDGGAEAAAKEAAAKEAAAKEAAAKALEAEAAAKEAAAKEAAAKEAAAKAGGTLQLEEEYRLFEPESTQKQEMDIWLKNFPQAWAETGGMGTAHCQAPVLIQLKATATPISIRQYPMPHEAYQGIKPHIRRMLDQGILKPCQSPWNTPLLPVKKPGTEDYRPVQDLREVNKRVEDIHPTVPNPYNLLSTLPPSHPWYTVLDLKDAFFCLRLHSESQLLFAFEWRDPEIGLSGQLTWTRLPQGFKNSPTLFNEALHSDLADFRVRYPALVLLQYVDDLLLAAATRTECLEGTKALLETLGNKGYRASAKKAQICLQEVTYLGYSLKDGQRWLTKARKEAILSIPVPKNSRQVREFLGTAGYCRLWIPGFAELAAPLYPLTRPGTLFQWGTEQQLAFEDIKKALLSSPALGLPDITKPFELFIDENSGFAKGVLVQKLGPWKRPVAYLSKKLDTVASGWPPCLRMVAAIAILVKDAGKLTLGQPLTILTSHPVEALVRQPPNKWLSNARMTHYQAMLLDAERVHFGPTVSLNPATLLPLPSGGNHHDCLQILAETHGTRPDLTDQPLPDADLTWYTDGSSFIRNGEREAGAAVTTESEVIWAAPLPPGTSAQRAELIALTQALKMAEGKKLTVYTDSRYAFATTHVHGEIYRRRGWLTSEGKEIKNKNEILALLEALFLPKRLSIIHCPGHQKGDSPQAKGNRLADDTAKKAATETHSSLTVLPAGKRTADGSEFEKRTADGSEFESPKKKAKVE

SEQ ID NO: 1171 - protein, 2114 aa, synthetic construct
MPAAKRVKLDGGDKKYSIGLDIGTNSVGWAVITDEYKVPSKKFKVLGNTDRHSIKKNLIGALLFDSGETAEATRLKRTARRRYTRRKNRICYLQEIFSNEMAKVDDSFFHRLEESFLVEEDKKHERHPIFGNIVDEVAYHEKYPTIYHLRKKLVDSTDKADLRLIYLALAHMIKFRGHFLIEGDLNPDNSDVDKLFIQLVQTYNQLFEENPINASGVDAKAILSARLSKSRRLENLIAQLPGEKKNGLFGNLIALSLGLTPNFKSNFDLAEDAKLQLSKDTYDDDLDNLLAQIGDQYADLFLAAKNLSDAILLSDILRVNTEITKAPLSASMIKRYDEHHQDLTLLKALVRQQLPEKYKEIFFDQSKNGYAGYIDGGASQEEFYKFIKPILEKMDGTEELLVKLNREDLLRKQRTFDNGSIPHQIHLGELHAILRRQEDFYPFLKDNREKIEKILTFRIPYYVGPLARGNSRFAWMTRKSEETITPWNFEEVVDKGASAQSFIERMTNFDKNLPNEKVLPKHSLLYEYFTVYNELTKVKYVTEGMRKPAFLSGEQKKAIVDLLFKTNRKVTVKQLKEDYFKKIECFDSVEISGVEDRFNASLGTYHDLLKIIKDKDFLDNEENEDILEDIVLTLTLFEDREMIEERLKTYAHLFDDKVMKQLKRRRYTGWGRLSRKLINGIRDKQSGKTILDFLKSDGFANRNFMQLIHDDSLTFKEDIQKAQVSGQGDSLHEHIANLAGSPAIKKGILQTVKVVDELVKVMGRHKPENIVIEMARENQTTQKGQKNSRERMKRIEEGIKELGSQILKEHPVENTQLQNEKLYLYYLQNGRDMYVDQELDINRLSDYDVDHIVPQSFLKDDSIDNKVLTRSDKARGKSDNVPSEEVVKKMKNYWRQLLNAKLITQRKFDNLTKAERGGLSELDKAGFIKRQLVETRQITKHVAQILDSRMNTKYDENDKLIREVKVITLKSKLVSDFRKDFQFYKVREINNYHHAHDAYLNAVVGTALIKKYPKLESEFVYGDYKVYDVRKMIAKSEQEIGKATAKYFFYSNIMNFFKTEITLANGEIRKRPLIETNGETGEIVWDKGRDFATVRKVLSMPQVNIVKKTEVQTGGFSKESILPKRNSDKLIARKKDWDPKKYGGFDSPTVAYSVLVVAKVEKGKSKKLKSVKELLGITIMERSSFEKNPIDFLEAKGYKEVKKDLIIKLPKYSLFELENGRKRMLASAGELQKGNELALPSKYVNFLYLASHYEKLKGSPEDNEQKQLFVEQHKHYLDEIIEQISEFSKRVILADANLDKVLSAYNKHRDKPIREQAENIIHLFTLTNLGAPAAFKYFDTTIDRKRYTSTKEVLDATLIHQSITGLYETRIDLSQLGGDGGEAAAKEAAAKEAAAKEAAAKEAAAKEAAAKGGTLQLEEEYRLFEPESTQKQEMDIWLKNFPQAWAETGGMGTAHCQAPVLIQLKATATPISIRQYPMPHEAYQGIKPHIRRMLDQGILKPCQSPWNTPLLPVKKPGTEDYRPVQDLREVNKRVEDIHPTVPNPYNLLSTLPPSHPWYTVLDLKDAFFCLRLHSESQLLFAFEWRDPEIGLSGQLTWTRLPQGFKNSPTLFNEALHSDLADFRVRYPALVLLQYVDDLLLAAATRTECLEGTKALLETLGNKGYRASAKKAQICLQEVTYLGYSLKDGQRWLTKARKEAILSIPVPKNSRQVREFLGTAGYCRLWIPGFAELAAPLYPLTRPGTLFQWGTEQQLAFEDIKKALLSSPALGLPDITKPFELFIDENSGFAKGVLVQKLGPWKRPVAYLSKKLDTVASGWPPCLRMVAAIAILVKDAGKLTLGQPLTILTSHPVEALVRQPPNKWLSNARMTHYQAMLLDAERVHFGPTVSLNPATLLPLPSGGNHHDCLQILAETHGTRPDLTDQPLPDADLTWYTDGSSFIRNGEREAGAAVTTESEVIWAAPLPPGTSAQRAELIALTQALKMAEGKKLTVYTDSRYAFATTHVHGEIYRRRGWLTSEGKEIKNKNEILALLEALFLPKRLSIIHCPGHQKGDSPQAKGNRLADDTAKKAATETHSSLTVLPAGKRTADGSEFEKRTADGSEFESPKKKAKVE

SEQ ID NO: 1172 - protein, 2092 aa, synthetic construct
MPAAKRVKLDGGDKKYSIGLDIGTNSVGWAVITDEYKVPSKKFKVLGNTDRHSIKKNLIGALLFDSGETAEATRLKRTARRRYTRRKNRICYLQEIFSNEMAKVDDSFFHRLEESFLVEEDKKHERHPIFGNIVDEVAYHEKYPTIYHLRKKLVDSTDKADLRLIYLALAHMIKFRGHFLIEGDLNPDNSDVDKLFIQLVQTYNQLFEENPINASGVDAKAILSARLSKSRRLENLIAQLPGEKKNGLFGNLIALSLGLTPNFKSNFDLAEDAKLQLSKDTYDDDLDNLLAQIGDQYADLFLAAKNLSDAILLSDILRVNTEITKAPLSASMIKRYDEHHQDLTLLKALVRQQLPEKYKEIFFDQSKNGYAGYIDGGASQEEFYKFIKPILEKMDGTEELLVKLNREDLLRKQRTFDNGSIPHQIHLGELHAILRRQEDFYPFLKDNREKIEKILTFRIPYYVGPLARGNSRFAWMTRKSEETITPWNFEEVVDKGASAQSFIERMTNFDKNLPNEKVLPKHSLLYEYFTVYNELTKVKYVTEGMRKPAFLSGEQKKAIVDLLFKTNRKVTVKQLKEDYFKKIECFDSVEISGVEDRFNASLGTYHDLLKIIKDKDFLDNEENEDILEDIVLTLTLFEDREMIEERLKTYAHLFDDKVMKQLKRRRYTGWGRLSRKLINGIRDKQSGKTILDFLKSDGFANRNFMQLIHDDSLTFKEDIQKAQVSGQGDSLHEHIANLAGSPAIKKGILQTVKVVDELVKVMGRHKPENIVIEMARENQTTQKGQKNSRERMKRIEEGIKELGSQILKEHPVENTQLQNEKLYLYYLQNGRDMYVDQELDINRLSDYDVDHIVPQSFLKDDSIDNKVLTRSDKARGKSDNVPSEEVVKKMKNYWRQLLNAKLITQRKFDNLTKAERGGLSELDKAGFIKRQLVETRQITKHVAQILDSRMNTKYDENDKLIREVKVITLKSKLVSDFRKDFQFYKVREINNYHHAHDAYLNAVVGTALIKKYPKLESEFVYGDYKVYDVRKMIAKSEQEIGKATAKYFFYSNIMNFFKTEITLANGEIRKRPLIETNGETGEIVWDKGRDFATVRKVLSMPQVNIVKKTEVQTGGFSKESILPKRNSDKLIARKKDWDPKKYGGFDSPTVAYSVLVVAKVEKGKSKKLKSVKELLGITIMERSSFEKNPIDFLEAKGYKEVKKDLIIKLPKYSLFELENGRKRMLASAGELQKGNELALPSKYVNFLYLASHYEKLKGSPEDNEQKQLFVEQHKHYLDEIIEQISEFSKRVILADANLDKVLSAYNKHRDKPIREQAENIIHLFTLTNLGAPAAFKYFDTTIDRKRYTSTKEVLDATLIHQSITGLYETRIDLSQLGGDGGEAAAKGGSGGTLQLEEEYRLFEPESTQKQEMDIWLKNFPQAWAETGGMGTAHCQAPVLIQLKATATPISIRQYPMPHEAYQGIKPHIRRMLDQGILKPCQSPWNTPLLPVKKPGTEDYRPVQDLREVNKRVEDIHPTVPNPYNLLSTLPPSHPWYTVLDLKDAFFCLRLHSESQLLFAFEWRDPEIGLSGQLTWTRLPQGFKNSPTLFNEALHSDLADFRVRYPALVLLQYVDDLLLAAATRTECLEGTKALLETLGNKGYRASAKKAQICLQEVTYLGYSLKDGQRWLTKARKEAILSIPVPKNSRQVREFLGTAGYCRLWIPGFAELAAPLYPLTRPGTLFQWGTEQQLAFEDIKKALLSSPALGLPDITKPFELFIDENSGFAKGVLVQKLGPWKRPVAYLSKKLDTVASGWPPCLRMVAAIAILVKDAGKLTLGQPLTILTSHPVEALVRQPPNKWLSNARMTHYQAMLLDAERVHFGPTVSLNPATLLPLPSGGNHHDCLQILAETHGTRPDLTDQPLPDADLTWYTDGSSFIRNGEREAGAAVTTESEVIWAAPLPPGTSAQRAELIALTQALKMAEGKKLTVYTDSRYAFATTHVHGEIYRRRGWLTSEGKEIKNKNEILALLEALFLPKRLSIIHCPGHQKGDSPQAKGNRLADDTAKKAATETHSSLTVLPAGKRTADGSEFEKRTADGSEFESPKKKAKVE

SEQ ID NO: 1173 - protein, 2095 aa, synthetic construct
MPAAKRVKLDGGDKKYSIGLDIGTNSVGWAVITDEYKVPSKKFKVLGNTDRHSIKKNLIGALLFDSGETAEATRLKRTARRRYTRRKNRICYLQEIFSNEMAKVDDSFFHRLEESFLVEEDKKHERHPIFGNIVDEVAYHEKYPTIYHLRKKLVDSTDKADLRLIYLALAHMIKFRGHFLIEGDLNPDNSDVDKLFIQLVQTYNQLFEENPINASGVDAKAILSARLSKSRRLENLIAQLPGEKKNGLFGNLIALSLGLTPNFKSNFDLAEDAKLQLSKDTYDDDLDNLLAQIGDQYADLFLAAKNLSDAILLSDILRVNTEITKAPLSASMIKRYDEHHQDLTLLKALVRQQLPEKYKEIFFDQSKNGYAGYIDGGASQEEFYKFIKPILEKMDGTEELLVKLNREDLLRKQRTFDNGSIPHQIHLGELHAILRRQEDFYPFLKDNREKIEKILTFRIPYYVGPLARGNSRFAWMTRKSEETITPWNFEEVVDKGASAQSFIERMTNFDKNLPNEKVLPKHSLLYEYFTVYNELTKVKYVTEGMRKPAFLSGEQKKAIVDLLFKTNRKVTVKQLKEDYFKKIECFDSVEISGVEDRFNASLGTYHDLLKIIKDKDFLDNEENEDILEDIVLTLTLFEDREMIEERLKTYAHLFDDKVMKQLKRRRYTGWGRLSRKLINGIRDKQSGKTILDFLKSDGFANRNFMQLIHDDSLTFKEDIQKAQVSGQGDSLHEHIANLAGSPAIKKGILQTVKVVDELVKVMGRHKPENIVIEMARENQTTQKGQKNSRERMKRIEEGIKELGSQILKEHPVENTQLQNEKLYLYYLQNGRDMYVDQELDINRLSDYDVDHIVPQSFLKDDSIDNKVLTRSDKARGKSDNVPSEEVVKKMKNYWRQLLNAKLITQRKFDNLTKAERGGLSELDKAGFIKRQLVETRQITKHVAQILDSRMNTKYDENDKLIREVKVITLKSKLVSDFRKDFQFYKVREINNYHHAHDAYLNAVVGTALIKKYPKLESEFVYGDYKVYDVRKMIAKSEQEIGKATAKYFFYSNIMNFFKTEITLANGEIRKRPLIETNGETGEIVWDKGRDFATVRKVLSMPQVNIVKKTEVQTGGFSKESILPKRNSDKLIARKKDWDPKKYGGFDSPTVAYSVLVVAKVEKGKSKKLKSVKELLGITIMERSSFEKNPIDFLEAKGYKEVKKDLIIKLPKYSLFELENGRKRMLASAGELQKGNELALPSKYVNFLYLASHYEKLKGSPEDNEQKQLFVEQHKHYLDEIIEQISEFSKRVILADANLDKVLSAYNKHRDKPIREQAENIIHLFTLTNLGAPAAFKYFDTTIDRKRYTSTKEVLDATLIHQSITGLYETRIDLSQLGGDGGPAPAPAPAPAPGGTLQLEEEYRLFEPESTQKQEMDIWLKNFPQAWAETGGMGTAHCQAPVLIQLKATATPISIRQYPMPHEAYQGIKPHIRRMLDQGILKPCQSPWNTPLLPVKKPGTEDYRPVQDLREVNKRVEDIHPTVPNPYNLLSTLPPSHPWYTVLDLKDAFFCLRLHSESQLLFAFEWRDPEIGLSGQLTWTRLPQGFKNSPTLFNEALHSDLADFRVRYPALVLLQYVDDLLLAAATRTECLEGTKALLETLGNKGYRASAKKAQICLQEVTYLGYSLKDGQRWLTKARKEAILSIPVPKNSRQVREFLGTAGYCRLWIPGFAELAAPLYPLTRPGTLFQWGTEQQLAFEDIKKALLSSPALGLPDITKPFELFIDENSGFAKGVLVQKLGPWKRPVAYLSKKLDTVASGWPPCLRMVAAIAILVKDAGKLTLGQPLTILTSHPVEALVRQPPNKWLSNARMTHYQAMLLDAERVHFGPTVSLNPATLLPLPSGGNHHDCLQILAETHGTRPDLTDQPLPDADLTWYTDGSSFIRNGEREAGAAVTTESEVIWAAPLPPGTSAQRAELIALTQALKMAEGKKLTVYTDSRYAFATTHVHGEIYRRRGWLTSEGKEIKNKNEILALLEALFLPKRLSIIHCPGHQKGDSPQAKGNRLADDTAKKAATETHSSLTVLPAGKRTADGSEFEKRTADGSEFESPKKKAKVE

SEQ ID NO: 1174 - protein, 2099 aa, synthetic construct
MPAAKRVKLDGGDKKYSIGLDIGTNSVGWAVITDEYKVPSKKFKVLGNTDRHSIKKNLIGALLFDSGETAEATRLKRTARRRYTRRKNRICYLQEIFSNEMAKVDDSFFHRLEESFLVEEDKKHERHPIFGNIVDEVAYHEKYPTIYHLRKKLVDSTDKADLRLIYLALAHMIKFRGHFLIEGDLNPDNSDVDKLFIQLVQTYNQLFEENPINASGVDAKAILSARLSKSRRLENLIAQLPGEKKNGLFGNLIALSLGLTPNFKSNFDLAEDAKLQLSKDTYDDDLDNLLAQIGDQYADLFLAAKNLSDAILLSDILRVNTEITKAPLSASMIKRYDEHHQDLTLLKALVRQQLPEKYKEIFFDQSKNGYAGYIDGGASQEEFYKFIKPILEKMDGTEELLVKLNREDLLRKQRTFDNGSIPHQIHLGELHAILRRQEDFYPFLKDNREKIEKILTFRIPYYVGPLARGNSRFAWMTRKSEETITPWNFEEVVDKGASAQSFIERMTNFDKNLPNEKVLPKHSLLYEYFTVYNELTKVKYVTEGMRKPAFLSGEQKKAIVDLLFKTNRKVTVKQLKEDYFKKIECFDSVEISGVEDRFNASLGTYHDLLKIIKDKDFLDNEENEDILEDIVLTLTLFEDREMIEERLKTYAHLFDDKVMKQLKRRRYTGWGRLSRKLINGIRDKQSGKTILDFLKSDGFANRNFMQLIHDDSLTFKEDIQKAQVSGQGDSLHEHIANLAGSPAIKKGILQTVKVVDELVKVMGRHKPENIVIEMARENQTTQKGQKNSRERMKRIEEGIKELGSQILKEHPVENTQLQNEKLYLYYLQNGRDMYVDQELDINRLSDYDVDHIVPQSFLKDDSIDNKVLTRSDKARGKSDNVPSEEVVKKMKNYWRQLLNAKLITQRKFDNLTKAERGGLSELDKAGFIKRQLVETRQITKHVAQILDSRMNTKYDENDKLIREVKVITLKSKLVSDFRKDFQFYKVREINNYHHAHDAYLNAVVGTALIKKYPKLESEFVYGDYKVYDVRKMIAKSEQEIGKATAKYFFYSNIMNFFKTEITLANGEIRKRPLIETNGETGEIVWDKGRDFATVRKVLSMPQVNIVKKTEVQTGGFSKESILPKRNSDKLIARKKDWDPKKYGGFDSPTVAYSVLVVAKVEKGKSKKLKSVKELLGITIMERSSFEKNPIDFLEAKGYKEVKKDLIIKLPKYSLFELENGRKRMLASAGELQKGNELALPSKYVNFLYLASHYEKLKGSPEDNEQKQLFVEQHKHYLDEIIEQISEFSKRVILADANLDKVLSAYNKHRDKPIREQAENIIHLFTLTNLGAPAAFKYFDTTIDRKRYTSTKEVLDATLIHQSITGLYETRIDLSQLGGDGGGGGGSGGGGSGGGGSGGTLQLEEEYRLFEPESTQKQEMDIWLKNFPQAWAETGGMGTAHCQAPVLIQLKATATPISIRQYPMPHEAYQGIKPHIRRMLDQGILKPCQSPWNTPLLPVKKPGTEDYRPVQDLREVNKRVEDIHPTVPNPYNLLSTLPPSHPWYTVLDLKDAFFCLRLHSESQLLFAFEWRDPEIGLSGQLTWTRLPQGFKNSPTLFNEALHSDLADFRVRYPALVLLQYVDDLLLAAATRTECLEGTKALLETLGNKGYRASAKKAQICLQEVTYLGYSLKDGQRWLTKARKEAILSIPVPKNSRQVREFLGTAGYCRLWIPGFAELAAPLYPLTRPGTLFQWGTEQQLAFEDIKKALLSSPALGLPDITKPFELFIDENSGFAKGVLVQKLGPWKRPVAYLSKKLDTVASGWPPCLRMVAAIAILVKDAGKLTLGQPLTILTSHPVEALVRQPPNKWLSNARMTHYQAMLLDAERVHFGPTVSLNPATLLPLPSGGNHHDCLQILAETHGTRPDLTDQPLPDADLTWYTDGSSFIRNGEREAGAAVTTESEVIWAAPLPPGTSAQRAELIALTQALKMAEGKKLTVYTDSRYAFATTHVHGEIYRRRGWLTSEGKEIKNKNEILALLEALFLPKRLSIIHCPGHQKGDSPQAKGNRLADDTAKKAATETHSSLTVLPAGKRTADGSEFEKRTADGSEFESPKKKAKVE

SEQ ID NO: 1175 - protein, 2109 aa, synthetic construct
MPAAKRVKLDGGDKKYSIGLDIGTNSVGWAVITDEYKVPSKKFKVLGNTDRHSIKKNLIGALLFDSGETAEATRLKRTARRRYTRRKNRICYLQEIFSNEMAKVDDSFFHRLEESFLVEEDKKHERHPIFGNIVDEVAYHEKYPTIYHLRKKLVDSTDKADLRLIYLALAHMIKFRGHFLIEGDLNPDNSDVDKLFIQLVQTYNQLFEENPINASGVDAKAILSARLSKSRRLENLIAQLPGEKKNGLFGNLIALSLGLTPNFKSNFDLAEDAKLQLSKDTYDDDLDNLLAQIGDQYADLFLAAKNLSDAILLSDILRVNTEITKAPLSASMIKRYDEHHQDLTLLKALVRQQLPEKYKEIFFDQSKNGYAGYIDGGASQEEFYKFIKPILEKMDGTEELLVKLNREDLLRKQRTFDNGSIPHQIHLGELHAILRRQEDFYPFLKDNREKIEKILTFRIPYYVGPLARGNSRFAWMTRKSEETITPWNFEEVVDKGASAQSFIERMTNFDKNLPNEKVLPKHSLLYEYFTVYNELTKVKYVTEGMRKPAFLSGEQKKAIVDLLFKTNRKVTVKQLKEDYFKKIECFDSVEISGVEDRFNASLGTYHDLLKIIKDKDFLDNEENEDILEDIVLTLTLFEDREMIEERLKTYAHLFDDKVMKQLKRRRYTGWGRLSRKLINGIRDKQSGKTILDFLKSDGFANRNFMQLIHDDSLTFKEDIQKAQVSGQGDSLHEHIANLAGSPAIKKGILQTVKVVDELVKVMGRHKPENIVIEMARENQTTQKGQKNSRERMKRIEEGIKELGSQILKEHPVENTQLQNEKLYLYYLQNGRDMYVDQELDINRLSDYDVDHIVPQSFLKDDSIDNKVLTRSDKARGKSDNVPSEEVVKKMKNYWRQLLNAKLITQRKFDNLTKAERGGLSELDKAGFIKRQLVETRQITKHVAQILDSRMNTKYDENDKLIREVKVITLKSKLVSDFRKDFQFYKVREINNYHHAHDAYLNAVVGTALIKKYPKLESEFVYGDYKVYDVRKMIAKSEQEIGKATAKYFFYSNIMNFFKTEITLANGEIRKRPLIETNGETGEIVWDKGRDFATVRKVLSMPQVNIVKKTEVQTGGFSKESILPKRNSDKLIARKKDWDPKKYGGFDSPTVAYSVLVVAKVEKGKSKKLKSVKELLGITIMERSSFEKNPIDFLEAKGYKEVKKDLIIKLPKYSLFELENGRKRMLASAGELQKGNELALPSKYVNFLYLASHYEKLKGSPEDNEQKQLFVEQHKHYLDEIIEQISEFSKRVILADANLDKVLSAYNKHRDKPIREQAENIIHLFTLTNLGAPAAFKYFDTTIDRKRYTSTKEVLDATLIHQSITGLYETRIDLSQLGGDGGEAAAKEAAAKEAAAKEAAAKEAAAKGGTLQLEEEYRLFEPESTQKQEMDIWLKNFPQAWAETGGMGTAHCQAPVLIQLKATATPISIRQYPMPHEAYQGIKPHIRRMLDQGILKPCQSPWNTPLLPVKKPGTEDYRPVQDLREVNKRVEDIHPTVPNPYNLLSTLPPSHPWYTVLDLKDAFFCLRLHSESQLLFAFEWRDPEIGLSGQLTWTRLPQGFKNSPTLFNEALHSDLADFRVRYPALVLLQYVDDLLLAAATRTECLEGTKALLETLGNKGYRASAKKAQICLQEVTYLGYSLKDGQRWLTKARKEAILSIPVPKNSRQVREFLGTAGYCRLWIPGFAELAAPLYPLTRPGTLFQWGTEQQLAFEDIKKALLSSPALGLPDITKPFELFIDENSGFAKGVLVQKLGPWKRPVAYLSKKLDTVASGWPPCLRMVAAIAILVKDAGKLTLGQPLTILTSHPVEALVRQPPNKWLSNARMTHYQAMLLDAERVHFGPTVSLNPATLLPLPSGGNHHDCLQILAETHGTRPDLTDQPLPDADLTWYTDGSSFIRNGEREAGAAVTTESEVIWAAPLPPGTSAQRAELIALTQALKMAEGKKLTVYTDSRYAFATTHVHGEIYRRRGWLTSEGKEIKNKNEILALLEALFLPKRLSIIHCPGHQKGDSPQAKGNRLADDTAKKAATETHSSLTVLPAGKRTADGSEFEKRTADGSEFESPKKKAKVE

SEQ ID NO: 1176 - protein, 2095 aa, synthetic construct
MPAAKRVKLDGGDKKYSIGLDIGTNSVGWAVITDEYKVPSKKFKVLGNTDRHSIKKNLIGALLFDSGETAEATRLKRTARRRYTRRKNRICYLQEIFSNEMAKVDDSFFHRLEESFLVEEDKKHERHPIFGNIVDEVAYHEKYPTIYHLRKKLVDSTDKADLRLIYLALAHMIKFRGHFLIEGDLNPDNSDVDKLFIQLVQTYNQLFEENPINASGVDAKAILSARLSKSRRLENLIAQLPGEKKNGLFGNLIALSLGLTPNFKSNFDLAEDAKLQLSKDTYDDDLDNLLAQIGDQYADLFLAAKNLSDAILLSDILRVNTEITKAPLSASMIKRYDEHHQDLTLLKALVRQQLPEKYKEIFFDQSKNGYAGYIDGGASQEEFYKFIKPILEKMDGTEELLVKLNREDLLRKQRTFDNGSIPHQIHLGELHAILRRQEDFYPFLKDNREKIEKILTFRIPYYVGPLARGNSRFAWMTRKSEETITPWNFEEVVDKGASAQSFIERMTNFDKNLPNEKVLPKHSLLYEYFTVYNELTKVKYVTEGMRKPAFLSGEQKKAIVDLLFKTNRKVTVKQLKEDYFKKIECFDSVEISGVEDRFNASLGTYHDLLKIIKDKDFLDNEENEDILEDIVLTLTLFEDREMIEERLKTYAHLFDDKVMKQLKRRRYTGWGRLSRKLINGIRDKQSGKTILDFLKSDGFANRNFMQLIHDDSLTFKEDIQKAQVSGQGDSLHEHIANLAGSPAIKKGILQTVKVVDELVKVMGRHKPENIVIEMARENQTTQKGQKNSRERMKRIEEGIKELGSQILKEHPVENTQLQNEKLYLYYLQNGRDMYVDQELDINRLSDYDVDHIVPQSFLKDDSIDNKVLTRSDKARGKSDNVPSEEVVKKMKNYWRQLLNAKLITQRKFDNLTKAERGGLSELDKAGFIKRQLVETRQITKHVAQILDSRMNTKYDENDKLIREVKVITLKSKLVSDFRKDFQFYKVREINNYHHAHDAYLNAVVGTALIKKYPKLESEFVYGDYKVYDVRKMIAKSEQEIGKATAKYFFYSNIMNFFKTEITLANGEIRKRPLIETNGETGEIVWDKGRDFATVRKVLSMPQVNIVKKTEVQTGGFSKESILPKRNSDKLIARKKDWDPKKYGGFDSPTVAYSVLVVAKVEKGKSKKLKSVKELLGITIMERSSFEKNPIDFLEAKGYKEVKKDLIIKLPKYSLFELENGRKRMLASAGELQKGNELALPSKYVNFLYLASHYEKLKGSPEDNEQKQLFVEQHKHYLDEIIEQISEFSKRVILADANLDKVLSAYNKHRDKPIREQAENIIHLFTLTNLGAPAAFKYFDTTIDRKRYTSTKEVLDATLIHQSITGLYETRIDLSQLGGDGGGGSPAPEAAAKGGTLQLEEEYRLFEPESTQKQEMDIWLKNFPQAWAETGGMGTAHCQAPVLIQLKATATPISIRQYPMPHEAYQGIKPHIRRMLDQGILKPCQSPWNTPLLPVKKPGTEDYRPVQDLREVNKRVEDIHPTVPNPYNLLSTLPPSHPWYTVLDLKDAFFCLRLHSESQLLFAFEWRDPEIGLSGQLTWTRLPQGFKNSPTLFNEALHSDLADFRVRYPALVLLQYVDDLLLAAATRTECLEGTKALLETLGNKGYRASAKKAQICLQEVTYLGYSLKDGQRWLTKARKEAILSIPVPKNSRQVREFLGTAGYCRLWIPGFAELAAPLYPLTRPGTLFQWGTEQQLAFEDIKKALLSSPALGLPDITKPFELFIDENSGFAKGVLVQKLGPWKRPVAYLSKKLDTVASGWPPCLRMVAAIAILVKDAGKLTLGQPLTILTSHPVEALVRQPPNKWLSNARMTHYQAMLLDAERVHFGPTVSLNPATLLPLPSGGNHHDCLQILAETHGTRPDLTDQPLPDADLTWYTDGSSFIRNGEREAGAAVTTESEVIWAAPLPPGTSAQRAELIALTQALKMAEGKKLTVYTDSRYAFATTHVHGEIYRRRGWLTSEGKEIKNKNEILALLEALFLPKRLSIIHCPGHQKGDSPQAKGNRLADDTAKKAATETHSSLTVLPAGKRTADGSEFEKRTADGSEFESPKKKAKVE

SEQ ID NO: 1177 - protein, 2102 aa, synthetic construct
MPAAKRVKLDGGDKKYSIGLDIGTNSVGWAVITDEYKVPSKKFKVLGNTDRHSIKKNLIGALLFDSGETAEATRLKRTARRRYTRRKNRICYLQEIFSNEMAKVDDSFFHRLEESFLVEEDKKHERHPIFGNIVDEVAYHEKYPTIYHLRKKLVDSTDKADLRLIYLALAHMIKFRGHFLIEGDLNPDNSDVDKLFIQLVQTYNQLFEENPINASGVDAKAILSARLSKSRRLENLIAQLPGEKKNGLFGNLIALSLGLTPNFKSNFDLAEDAKLQLSKDTYDDDLDNLLAQIGDQYADLFLAAKNLSDAILLSDILRVNTEITKAPLSASMIKRYDEHHQDLTLLKALVRQQLPEKYKEIFFDQSKNGYAGYIDGGASQEEFYKFIKPILEKMDGTEELLVKLNREDLLRKQRTFDNGSIPHQIHLGELHAILRRQEDFYPFLKDNREKIEKILTFRIPYYVGPLARGNSRFAWMTRKSEETITPWNFEEVVDKGASAQSFIERMTNFDKNLPNEKVLPKHSLLYEYFTVYNELTKVKYVTEGMRKPAFLSGEQKKAIVDLLFKTNRKVTVKQLKEDYFKKIECFDSVEISGVEDRFNASLGTYHDLLKIIKDKDFLDNEENEDILEDIVLTLTLFEDREMIEERLKTYAHLFDDKVMKQLKRRRYTGWGRLSRKLINGIRDKQSGKTILDFLKSDGFANRNFMQLIHDDSLTFKEDIQKAQVSGQGDSLHEHIANLAGSPAIKKGILQTVKVVDELVKVMGRHKPENIVIEMARENQTTQKGQKNSRERMKRIEEGIKELGSQILKEHPVENTQLQNEKLYLYYLQNGRDMYVDQELDINRLSDYDVDHIVPQSFLKDDSIDNKVLTRSDKARGKSDNVPSEEVVKKMKNYWRQLLNAKLITQRKFDNLTKAERGGLSELDKAGFIKRQLVETRQITKHVAQILDSRMNTKYDENDKLIREVKVITLKSKLVSDFRKDFQFYKVREINNYHHAHDAYLNAVVGTALIKKYPKLESEFVYGDYKVYDVRKMIAKSEQEIGKATAKYFFYSNIMNFFKTEITLANGEIRKRPLIETNGETGEIVWDKGRDFATVRKVLSMPQVNIVKKTEVQTGGFSKESILPKRNSDKLIARKKDWDPKKYGGFDSPTVAYSVLVVAKVEKGKSKKLKSVKELLGITIMERSSFEKNPIDFLEAKGYKEVKKDLIIKLPKYSLFELENGRKRMLASAGELQKGNELALPSKYVNFLYLASHYEKLKGSPEDNEQKQLFVEQHKHYLDEIIEQISEFSKRVILADANLDKVLSAYNKHRDKPIREQAENIIHLFTLTNLGAPAAFKYFDTTIDRKRYTSTKEVLDATLIHQSITGLYETRIDLSQLGGDGGGGSGGSGGSGGSGGSGGSGGTLQLEEEYRLFEPESTQKQEMDIWLKNFPQAWAETGGMGTAHCQAPVLIQLKATATPISIRQYPMPHEAYQGIKPHIRRMLDQGILKPCQSPWNTPLLPVKKPGTEDYRPVQDLREVNKRVEDIHPTVPNPYNLLSTLPPSHPWYTVLDLKDAFFCLRLHSESQLLFAFEWRDPEIGLSGQLTWTRLPQGFKNSPTLFNEALHSDLADFRVRYPALVLLQYVDDLLLAAATRTECLEGTKALLETLGNKGYRASAKKAQICLQEVTYLGYSLKDGQRWLTKARKEAILSIPVPKNSRQVREFLGTAGYCRLWIPGFAELAAPLYPLTRPGTLFQWGTEQQLAFEDIKKALLSSPALGLPDITKPFELFIDENSGFAKGVLVQKLGPWKRPVAYLSKKLDTVASGWPPCLRMVAAIAILVKDAGKLTLGQPLTILTSHPVEALVRQPPNKWLSNARMTHYQAMLLDAERVHFGPTVSLNPATLLPLPSGGNHHDCLQILAETHGTRPDLTDQPLPDADLTWYTDGSSFIRNGEREAGAAVTTESEVIWAAPLPPGTSAQRAELIALTQALKMAEGKKLTVYTDSRYAFATTHVHGEIYRRRGWLTSEGKEIKNKNEILALLEALFLPKRLSIIHCPGHQKGDSPQAKGNRLADDTAKKAATETHSSLTVLPAGKRTADGSEFEKRTADGSEFESPKKKAKVE

SEQ ID NO: 1178 - protein, 2095 aa, synthetic construct
MPAAKRVKLDGGDKKYSIGLDIGTNSVGWAVITDEYKVPSKKFKVLGNTDRHSIKKNLIGALLFDSGETAEATRLKRTARRRYTRRKNRICYLQEIFSNEMAKVDDSFFHRLEESFLVEEDKKHERHPIFGNIVDEVAYHEKYPTIYHLRKKLVDSTDKADLRLIYLALAHMIKFRGHFLIEGDLNPDNSDVDKLFIQLVQTYNQLFEENPINASGVDAKAILSARLSKSRRLENLIAQLPGEKKNGLFGNLIALSLGLTPNFKSNFDLAEDAKLQLSKDTYDDDLDNLLAQIGDQYADLFLAAKNLSDAILLSDILRVNTEITKAPLSASMIKRYDEHHQDLTLLKALVRQQLPEKYKEIFFDQSKNGYAGYIDGGASQEEFYKFIKPILEKMDGTEELLVKLNREDLLRKQRTFDNGSIPHQIHLGELHAILRRQEDFYPFLKDNREKIEKILTFRIPYYVGPLARGNSRFAWMTRKSEETITPWNFEEVVDKGASAQSFIERMTNFDKNLPNEKVLPKHSLLYEYFTVYNELTKVKYVTEGMRKPAFLSGEQKKAIVDLLFKTNRKVTVKQLKEDYFKKIECFDSVEISGVEDRFNASLGTYHDLLKIIKDKDFLDNEENEDILEDIVLTLTLFEDREMIEERLKTYAHLFDDKVMKQLKRRRYTGWGRLSRKLINGIRDKQSGKTILDFLKSDGFANRNFMQLIHDDSLTFKEDIQKAQVSGQGDSLHEHIANLAGSPAIKKGILQTVKVVDELVKVMGRHKPENIVIEMARENQTTQKGQKNSRERMKRIEEGIKELGSQILKEHPVENTQLQNEKLYLYYLQNGRDMYVDQELDINRLSDYDVDHIVPQSFLKDDSIDNKVLTRSDKARGKSDNVPSEEVVKKMKNYWRQLLNAKLITQRKFDNLTKAERGGLSELDKAGFIKRQLVETRQITKHVAQILDSRMNTKYDENDKLIREVKVITLKSKLVSDFRKDFQFYKVREINNYHHAHDAYLNAVVGTALIKKYPKLESEFVYGDYKVYDVRKMIAKSEQEIGKATAKYFFYSNIMNFFKTEITLANGEIRKRPLIETNGETGEIVWDKGRDFATVRKVLSMPQVNIVKKTEVQTGGFSKESILPKRNSDKLIARKKDWDPKKYGGFDSPTVAYSVLVVAKVEKGKSKKLKSVKELLGITIMERSSFEKNPIDFLEAKGYKEVKKDLIIKLPKYSLFELENGRKRMLASAGELQKGNELALPSKYVNFLYLASHYEKLKGSPEDNEQKQLFVEQHKHYLDEIIEQISEFSKRVILADANLDKVLSAYNKHRDKPIREQAENIIHLFTLTNLGAPAAFKYFDTTIDRKRYTSTKEVLDATLIHQSITGLYETRIDLSQLGGDGGEAAAKGGSGSSGGTLQLEEEYRLFEPESTQKQEMDIWLKNFPQAWAETGGMGTAHCQAPVLIQLKATATPISIRQYPMPHEAYQGIKPHIRRMLDQGILKPCQSPWNTPLLPVKKPGTEDYRPVQDLREVNKRVEDIHPTVPNPYNLLSTLPPSHPWYTVLDLKDAFFCLRLHSESQLLFAFEWRDPEIGLSGQLTWTRLPQGFKNSPTLFNEALHSDLADFRVRYPALVLLQYVDDLLLAAATRTECLEGTKALLETLGNKGYRASAKKAQICLQEVTYLGYSLKDGQRWLTKARKEAILSIPVPKNSRQVREFLGTAGYCRLWIPGFAELAAPLYPLTRPGTLFQWGTEQQLAFEDIKKALLSSPALGLPDITKPFELFIDENSGFAKGVLVQKLGPWKRPVAYLSKKLDTVASGWPPCLRMVAAIAILVKDAGKLTLGQPLTILTSHPVEALVRQPPNKWLSNARMTHYQAMLLDAERVHFGPTVSLNPATLLPLPSGGNHHDCLQILAETHGTRPDLTDQPLPDADLTWYTDGSSFIRNGEREAGAAVTTESEVIWAAPLPPGTSAQRAELIALTQALKMAEGKKLTVYTDSRYAFATTHVHGEIYRRRGWLTSEGKEIKNKNEILALLEALFLPKRLSIIHCPGHQKGDSPQAKGNRLADDTAKKAATETHSSLTVLPAGKRTADGSEFEKRTADGSEFESPKKKAKVE

SEQ ID NO: 1179 - protein, 2095 aa, synthetic construct
MPAAKRVKLDGGDKKYSIGLDIGTNSVGWAVITDEYKVPSKKFKVLGNTDRHSIKKNLIGALLFDSGETAEATRLKRTARRRYTRRKNRICYLQEIFSNEMAKVDDSFFHRLEESFLVEEDKKHERHPIFGNIVDEVAYHEKYPTIYHLRKKLVDSTDKADLRLIYLALAHMIKFRGHFLIEGDLNPDNSDVDKLFIQLVQTYNQLFEENPINASGVDAKAILSARLSKSRRLENLIAQLPGEKKNGLFGNLIALSLGLTPNFKSNFDLAEDAKLQLSKDTYDDDLDNLLAQIGDQYADLFLAAKNLSDAILLSDILRVNTEITKAPLSASMIKRYDEHHQDLTLLKALVRQQLPEKYKEIFFDQSKNGYAGYIDGGASQEEFYKFIKPILEKMDGTEELLVKLNREDLLRKQRTFDNGSIPHQIHLGELHAILRRQEDFYPFLKDNREKIEKILTFRIPYYVGPLARGNSRFAWMTRKSEETITPWNFEEVVDKGASAQSFIERMTNFDKNLPNEKVLPKHSLLYEYFTVYNELTKVKYVTEGMRKPAFLSGEQKKAIVDLLFKTNRKVTVKQLKEDYFKKIECFDSVEISGVEDRFNASLGTYHDLLKIIKDKDFLDNEENEDILEDIVLTLTLFEDREMIEERLKTYAHLFDDKVMKQLKRRRYTGWGRLSRKLINGIRDKQSGKTILDFLKSDGFANRNFMQLIHDDSLTFKEDIQKAQVSGQGDSLHEHIANLAGSPAIKKGILQTVKVVDELVKVMGRHKPENIVIEMARENQTTQKGQKNSRERMKRIEEGIKELGSQILKEHPVENTQLQNEKLYLYYLQNGRDMYVDQELDINRLSDYDVDHIVPQSFLKDDSIDNKVLTRSDKARGKSDNVPSEEVVKKMKNYWRQLLNAKLITQRKFDNLTKAERGGLSELDKAGFIKRQLVETRQITKHVAQILDSRMNTKYDENDKLIREVKVITLKSKLVSDFRKDFQFYKVREINNYHHAHDAYLNAVVGTALIKKYPKLESEFVYGDYKVYDVRKMIAKSEQEIGKATAKYFFYSNIMNFFKTEITLANGEIRKRPLIETNGETGEIVWDKGRDFATVRKVLSMPQVNIVKKTEVQTGGFSKESILPKRNSDKLIARKKDWDPKKYGGFDSPTVAYSVLVVAKVEKGKSKKLKSVKELLGITIMERSSFEKNPIDFLEAKGYKEVKKDLIIKLPKYSLFELENGRKRMLASAGELQKGNELALPSKYVNFLYLASHYEKLKGSPEDNEQKQLFVEQHKHYLDEIIEQISEFSKRVILADANLDKVLSAYNKHRDKPIREQAENIIHLFTLTNLGAPAAFKYFDTTIDRKRYTSTKEVLDATLIHQSITGLYETRIDLSQLGGDGGGGGEAAAKPAPGGTLQLEEEYRLFEPESTQKQEMDIWLKNFPQAWAETGGMGTAHCQAPVLIQLKATATPISIRQYPMPHEAYQGIKPHIRRMLDQGILKPCQSPWNTPLLPVKKPGTEDYRPVQDLREVNKRVEDIHPTVPNPYNLLSTLPPSHPWYTVLDLKDAFFCLRLHSESQLLFAFEWRDPEIGLSGQLTWTRLPQGFKNSPTLFNEALHSDLADFRVRYPALVLLQYVDDLLLAAATRTECLEGTKALLETLGNKGYRASAKKAQICLQEVTYLGYSLKDGQRWLTKARKEAILSIPVPKNSRQVREFLGTAGYCRLWIPGFAELAAPLYPLTRPGTLFQWGTEQQLAFEDIKKALLSSPALGLPDITKPFELFIDENSGFAKGVLVQKLGPWKRPVAYLSKKLDTVASGWPPCLRMVAAIAILVKDAGKLTLGQPLTILTSHPVEALVRQPPNKWLSNARMTHYQAMLLDAERVHFGPTVSLNPATLLPLPSGGNHHDCLQILAETHGTRPDLTDQPLPDADLTWYTDGSSFIRNGEREAGAAVTTESEVIWAAPLPPGTSAQRAELIALTQALKMAEGKKLTVYTDSRYAFATTHVHGEIYRRRGWLTSEGKEIKNKNEILALLEALFLPKRLSIIHCPGHQKGDSPQAKGNRLADDTAKKAATETHSSLTVLPAGKRTADGSEFEKRTADGSEFESPKKKAKVE

SEQ ID NO: 1180 - protein, 2094 aa, synthetic construct
MPAAKRVKLDGGDKKYSIGLDIGTNSVGWAVITDEYKVPSKKFKVLGNTDRHSIKKNLIGALLFDSGETAEATRLKRTARRRYTRRKNRICYLQEIFSNEMAKVDDSFFHRLEESFLVEEDKKHERHPIFGNIVDEVAYHEKYPTIYHLRKKLVDSTDKADLRLIYLALAHMIKFRGHFLIEGDLNPDNSDVDKLFIQLVQTYNQLFEENPINASGVDAKAILSARLSKSRRLENLIAQLPGEKKNGLFGNLIALSLGLTPNFKSNFDLAEDAKLQLSKDTYDDDLDNLLAQIGDQYADLFLAAKNLSDAILLSDILRVNTEITKAPLSASMIKRYDEHHQDLTLLKALVRQQLPEKYKEIFFDQSKNGYAGYIDGGASQEEFYKFIKPILEKMDGTEELLVKLNREDLLRKQRTFDNGSIPHQIHLGELHAILRRQEDFYPFLKDNREKIEKILTFRIPYYVGPLARGNSRFAWMTRKSEETITPWNFEEVVDKGASAQSFIERMTNFDKNLPNEKVLPKHSLLYEYFTVYNELTKVKYVTEGMRKPAFLSGEQKKAIVDLLFKTNRKVTVKQLKEDYFKKIECFDSVEISGVEDRFNASLGTYHDLLKIIKDKDFLDNEENEDILEDIVLTLTLFEDREMIEERLKTYAHLFDDKVMKQLKRRRYTGWGRLSRKLINGIRDKQSGKTILDFLKSDGFANRNFMQLIHDDSLTFKEDIQKAQVSGQGDSLHEHIANLAGSPAIKKGILQTVKVVDELVKVMGRHKPENIVIEMARENQTTQKGQKNSRERMKRIEEGIKELGSQILKEHPVENTQLQNEKLYLYYLQNGRDMYVDQELDINRLSDYDVDHIVPQSFLKDDSIDNKVLTRSDKARGKSDNVPSEEVVKKMKNYWRQLLNAKLITQRKFDNLTKAERGGLSELDKAGFIKRQLVETRQITKHVAQILDSRMNTKYDENDKLIREVKVITLKSKLVSDFRKDFQFYKVREINNYHHAHDAYLNAVVGTALIKKYPKLESEFVYGDYKVYDVRKMIAKSEQEIGKATAKYFFYSNIMNFFKTEITLANGEIRKRPLIETNGETGEIVWDKGRDFATVRKVLSMPQVNIVKKTEVQTGGFSKESILPKRNSDKLIARKKDWDPKKYGGFDSPTVAYSVLVVAKVEKGKSKKLKSVKELLGITIMERSSFEKNPIDFLEAKGYKEVKKDLIIKLPKYSLFELENGRKRMLASAGELQKGNELALPSKYVNFLYLASHYEKLKGSPEDNEQKQLFVEQHKHYLDEIIEQISEFSKRVILADANLDKVLSAYNKHRDKPIREQAENIIHLFTLTNLGAPAAFKYFDTTIDRKRYTSTKEVLDATLIHQSITGLYETRIDLSQLGGDGGGGGGSGGGGSGGTLQLEEEYRLFEPESTQKQEMDIWLKNFPQAWAETGGMGTAHCQAPVLIQLKATATPISIRQYPMPHEAYQGIKPHIRRMLDQGILKPCQSPWNTPLLPVKKPGTEDYRPVQDLREVNKRVEDIHPTVPNPYNLLSTLPPSHPWYTVLDLKDAFFCLRLHSESQLLFAFEWRDPEIGLSGQLTWTRLPQGFKNSPTLFNEALHSDLADFRVRYPALVLLQYVDDLLLAAATRTECLEGTKALLETLGNKGYRASAKKAQICLQEVTYLGYSLKDGQRWLTKARKEAILSIPVPKNSRQVREFLGTAGYCRLWIPGFAELAAPLYPLTRPGTLFQWGTEQQLAFEDIKKALLSSPALGLPDITKPFELFIDENSGFAKGVLVQKLGPWKRPVAYLSKKLDTVASGWPPCLRMVAAIAILVKDAGKLTLGQPLTILTSHPVEALVRQPPNKWLSNARMTHYQAMLLDAERVHFGPTVSLNPATLLPLPSGGNHHDCLQILAETHGTRPDLTDQPLPDADLTWYTDGSSFIRNGEREAGAAVTTESEVIWAAPLPPGTSAQRAELIALTQALKMAEGKKLTVYTDSRYAFATTHVHGEIYRRRGWLTSEGKEIKNKNEILALLEALFLPKRLSIIHCPGHQKGDSPQAKGNRLADDTAKKAATETHSSLTVLPAGKRTADGSEFEKRTADGSEFESPKKKAKVE

SEQ ID NO: 1181 - protein, 2091 aa, synthetic construct
MPAAKRVKLDGGDKKYSIGLDIGTNSVGWAVITDEYKVPSKKFKVLGNTDRHSIKKNLIGALLFDSGETAEATRLKRTARRRYTRRKNRICYLQEIFSNEMAKVDDSFFHRLEESFLVEEDKKHERHPIFGNIVDEVAYHEKYPTIYHLRKKLVDSTDKADLRLIYLALAHMIKFRGHFLIEGDLNPDNSDVDKLFIQLVQTYNQLFEENPINASGVDAKAILSARLSKSRRLENLIAQLPGEKKNGLFGNLIALSLGLTPNFKSNFDLAEDAKLQLSKDTYDDDLDNLLAQIGDQYADLFLAAKNLSDAILLSDILRVNTEITKAPLSASMIKRYDEHHQDLTLLKALVRQQLPEKYKEIFFDQSKNGYAGYIDGGASQEEFYKFIKPILEKMDGTEELLVKLNREDLLRKQRTFDNGSIPHQIHLGELHAILRRQEDFYPFLKDNREKIEKILTFRIPYYVGPLARGNSRFAWMTRKSEETITPWNFEEVVDKGASAQSFIERMTNFDKNLPNEKVLPKHSLLYEYFTVYNELTKVKYVTEGMRKPAFLSGEQKKAIVDLLFKTNRKVTVKQLKEDYFKKIECFDSVEISGVEDRFNASLGTYHDLLKIIKDKDFLDNEENEDILEDIVLTLTLFEDREMIEERLKTYAHLFDDKVMKQLKRRRYTGWGRLSRKLINGIRDKQSGKTILDFLKSDGFANRNFMQLIHDDSLTFKEDIQKAQVSGQGDSLHEHIANLAGSPAIKKGILQTVKVVDELVKVMGRHKPENIVIEMARENQTTQKGQKNSRERMKRIEEGIKELGSQILKEHPVENTQLQNEKLYLYYLQNGRDMYVDQELDINRLSDYDVDHIVPQSFLKDDSIDNKVLTRSDKARGKSDNVPSEEVVKKMKNYWRQLLNAKLITQRKFDNLTKAERGGLSELDKAGFIKRQLVETRQITKHVAQILDSRMNTKYDENDKLIREVKVITLKSKLVSDFRKDFQFYKVREINNYHHAHDAYLNAVVGTALIKKYPKLESEFVYGDYKVYDVRKMIAKSEQEIGKATAKYFFYSNIMNFFKTEITLANGEIRKRPLIETNGETGEIVWDKGRDFATVRKVLSMPQVNIVKKTEVQTGGFSKESILPKRNSDKLIARKKDWDPKKYGGFDSPTVAYSVLVVAKVEKGKSKKLKSVKELLGITIMERSSFEKNPIDFLEAKGYKEVKKDLIIKLPKYSLFELENGRKRMLASAGELQKGNELALPSKYVNFLYLASHYEKLKGSPEDNEQKQLFVEQHKHYLDEIIEQISEFSKRVILADANLDKVLSAYNKHRDKPIREQAENIIHLFTLTNLGAPAAFKYFDTTIDRKRYTSTKEVLDATLIHQSITGLYETRIDLSQLGGDGGGGGGGGGGGTLQLEEEYRLFEPESTQKQEMDIWLKNFPQAWAETGGMGTAHCQAPVLIQLKATATPISIRQYPMPHEAYQGIKPHIRRMLDQGILKPCQSPWNTPLLPVKKPGTEDYRPVQDLREVNKRVEDIHPTVPNPYNLLSTLPPSHPWYTVLDLKDAFFCLRLHSESQLLFAFEWRDPEIGLSGQLTWTRLPQGFKNSPTLFNEALHSDLADFRVRYPALVLLQYVDDLLLAAATRTECLEGTKALLETLGNKGYRASAKKAQICLQEVTYLGYSLKDGQRWLTKARKEAILSIPVPKNSRQVREFLGTAGYCRLWIPGFAELAAPLYPLTRPGTLFQWGTEQQLAFEDIKKALLSSPALGLPDITKPFELFIDENSGFAKGVLVQKLGPWKRPVAYLSKKLDTVASGWPPCLRMVAAIAILVKDAGKLTLGQPLTILTSHPVEALVRQPPNKWLSNARMTHYQAMLLDAERVHFGPTVSLNPATLLPLPSGGNHHDCLQILAETHGTRPDLTDQPLPDADLTWYTDGSSFIRNGEREAGAAVTTESEVIWAAPLPPGTSAQRAELIALTQALKMAEGKKLTVYTDSRYAFATTHVHGEIYRRRGWLTSEGKEIKNKNEILALLEALFLPKRLSIIHCPGHQKGDSPQAKGNRLADDTAKKAATETHSSLTVLPAGKRTADGSEFEKRTADGSEFESPKKKAKVE

SEQ ID NO: 1182 - protein, 2093 aa, synthetic construct
MPAAKRVKLDGGDKKYSIGLDIGTNSVGWAVITDEYKVPSKKFKVLGNTDRHSIKKNLIGALLFDSGETAEATRLKRTARRRYTRRKNRICYLQEIFSNEMAKVDDSFFHRLEESFLVEEDKKHERHPIFGNIVDEVAYHEKYPTIYHLRKKLVDSTDKADLRLIYLALAHMIKFRGHFLIEGDLNPDNSDVDKLFIQLVQTYNQLFEENPINASGVDAKAILSARLSKSRRLENLIAQLPGEKKNGLFGNLIALSLGLTPNFKSNFDLAEDAKLQLSKDTYDDDLDNLLAQIGDQYADLFLAAKNLSDAILLSDILRVNTEITKAPLSASMIKRYDEHHQDLTLLKALVRQQLPEKYKEIFFDQSKNGYAGYIDGGASQEEFYKFIKPILEKMDGTEELLVKLNREDLLRKQRTFDNGSIPHQIHLGELHAILRRQEDFYPFLKDNREKIEKILTFRIPYYVGPLARGNSRFAWMTRKSEETITPWNFEEVVDKGASAQSFIERMTNFDKNLPNEKVLPKHSLLYEYFTVYNELTKVKYVTEGMRKPAFLSGEQKKAIVDLLFKTNRKVTVKQLKEDYFKKIECFDSVEISGVEDRFNASLGTYHDLLKIIKDKDFLDNEENEDILEDIVLTLTLFEDREMIEERLKTYAHLFDDKVMKQLKRRRYTGWGRLSRKLINGIRDKQSGKTILDFLKSDGFANRNFMQLIHDDSLTFKEDIQKAQVSGQGDSLHEHIANLAGSPAIKKGILQTVKVVDELVKVMGRHKPENIVIEMARENQTTQKGQKNSRERMKRIEEGIKELGSQILKEHPVENTQLQNEKLYLYYLQNGRDMYVDQELDINRLSDYDVDHIVPQSFLKDDSIDNKVLTRSDKARGKSDNVPSEEVVKKMKNYWRQLLNAKLITQRKFDNLTKAERGGLSELDKAGFIKRQLVETRQITKHVAQILDSRMNTKYDENDKLIREVKVITLKSKLVSDFRKDFQFYKVREINNYHHAHDAYLNAVVGTALIKKYPKLESEFVYGDYKVYDVRKMIAKSEQEIGKATAKYFFYSNIMNFFKTEITLANGEIRKRPLIETNGETGEIVWDKGRDFATVRKVLSMPQVNIVKKTEVQTGGFSKESILPKRNSDKLIARKKDWDPKKYGGFDSPTVAYSVLVVAKVEKGKSKKLKSVKELLGITIMERSSFEKNPIDFLEAKGYKEVKKDLIIKLPKYSLFELENGRKRMLASAGELQKGNELALPSKYVNFLYLASHYEKLKGSPEDNEQKQLFVEQHKHYLDEIIEQISEFSKRVILADANLDKVLSAYNKHRDKPIREQAENIIHLFTLTNLGAPAAFKYFDTTIDRKRYTSTKEVLDATLIHQSITGLYETRIDLSQLGGDGGGGGPAPGGSGGTLQLEEEYRLFEPESTQKQEMDIWLKNFPQAWAETGGMGTAHCQAPVLIQLKATATPISIRQYPMPHEAYQGIKPHIRRMLDQGILKPCQSPWNTPLLPVKKPGTEDYRPVQDLREVNKRVEDIHPTVPNPYNLLSTLPPSHPWYTVLDLKDAFFCLRLHSESQLLFAFEWRDPEIGLSGQLTWTRLPQGFKNSPTLFNEALHSDLADFRVRYPALVLLQYVDDLLLAAATRTECLEGTKALLETLGNKGYRASAKKAQICLQEVTYLGYSLKDGQRWLTKARKEAILSIPVPKNSRQVREFLGTAGYCRLWIPGFAELAAPLYPLTRPGTLFQWGTEQQLAFEDIKKALLSSPALGLPDITKPFELFIDENSGFAKGVLVQKLGPWKRPVAYLSKKLDTVASGWPPCLRMVAAIAILVKDAGKLTLGQPLTILTSHPVEALVRQPPNKWLSNARMTHYQAMLLDAERVHFGPTVSLNPATLLPLPSGGNHHDCLQILAETHGTRPDLTDQPLPDADLTWYTDGSSFIRNGEREAGAAVTTESEVIWAAPLPPGTSAQRAELIALTQALKMAEGKKLTVYTDSRYAFATTHVHGEIYRRRGWLTSEGKEIKNKNEILALLEALFLPKRLSIIHCPGHQKGDSPQAKGNRLADDTAKKAATETHSSLTVLPAGKRTADGSEFEKRTADGSEFESPKKKAKVE

SEQ ID NO: 1183 - protein, 2089 aa, synthetic construct
MPAAKRVKLDGGDKKYSIGLDIGTNSVGWAVITDEYKVPSKKFKVLGNTDRHSIKKNLIGALLFDSGETAEATRLKRTARRRYTRRKNRICYLQEIFSNEMAKVDDSFFHRLEESFLVEEDKKHERHPIFGNIVDEVAYHEKYPTIYHLRKKLVDSTDKADLRLIYLALAHMIKFRGHFLIEGDLNPDNSDVDKLFIQLVQTYNQLFEENPINASGVDAKAILSARLSKSRRLENLIAQLPGEKKNGLFGNLIALSLGLTPNFKSNFDLAEDAKLQLSKDTYDDDLDNLLAQIGDQYADLFLAAKNLSDAILLSDILRVNTEITKAPLSASMIKRYDEHHQDLTLLKALVRQQLPEKYKEIFFDQSKNGYAGYIDGGASQEEFYKFIKPILEKMDGTEELLVKLNREDLLRKQRTFDNGSIPHQIHLGELHAILRRQEDFYPFLKDNREKIEKILTFRIPYYVGPLARGNSRFAWMTRKSEETITPWNFEEVVDKGASAQSFIERMTNFDKNLPNEKVLPKHSLLYEYFTVYNELTKVKYVTEGMRKPAFLSGEQKKAIVDLLFKTNRKVTVKQLKEDYFKKIECFDSVEISGVEDRFNASLGTYHDLLKIIKDKDFLDNEENEDILEDIVLTLTLFEDREMIEERLKTYAHLFDDKVMKQLKRRRYTGWGRLSRKLINGIRDKQSGKTILDFLKSDGFANRNFMQLIHDDSLTFKEDIQKAQVSGQGDSLHEHIANLAGSPAIKKGILQTVKVVDELVKVMGRHKPENIVIEMARENQTTQKGQKNSRERMKRIEEGIKELGSQILKEHPVENTQLQNEKLYLYYLQNGRDMYVDQELDINRLSDYDVDHIVPQSFLKDDSIDNKVLTRSDKARGKSDNVPSEEVVKKMKNYWRQLLNAKLITQRKFDNLTKAERGGLSELDKAGFIKRQLVETRQITKHVAQILDSRMNTKYDENDKLIREVKVITLKSKLVSDFRKDFQFYKVREINNYHHAHDAYLNAVVGTALIKKYPKLESEFVYGDYKVYDVRKMIAKSEQEIGKATAKYFFYSNIMNFFKTEITLANGEIRKRPLIETNGETGEIVWDKGRDFATVRKVLSMPQVNIVKKTEVQTGGFSKESILPKRNSDKLIARKKDWDPKKYGGFDSPTVAYSVLVVAKVEKGKSKKLKSVKELLGITIMERSSFEKNPIDFLEAKGYKEVKKDLIIKLPKYSLFELENGRKRMLASAGELQKGNELALPSKYVNFLYLASHYEKLKGSPEDNEQKQLFVEQHKHYLDEIIEQISEFSKRVILADANLDKVLSAYNKHRDKPIREQAENIIHLFTLTNLGAPAAFKYFDTTIDRKRYTSTKEVLDATLIHQSITGLYETRIDLSQLGGDGGEAAAKGGTLQLEEEYRLFEPESTQKQEMDIWLKNFPQAWAETGGMGTAHCQAPVLIQLKATATPISIRQYPMPHEAYQGIKPHIRRMLDQGILKPCQSPWNTPLLPVKKPGTEDYRPVQDLREVNKRVEDIHPTVPNPYNLLSTLPPSHPWYTVLDLKDAFFCLRLHSESQLLFAFEWRDPEIGLSGQLTWTRLPQGFKNSPTLFNEALHSDLADFRVRYPALVLLQYVDDLLLAAATRTECLEGTKALLETLGNKGYRASAKKAQICLQEVTYLGYSLKDGQRWLTKARKEAILSIPVPKNSRQVREFLGTAGYCRLWIPGFAELAAPLYPLTRPGTLFQWGTEQQLAFEDIKKALLSSPALGLPDITKPFELFIDENSGFAKGVLVQKLGPWKRPVAYLSKKLDTVASGWPPCLRMVAAIAILVKDAGKLTLGQPLTILTSHPVEALVRQPPNKWLSNARMTHYQAMLLDAERVHFGPTVSLNPATLLPLPSGGNHHDCLQILAETHGTRPDLTDQPLPDADLTWYTDGSSFIRNGEREAGAAVTTESEVIWAAPLPPGTSAQRAELIALTQALKMAEGKKLTVYTDSRYAFATTHVHGEIYRRRGWLTSEGKEIKNKNEILALLEALFLPKRLSIIHCPGHQKGDSPQAKGNRLADDTAKKAATETHSSLTVLPAGKRTADGSEFEKRTADGSEFESPKKKAKVE

SEQ ID NO: 1184 - protein, 2090 aa, synthetic construct
MPAAKRVKLDGGDKKYSIGLDIGTNSVGWAVITDEYKVPSKKFKVLGNTDRHSIKKNLIGALLFDSGETAEATRLKRTARRRYTRRKNRICYLQEIFSNEMAKVDDSFFHRLEESFLVEEDKKHERHPIFGNIVDEVAYHEKYPTIYHLRKKLVDSTDKADLRLIYLALAHMIKFRGHFLIEGDLNPDNSDVDKLFIQLVQTYNQLFEENPINASGVDAKAILSARLSKSRRLENLIAQLPGEKKNGLFGNLIALSLGLTPNFKSNFDLAEDAKLQLSKDTYDDDLDNLLAQIGDQYADLFLAAKNLSDAILLSDILRVNTEITKAPLSASMIKRYDEHHQDLTLLKALVRQQLPEKYKEIFFDQSKNGYAGYIDGGASQEEFYKFIKPILEKMDGTEELLVKLNREDLLRKQRTFDNGSIPHQIHLGELHAILRRQEDFYPFLKDNREKIEKILTFRIPYYVGPLARGNSRFAWMTRKSEETITPWNFEEVVDKGASAQSFIERMTNFDKNLPNEKVLPKHSLLYEYFTVYNELTKVKYVTEGMRKPAFLSGEQKKAIVDLLFKTNRKVTVKQLKEDYFKKIECFDSVEISGVEDRFNASLGTYHDLLKIIKDKDFLDNEENEDILEDIVLTLTLFEDREMIEERLKTYAHLFDDKVMKQLKRRRYTGWGRLSRKLINGIRDKQSGKTILDFLKSDGFANRNFMQLIHDDSLTFKEDIQKAQVSGQGDSLHEHIANLAGSPAIKKGILQTVKVVDELVKVMGRHKPENIVIEMARENQTTQKGQKNSRERMKRIEEGIKELGSQILKEHPVENTQLQNEKLYLYYLQNGRDMYVDQELDINRLSDYDVDHIVPQSFLKDDSIDNKVLTRSDKARGKSDNVPSEEVVKKMKNYWRQLLNAKLITQRKFDNLTKAERGGLSELDKAGFIKRQLVETRQITKHVAQILDSRMNTKYDENDKLIREVKVITLKSKLVSDFRKDFQFYKVREINNYHHAHDAYLNAVVGTALIKKYPKLESEFVYGDYKVYDVRKMIAKSEQEIGKATAKYFFYSNIMNFFKTEITLANGEIRKRPLIETNGETGEIVWDKGRDFATVRKVLSMPQVNIVKKTEVQTGGFSKESILPKRNSDKLIARKKDWDPKKYGGFDSPTVAYSVLVVAKVEKGKSKKLKSVKELLGITIMERSSFEKNPIDFLEAKGYKEVKKDLIIKLPKYSLFELENGRKRMLASAGELQKGNELALPSKYVNFLYLASHYEKLKGSPEDNEQKQLFVEQHKHYLDEIIEQISEFSKRVILADANLDKVLSAYNKHRDKPIREQAENIIHLFTLTNLGAPAAFKYFDTTIDRKRYTSTKEVLDATLIHQSITGLYETRIDLSQLGGDGGGGSGGGGGTLQLEEEYRLFEPESTQKQEMDIWLKNFPQAWAETGGMGTAHCQAPVLIQLKATATPISIRQYPMPHEAYQGIKPHIRRMLDQGILKPCQSPWNTPLLPVKKPGTEDYRPVQDLREVNKRVEDIHPTVPNPYNLLSTLPPSHPWYTVLDLKDAFFCLRLHSESQLLFAFEWRDPEIGLSGQLTWTRLPQGFKNSPTLFNEALHSDLADFRVRYPALVLLQYVDDLLLAAATRTECLEGTKALLETLGNKGYRASAKKAQICLQEVTYLGYSLKDGQRWLTKARKEAILSIPVPKNSRQVREFLGTAGYCRLWIPGFAELAAPLYPLTRPGTLFQWGTEQQLAFEDIKKALLSSPALGLPDITKPFELFIDENSGFAKGVLVQKLGPWKRPVAYLSKKLDTVASGWPPCLRMVAAIAILVKDAGKLTLGQPLTILTSHPVEALVRQPPNKWLSNARMTHYQAMLLDAERVHFGPTVSLNPATLLPLPSGGNHHDCLQILAETHGTRPDLTDQPLPDADLTWYTDGSSFIRNGEREAGAAVTTESEVIWAAPLPPGTSAQRAELIALTQALKMAEGKKLTVYTDSRYAFATTHVHGEIYRRRGWLTSEGKEIKNKNEILALLEALFLPKRLSIIHCPGHQKGDSPQAKGNRLADDTAKKAATETHSSLTVLPAGKRTADGSEFEKRTADGSEFESPKKKAKVE

SEQ ID NO: 1185 - protein, 2095 aa, synthetic construct
MPAAKRVKLDGGDKKYSIGLDIGTNSVGWAVITDEYKVPSKKFKVLGNTDRHSIKKNLIGALLFDSGETAEATRLKRTARRRYTRRKNRICYLQEIFSNEMAKVDDSFFHRLEESFLVEEDKKHERHPIFGNIVDEVAYHEKYPTIYHLRKKLVDSTDKADLRLIYLALAHMIKFRGHFLIEGDLNPDNSDVDKLFIQLVQTYNQLFEENPINASGVDAKAILSARLSKSRRLENLIAQLPGEKKNGLFGNLIALSLGLTPNFKSNFDLAEDAKLQLSKDTYDDDLDNLLAQIGDQYADLFLAAKNLSDAILLSDILRVNTEITKAPLSASMIKRYDEHHQDLTLLKALVRQQLPEKYKEIFFDQSKNGYAGYIDGGASQEEFYKFIKPILEKMDGTEELLVKLNREDLLRKQRTFDNGSIPHQIHLGELHAILRRQEDFYPFLKDNREKIEKILTFRIPYYVGPLARGNSRFAWMTRKSEETITPWNFEEVVDKGASAQSFIERMTNFDKNLPNEKVLPKHSLLYEYFTVYNELTKVKYVTEGMRKPAFLSGEQKKAIVDLLFKTNRKVTVKQLKEDYFKKIECFDSVEISGVEDRFNASLGTYHDLLKIIKDKDFLDNEENEDILEDIVLTLTLFEDREMIEERLKTYAHLFDDKVMKQLKRRRYTGWGRLSRKLINGIRDKQSGKTILDFLKSDGFANRNFMQLIHDDSLTFKEDIQKAQVSGQGDSLHEHIANLAGSPAIKKGILQTVKVVDELVKVMGRHKPENIVIEMARENQTTQKGQKNSRERMKRIEEGIKELGSQILKEHPVENTQLQNEKLYLYYLQNGRDMYVDQELDINRLSDYDVDHIVPQSFLKDDSIDNKVLTRSDKARGKSDNVPSEEVVKKMKNYWRQLLNAKLITQRKFDNLTKAERGGLSELDKAGFIKRQLVETRQITKHVAQILDSRMNTKYDENDKLIREVKVITLKSKLVSDFRKDFQFYKVREINNYHHAHDAYLNAVVGTALIKKYPKLESEFVYGDYKVYDVRKMIAKSEQEIGKATAKYFFYSNIMNFFKTEITLANGEIRKRPLIETNGETGEIVWDKGRDFATVRKVLSMPQVNIVKKTEVQTGGFSKESILPKRNSDKLIARKKDWDPKKYGGFDSPTVAYSVLVVAKVEKGKSKKLKSVKELLGITIMERSSFEKNPIDFLEAKGYKEVKKDLIIKLPKYSLFELENGRKRMLASAGELQKGNELALPSKYVNFLYLASHYEKLKGSPEDNEQKQLFVEQHKHYLDEIIEQISEFSKRVILADANLDKVLSAYNKHRDKPIREQAENIIHLFTLTNLGAPAAFKYFDTTIDRKRYTSTKEVLDATLIHQSITGLYETRIDLSQLGGDGGEAAAKPAPGGGGGTLQLEEEYRLFEPESTQKQEMDIWLKNFPQAWAETGGMGTAHCQAPVLIQLKATATPISIRQYPMPHEAYQGIKPHIRRMLDQGILKPCQSPWNTPLLPVKKPGTEDYRPVQDLREVNKRVEDIHPTVPNPYNLLSTLPPSHPWYTVLDLKDAFFCLRLHSESQLLFAFEWRDPEIGLSGQLTWTRLPQGFKNSPTLFNEALHSDLADFRVRYPALVLLQYVDDLLLAAATRTECLEGTKALLETLGNKGYRASAKKAQICLQEVTYLGYSLKDGQRWLTKARKEAILSIPVPKNSRQVREFLGTAGYCRLWIPGFAELAAPLYPLTRPGTLFQWGTEQQLAFEDIKKALLSSPALGLPDITKPFELFIDENSGFAKGVLVQKLGPWKRPVAYLSKKLDTVASGWPPCLRMVAAIAILVKDAGKLTLGQPLTILTSHPVEALVRQPPNKWLSNARMTHYQAMLLDAERVHFGPTVSLNPATLLPLPSGGNHHDCLQILAETHGTRPDLTDQPLPDADLTWYTDGSSFIRNGEREAGAAVTTESEVIWAAPLPPGTSAQRAELIALTQALKMAEGKKLTVYTDSRYAFATTHVHGEIYRRRGWLTSEGKEIKNKNEILALLEALFLPKRLSIIHCPGHQKGDSPQAKGNRLADDTAKKAATETHSSLTVLPAGKRTADGSEFEKRTADGSEFESPKKKAKVE

SEQ ID NO: 1186 - protein, 2095 aa, synthetic construct
MPAAKRVKLDGGDKKYSIGLDIGTNSVGWAVITDEYKVPSKKFKVLGNTDRHSIKKNLIGALLFDSGETAEATRLKRTARRRYTRRKNRICYLQEIFSNEMAKVDDSFFHRLEESFLVEEDKKHERHPIFGNIVDEVAYHEKYPTIYHLRKKLVDSTDKADLRLIYLALAHMIKFRGHFLIEGDLNPDNSDVDKLFIQLVQTYNQLFEENPINASGVDAKAILSARLSKSRRLENLIAQLPGEKKNGLFGNLIALSLGLTPNFKSNFDLAEDAKLQLSKDTYDDDLDNLLAQIGDQYADLFLAAKNLSDAILLSDILRVNTEITKAPLSASMIKRYDEHHQDLTLLKALVRQQLPEKYKEIFFDQSKNGYAGYIDGGASQEEFYKFIKPILEKMDGTEELLVKLNREDLLRKQRTFDNGSIPHQIHLGELHAILRRQEDFYPFLKDNREKIEKILTFRIPYYVGPLARGNSRFAWMTRKSEETITPWNFEEVVDKGASAQSFIERMTNFDKNLPNEKVLPKHSLLYEYFTVYNELTKVKYVTEGMRKPAFLSGEQKKAIVDLLFKTNRKVTVKQLKEDYFKKIECFDSVEISGVEDRFNASLGTYHDLLKIIKDKDFLDNEENEDILEDIVLTLTLFEDREMIEERLKTYAHLFDDKVMKQLKRRRYTGWGRLSRKLINGIRDKQSGKTILDFLKSDGFANRNFMQLIHDDSLTFKEDIQKAQVSGQGDSLHEHIANLAGSPAIKKGILQTVKVVDELVKVMGRHKPENIVIEMARENQTTQKGQKNSRERMKRIEEGIKELGSQILKEHPVENTQLQNEKLYLYYLQNGRDMYVDQELDINRLSDYDVDHIVPQSFLKDDSIDNKVLTRSDKARGKSDNVPSEEVVKKMKNYWRQLLNAKLITQRKFDNLTKAERGGLSELDKAGFIKRQLVETRQITKHVAQILDSRMNTKYDENDKLIREVKVITLKSKLVSDFRKDFQFYKVREINNYHHAHDAYLNAVVGTALIKKYPKLESEFVYGDYKVYDVRKMIAKSEQEIGKATAKYFFYSNIMNFFKTEITLANGEIRKRPLIETNGETGEIVWDKGRDFATVRKVLSMPQVNIVKKTEVQTGGFSKESILPKRNSDKLIARKKDWDPKKYGGFDSPTVAYSVLVVAKVEKGKSKKLKSVKELLGITIMERSSFEKNPIDFLEAKGYKEVKKDLIIKLPKYSLFELENGRKRMLASAGELQKGNELALPSKYVNFLYLASHYEKLKGSPEDNEQKQLFVEQHKHYLDEIIEQISEFSKRVILADANLDKVLSAYNKHRDKPIREQAENIIHLFTLTNLGAPAAFKYFDTTIDRKRYTSTKEVLDATLIHQSITGLYETRIDLSQLGGDGGGGGPAPEAAAKGGTLQLEEEYRLFEPESTQKQEMDIWLKNFPQAWAETGGMGTAHCQAPVLIQLKATATPISIRQYPMPHEAYQGIKPHIRRMLDQGILKPCQSPWNTPLLPVKKPGTEDYRPVQDLREVNKRVEDIHPTVPNPYNLLSTLPPSHPWYTVLDLKDAFFCLRLHSESQLLFAFEWRDPEIGLSGQLTWTRLPQGFKNSPTLFNEALHSDLADFRVRYPALVLLQYVDDLLLAAATRTECLEGTKALLETLGNKGYRASAKKAQICLQEVTYLGYSLKDGQRWLTKARKEAILSIPVPKNSRQVREFLGTAGYCRLWIPGFAELAAPLYPLTRPGTLFQWGTEQQLAFEDIKKALLSSPALGLPDITKPFELFIDENSGFAKGVLVQKLGPWKRPVAYLSKKLDTVASGWPPCLRMVAAIAILVKDAGKLTLGQPLTILTSHPVEALVRQPPNKWLSNARMTHYQAMLLDAERVHFGPTVSLNPATLLPLPSGGNHHDCLQILAETHGTRPDLTDQPLPDADLTWYTDGSSFIRNGEREAGAAVTTESEVIWAAPLPPGTSAQRAELIALTQALKMAEGKKLTVYTDSRYAFATTHVHGEIYRRRGWLTSEGKEIKNKNEILALLEALFLPKRLSIIHCPGHQKGDSPQAKGNRLADDTAKKAATETHSSLTVLPAGKRTADGSEFEKRTADGSEFESPKKKAKVE

SEQ ID NO: 1187 - protein, 2095 aa, synthetic construct
MPAAKRVKLDGGDKKYSIGLDIGTNSVGWAVITDEYKVPSKKFKVLGNTDRHSIKKNLIGALLFDSGETAEATRLKRTARRRYTRRKNRICYLQEIFSNEMAKVDDSFFHRLEESFLVEEDKKHERHPIFGNIVDEVAYHEKYPTIYHLRKKLVDSTDKADLRLIYLALAHMIKFRGHFLIEGDLNPDNSDVDKLFIQLVQTYNQLFEENPINASGVDAKAILSARLSKSRRLENLIAQLPGEKKNGLFGNLIALSLGLTPNFKSNFDLAEDAKLQLSKDTYDDDLDNLLAQIGDQYADLFLAAKNLSDAILLSDILRVNTEITKAPLSASMIKRYDEHHQDLTLLKALVRQQLPEKYKEIFFDQSKNGYAGYIDGGASQEEFYKFIKPILEKMDGTEELLVKLNREDLLRKQRTFDNGSIPHQIHLGELHAILRRQEDFYPFLKDNREKIEKILTFRIPYYVGPLARGNSRFAWMTRKSEETITPWNFEEVVDKGASAQSFIERMTNFDKNLPNEKVLPKHSLLYEYFTVYNELTKVKYVTEGMRKPAFLSGEQKKAIVDLLFKTNRKVTVKQLKEDYFKKIECFDSVEISGVEDRFNASLGTYHDLLKIIKDKDFLDNEENEDILEDIVLTLTLFEDREMIEERLKTYAHLFDDKVMKQLKRRRYTGWGRLSRKLINGIRDKQSGKTILDFLKSDGFANRNFMQLIHDDSLTFKEDIQKAQVSGQGDSLHEHIANLAGSPAIKKGILQTVKVVDELVKVMGRHKPENIVIEMARENQTTQKGQKNSRERMKRIEEGIKELGSQILKEHPVENTQLQNEKLYLYYLQNGRDMYVDQELDINRLSDYDVDHIVPQSFLKDDSIDNKVLTRSDKARGKSDNVPSEEVVKKMKNYWRQLLNAKLITQRKFDNLTKAERGGLSELDKAGFIKRQLVETRQITKHVAQILDSRMNTKYDENDKLIREVKVITLKSKLVSDFRKDFQFYKVREINNYHHAHDAYLNAVVGTALIKKYPKLESEFVYGDYKVYDVRKMIAKSEQEIGKATAKYFFYSNIMNFFKTEITLANGEIRKRPLIETNGETGEIVWDKGRDFATVRKVLSMPQVNIVKKTEVQTGGFSKESILPKRNSDKLIARKKDWDPKKYGGFDSPTVAYSVLVVAKVEKGKSKKLKSVKELLGITIMERSSFEKNPIDFLEAKGYKEVKKDLIIKLPKYSLFELENGRKRMLASAGELQKGNELALPSKYVNFLYLASHYEKLKGSPEDNEQKQLFVEQHKHYLDEIIEQISEFSKRVILADANLDKVLSAYNKHRDKPIREQAENIIHLFTLTNLGAPAAFKYFDTTIDRKRYTSTKEVLDATLIHQSITGLYETRIDLSQLGGDGGGGGGGSEAAAKGGTLQLEEEYRLFEPESTQKQEMDIWLKNFPQAWAETGGMGTAHCQAPVLIQLKATATPISIRQYPMPHEAYQGIKPHIRRMLDQGILKPCQSPWNTPLLPVKKPGTEDYRPVQDLREVNKRVEDIHPTVPNPYNLLSTLPPSHPWYTVLDLKDAFFCLRLHSESQLLFAFEWRDPEIGLSGQLTWTRLPQGFKNSPTLFNEALHSDLADFRVRYPALVLLQYVDDLLLAAATRTECLEGTKALLETLGNKGYRASAKKAQICLQEVTYLGYSLKDGQRWLTKARKEAILSIPVPKNSRQVREFLGTAGYCRLWIPGFAELAAPLYPLTRPGTLFQWGTEQQLAFEDIKKALLSSPALGLPDITKPFELFIDENSGFAKGVLVQKLGPWKRPVAYLSKKLDTVASGWPPCLRMVAAIAILVKDAGKLTLGQPLTILTSHPVEALVRQPPNKWLSNARMTHYQAMLLDAERVHFGPTVSLNPATLLPLPSGGNHHDCLQILAETHGTRPDLTDQPLPDADLTWYTDGSSFIRNGEREAGAAVTTESEVIWAAPLPPGTSAQRAELIALTQALKMAEGKKLTVYTDSRYAFATTHVHGEIYRRRGWLTSEGKEIKNKNEILALLEALFLPKRLSIIHCPGHQKGDSPQAKGNRLADDTAKKAATETHSSLTVLPAGKRTADGSEFEKRTADGSEFESPKKKAKVE

SEQ ID NO: 1188 - protein, 2090 aa, synthetic construct
MPAAKRVKLDGGDKKYSIGLDIGTNSVGWAVITDEYKVPSKKFKVLGNTDRHSIKKNLIGALLFDSGETAEATRLKRTARRRYTRRKNRICYLQEIFSNEMAKVDDSFFHRLEESFLVEEDKKHERHPIFGNIVDEVAYHEKYPTIYHLRKKLVDSTDKADLRLIYLALAHMIKFRGHFLIEGDLNPDNSDVDKLFIQLVQTYNQLFEENPINASGVDAKAILSARLSKSRRLENLIAQLPGEKKNGLFGNLIALSLGLTPNFKSNFDLAEDAKLQLSKDTYDDDLDNLLAQIGDQYADLFLAAKNLSDAILLSDILRVNTEITKAPLSASMIKRYDEHHQDLTLLKALVRQQLPEKYKEIFFDQSKNGYAGYIDGGASQEEFYKFIKPILEKMDGTEELLVKLNREDLLRKQRTFDNGSIPHQIHLGELHAILRRQEDFYPFLKDNREKIEKILTFRIPYYVGPLARGNSRFAWMTRKSEETITPWNFEEVVDKGASAQSFIERMTNFDKNLPNEKVLPKHSLLYEYFTVYNELTKVKYVTEGMRKPAFLSGEQKKAIVDLLFKTNRKVTVKQLKEDYFKKIECFDSVEISGVEDRFNASLGTYHDLLKIIKDKDFLDNEENEDILEDIVLTLTLFEDREMIEERLKTYAHLFDDKVMKQLKRRRYTGWGRLSRKLINGIRDKQSGKTILDFLKSDGFANRNFMQLIHDDSLTFKEDIQKAQVSGQGDSLHEHIANLAGSPAIKKGILQTVKVVDELVKVMGRHKPENIVIEMARENQTTQKGQKNSRERMKRIEEGIKELGSQILKEHPVENTQLQNEKLYLYYLQNGRDMYVDQELDINRLSDYDVDHIVPQSFLKDDSIDNKVLTRSDKARGKSDNVPSEEVVKKMKNYWRQLLNAKLITQRKFDNLTKAERGGLSELDKAGFIKRQLVETRQITKHVAQILDSRMNTKYDENDKLIREVKVITLKSKLVSDFRKDFQFYKVREINNYHHAHDAYLNAVVGTALIKKYPKLESEFVYGDYKVYDVRKMIAKSEQEIGKATAKYFFYSNIMNFFKTEITLANGEIRKRPLIETNGETGEIVWDKGRDFATVRKVLSMPQVNIVKKTEVQTGGFSKESILPKRNSDKLIARKKDWDPKKYGGFDSPTVAYSVLVVAKVEKGKSKKLKSVKELLGITIMERSSFEKNPIDFLEAKGYKEVKKDLIIKLPKYSLFELENGRKRMLASAGELQKGNELALPSKYVNFLYLASHYEKLKGSPEDNEQKQLFVEQHKHYLDEIIEQISEFSKRVILADANLDKVLSAYNKHRDKPIREQAENIIHLFTLTNLGAPAAFKYFDTTIDRKRYTSTKEVLDATLIHQSITGLYETRIDLSQLGGDGGGGGGGGGGTLQLEEEYRLFEPESTQKQEMDIWLKNFPQAWAETGGMGTAHCQAPVLIQLKATATPISIRQYPMPHEAYQGIKPHIRRMLDQGILKPCQSPWNTPLLPVKKPGTEDYRPVQDLREVNKRVEDIHPTVPNPYNLLSTLPPSHPWYTVLDLKDAFFCLRLHSESQLLFAFEWRDPEIGLSGQLTWTRLPQGFKNSPTLFNEALHSDLADFRVRYPALVLLQYVDDLLLAAATRTECLEGTKALLETLGNKGYRASAKKAQICLQEVTYLGYSLKDGQRWLTKARKEAILSIPVPKNSRQVREFLGTAGYCRLWIPGFAELAAPLYPLTRPGTLFQWGTEQQLAFEDIKKALLSSPALGLPDITKPFELFIDENSGFAKGVLVQKLGPWKRPVAYLSKKLDTVASGWPPCLRMVAAIAILVKDAGKLTLGQPLTILTSHPVEALVRQPPNKWLSNARMTHYQAMLLDAERVHFGPTVSLNPATLLPLPSGGNHHDCLQILAETHGTRPDLTDQPLPDADLTWYTDGSSFIRNGEREAGAAVTTESEVIWAAPLPPGTSAQRAELIALTQALKMAEGKKLTVYTDSRYAFATTHVHGEIYRRRGWLTSEGKEIKNKNEILALLEALFLPKRLSIIHCPGHQKGDSPQAKGNRLADDTAKKAATETHSSLTVLPAGKRTADGSEFEKRTADGSEFESPKKKAKVE

SEQ ID NO: 1189 - protein, 2093 aa, synthetic construct
MPAAKRVKLDGGDKKYSIGLDIGTNSVGWAVITDEYKVPSKKFKVLGNTDRHSIKKNLIGALLFDSGETAEATRLKRTARRRYTRRKNRICYLQEIFSNEMAKVDDSFFHRLEESFLVEEDKKHERHPIFGNIVDEVAYHEKYPTIYHLRKKLVDSTDKADLRLIYLALAHMIKFRGHFLIEGDLNPDNSDVDKLFIQLVQTYNQLFEENPINASGVDAKAILSARLSKSRRLENLIAQLPGEKKNGLFGNLIALSLGLTPNFKSNFDLAEDAKLQLSKDTYDDDLDNLLAQIGDQYADLFLAAKNLSDAILLSDILRVNTEITKAPLSASMIKRYDEHHQDLTLLKALVRQQLPEKYKEIFFDQSKNGYAGYIDGGASQEEFYKFIKPILEKMDGTEELLVKLNREDLLRKQRTFDNGSIPHQIHLGELHAILRRQEDFYPFLKDNREKIEKILTFRIPYYVGPLARGNSRFAWMTRKSEETITPWNFEEVVDKGASAQSFIERMTNFDKNLPNEKVLPKHSLLYEYFTVYNELTKVKYVTEGMRKPAFLSGEQKKAIVDLLFKTNRKVTVKQLKEDYFKKIECFDSVEISGVEDRFNASLGTYHDLLKIIKDKDFLDNEENEDILEDIVLTLTLFEDREMIEERLKTYAHLFDDKVMKQLKRRRYTGWGRLSRKLINGIRDKQSGKTILDFLKSDGFANRNFMQLIHDDSLTFKEDIQKAQVSGQGDSLHEHIANLAGSPAIKKGILQTVKVVDELVKVMGRHKPENIVIEMARENQTTQKGQKNSRERMKRIEEGIKELGSQILKEHPVENTQLQNEKLYLYYLQNGRDMYVDQELDINRLSDYDVDHIVPQSFLKDDSIDNKVLTRSDKARGKSDNVPSEEVVKKMKNYWRQLLNAKLITQRKFDNLTKAERGGLSELDKAGFIKRQLVETRQITKHVAQILDSRMNTKYDENDKLIREVKVITLKSKLVSDFRKDFQFYKVREINNYHHAHDAYLNAVVGTALIKKYPKLESEFVYGDYKVYDVRKMIAKSEQEIGKATAKYFFYSNIMNFFKTEITLANGEIRKRPLIETNGETGEIVWDKGRDFATVRKVLSMPQVNIVKKTEVQTGGFSKESILPKRNSDKLIARKKDWDPKKYGGFDSPTVAYSVLVVAKVEKGKSKKLKSVKELLGITIMERSSFEKNPIDFLEAKGYKEVKKDLIIKLPKYSLFELENGRKRMLASAGELQKGNELALPSKYVNFLYLASHYEKLKGSPEDNEQKQLFVEQHKHYLDEIIEQISEFSKRVILADANLDKVLSAYNKHRDKPIREQAENIIHLFTLTNLGAPAAFKYFDTTIDRKRYTSTKEVLDATLIHQSITGLYETRIDLSQLGGDGGGGGGSSPAPGGTLQLEEEYRLFEPESTQKQEMDIWLKNFPQAWAETGGMGTAHCQAPVLIQLKATATPISIRQYPMPHEAYQGIKPHIRRMLDQGILKPCQSPWNTPLLPVKKPGTEDYRPVQDLREVNKRVEDIHPTVPNPYNLLSTLPPSHPWYTVLDLKDAFFCLRLHSESQLLFAFEWRDPEIGLSGQLTWTRLPQGFKNSPTLFNEALHSDLADFRVRYPALVLLQYVDDLLLAAATRTECLEGTKALLETLGNKGYRASAKKAQICLQEVTYLGYSLKDGQRWLTKARKEAILSIPVPKNSRQVREFLGTAGYCRLWIPGFAELAAPLYPLTRPGTLFQWGTEQQLAFEDIKKALLSSPALGLPDITKPFELFIDENSGFAKGVLVQKLGPWKRPVAYLSKKLDTVASGWPPCLRMVAAIAILVKDAGKLTLGQPLTILTSHPVEALVRQPPNKWLSNARMTHYQAMLLDAERVHFGPTVSLNPATLLPLPSGGNHHDCLQILAETHGTRPDLTDQPLPDADLTWYTDGSSFIRNGEREAGAAVTTESEVIWAAPLPPGTSAQRAELIALTQALKMAEGKKLTVYTDSRYAFATTHVHGEIYRRRGWLTSEGKEIKNKNEILALLEALFLPKRLSIIHCPGHQKGDSPQAKGNRLADDTAKKAATETHSSLTVLPAGKRTADGSEFEKRTADGSEFESPKKKAKVE

SEQ ID NO: 1190 - protein, 2093 aa, synthetic construct
MPAAKRVKLDGGDKKYSIGLDIGTNSVGWAVITDEYKVPSKKFKVLGNTDRHSIKKNLIGALLFDSGETAEATRLKRTARRRYTRRKNRICYLQEIFSNEMAKVDDSFFHRLEESFLVEEDKKHERHPIFGNIVDEVAYHEKYPTIYHLRKKLVDSTDKADLRLIYLALAHMIKFRGHFLIEGDLNPDNSDVDKLFIQLVQTYNQLFEENPINASGVDAKAILSARLSKSRRLENLIAQLPGEKKNGLFGNLIALSLGLTPNFKSNFDLAEDAKLQLSKDTYDDDLDNLLAQIGDQYADLFLAAKNLSDAILLSDILRVNTEITKAPLSASMIKRYDEHHQDLTLLKALVRQQLPEKYKEIFFDQSKNGYAGYIDGGASQEEFYKFIKPILEKMDGTEELLVKLNREDLLRKQRTFDNGSIPHQIHLGELHAILRRQEDFYPFLKDNREKIEKILTFRIPYYVGPLARGNSRFAWMTRKSEETITPWNFEEVVDKGASAQSFIERMTNFDKNLPNEKVLPKHSLLYEYFTVYNELTKVKYVTEGMRKPAFLSGEQKKAIVDLLFKTNRKVTVKQLKEDYFKKIECFDSVEISGVEDRFNASLGTYHDLLKIIKDKDFLDNEENEDILEDIVLTLTLFEDREMIEERLKTYAHLFDDKVMKQLKRRRYTGWGRLSRKLINGIRDKQSGKTILDFLKSDGFANRNFMQLIHDDSLTFKEDIQKAQVSGQGDSLHEHIANLAGSPAIKKGILQTVKVVDELVKVMGRHKPENIVIEMARENQTTQKGQKNSRERMKRIEEGIKELGSQILKEHPVENTQLQNEKLYLYYLQNGRDMYVDQELDINRLSDYDVDHIVPQSFLKDDSIDNKVLTRSDKARGKSDNVPSEEVVKKMKNYWRQLLNAKLITQRKFDNLTKAERGGLSELDKAGFIKRQLVETRQITKHVAQILDSRMNTKYDENDKLIREVKVITLKSKLVSDFRKDFQFYKVREINNYHHAHDAYLNAVVGTALIKKYPKLESEFVYGDYKVYDVRKMIAKSEQEIGKATAKYFFYSNIMNFFKTEITLANGEIRKRPLIETNGETGEIVWDKGRDFATVRKVLSMPQVNIVKKTEVQTGGFSKESILPKRNSDKLIARKKDWDPKKYGGFDSPTVAYSVLVVAKVEKGKSKKLKSVKELLGITIMERSSFEKNPIDFLEAKGYKEVKKDLIIKLPKYSLFELENGRKRMLASAGELQKGNELALPSKYVNFLYLASHYEKLKGSPEDNEQKQLFVEQHKHYLDEIIEQISEFSKRVILADANLDKVLSAYNKHRDKPIREQAENIIHLFTLTNLGAPAAFKYFDTTIDRKRYTSTKEVLDATLIHQSITGLYETRIDLSQLGGDGGGGSGGGPAPGGTLQLEEEYRLFEPESTQKQEMDIWLKNFPQAWAETGGMGTAHCQAPVLIQLKATATPISIRQYPMPHEAYQGIKPHIRRMLDQGILKPCQSPWNTPLLPVKKPGTEDYRPVQDLREVNKRVEDIHPTVPNPYNLLSTLPPSHPWYTVLDLKDAFFCLRLHSESQLLFAFEWRDPEIGLSGQLTWTRLPQGFKNSPTLFNEALHSDLADFRVRYPALVLLQYVDDLLLAAATRTECLEGTKALLETLGNKGYRASAKKAQICLQEVTYLGYSLKDGQRWLTKARKEAILSIPVPKNSRQVREFLGTAGYCRLWIPGFAELAAPLYPLTRPGTLFQWGTEQQLAFEDIKKALLSSPALGLPDITKPFELFIDENSGFAKGVLVQKLGPWKRPVAYLSKKLDTVASGWPPCLRMVAAIAILVKDAGKLTLGQPLTILTSHPVEALVRQPPNKWLSNARMTHYQAMLLDAERVHFGPTVSLNPATLLPLPSGGNHHDCLQILAETHGTRPDLTDQPLPDADLTWYTDGSSFIRNGEREAGAAVTTESEVIWAAPLPPGTSAQRAELIALTQALKMAEGKKLTVYTDSRYAFATTHVHGEIYRRRGWLTSEGKEIKNKNEILALLEALFLPKRLSIIHCPGHQKGDSPQAKGNRLADDTAKKAATETHSSLTVLPAGKRTADGSEFEKRTADGSEFESPKKKAKVE

SEQ ID NO: 1191 - protein, 2095 aa, synthetic construct
MPAAKRVKLDGGDKKYSIGLDIGTNSVGWAVITDEYKVPSKKFKVLGNTDRHSIKKNLIGALLFDSGETAEATRLKRTARRRYTRRKNRICYLQEIFSNEMAKVDDSFFHRLEESFLVEEDKKHERHPIFGNIVDEVAYHEKYPTIYHLRKKLVDSTDKADLRLIYLALAHMIKFRGHFLIEGDLNPDNSDVDKLFIQLVQTYNQLFEENPINASGVDAKAILSARLSKSRRLENLIAQLPGEKKNGLFGNLIALSLGLTPNFKSNFDLAEDAKLQLSKDTYDDDLDNLLAQIGDQYADLFLAAKNLSDAILLSDILRVNTEITKAPLSASMIKRYDEHHQDLTLLKALVRQQLPEKYKEIFFDQSKNGYAGYIDGGASQEEFYKFIKPILEKMDGTEELLVKLNREDLLRKQRTFDNGSIPHQIHLGELHAILRRQEDFYPFLKDNREKIEKILTFRIPYYVGPLARGNSRFAWMTRKSEETITPWNFEEVVDKGASAQSFIERMTNFDKNLPNEKVLPKHSLLYEYFTVYNELTKVKYVTEGMRKPAFLSGEQKKAIVDLLFKTNRKVTVKQLKEDYFKKIECFDSVEISGVEDRFNASLGTYHDLLKIIKDKDFLDNEENEDILEDIVLTLTLFEDREMIEERLKTYAHLFDDKVMKQLKRRRYTGWGRLSRKLINGIRDKQSGKTILDFLKSDGFANRNFMQLIHDDSLTFKEDIQKAQVSGQGDSLHEHIANLAGSPAIKKGILQTVKVVDELVKVMGRHKPENIVIEMARENQTTQKGQKNSRERMKRIEEGIKELGSQILKEHPVENTQLQNEKLYLYYLQNGRDMYVDQELDINRLSDYDVDHIVPQSFLKDDSIDNKVLTRSDKARGKSDNVPSEEVVKKMKNYWRQLLNAKLITQRKFDNLTKAERGGLSELDKAGFIKRQLVETRQITKHVAQILDSRMNTKYDENDKLIREVKVITLKSKLVSDFRKDFQFYKVREINNYHHAHDAYLNAVVGTALIKKYPKLESEFVYGDYKVYDVRKMIAKSEQEIGKATAKYFFYSNIMNFFKTEITLANGEIRKRPLIETNGETGEIVWDKGRDFATVRKVLSMPQVNIVKKTEVQTGGFSKESILPKRNSDKLIARKKDWDPKKYGGFDSPTVAYSVLVVAKVEKGKSKKLKSVKELLGITIMERSSFEKNPIDFLEAKGYKEVKKDLIIKLPKYSLFELENGRKRMLASAGELQKGNELALPSKYVNFLYLASHYEKLKGSPEDNEQKQLFVEQHKHYLDEIIEQISEFSKRVILADANLDKVLSAYNKHRDKPIREQAENIIHLFTLTNLGAPAAFKYFDTTIDRKRYTSTKEVLDATLIHQSITGLYETRIDLSQLGGDGGGSSPAPEAAAKGGTLQLEEEYRLFEPESTQKQEMDIWLKNFPQAWAETGGMGTAHCQAPVLIQLKATATPISIRQYPMPHEAYQGIKPHIRRMLDQGILKPCQSPWNTPLLPVKKPGTEDYRPVQDLREVNKRVEDIHPTVPNPYNLLSTLPPSHPWYTVLDLKDAFFCLRLHSESQLLFAFEWRDPEIGLSGQLTWTRLPQGFKNSPTLFNEALHSDLADFRVRYPALVLLQYVDDLLLAAATRTECLEGTKALLETLGNKGYRASAKKAQICLQEVTYLGYSLKDGQRWLTKARKEAILSIPVPKNSRQVREFLGTAGYCRLWIPGFAELAAPLYPLTRPGTLFQWGTEQQLAFEDIKKALLSSPALGLPDITKPFELFIDENSGFAKGVLVQKLGPWKRPVAYLSKKLDTVASGWPPCLRMVAAIAILVKDAGKLTLGQPLTILTSHPVEALVRQPPNKWLSNARMTHYQAMLLDAERVHFGPTVSLNPATLLPLPSGGNHHDCLQILAETHGTRPDLTDQPLPDADLTWYTDGSSFIRNGEREAGAAVTTESEVIWAAPLPPGTSAQRAELIALTQALKMAEGKKLTVYTDSRYAFATTHVHGEIYRRRGWLTSEGKEIKNKNEILALLEALFLPKRLSIIHCPGHQKGDSPQAKGNRLADDTAKKAATETHSSLTVLPAGKRTADGSEFEKRTADGSEFESPKKKAKVE

SEQ ID NO: 1192 - protein, 2093 aa, synthetic construct
MPAAKRVKLDGGDKKYSIGLDIGTNSVGWAVITDEYKVPSKKFKVLGNTDRHSIKKNLIGALLFDSGETAEATRLKRTARRRYTRRKNRICYLQEIFSNEMAKVDDSFFHRLEESFLVEEDKKHERHPIFGNIVDEVAYHEKYPTIYHLRKKLVDSTDKADLRLIYLALAHMIKFRGHFLIEGDLNPDNSDVDKLFIQLVQTYNQLFEENPINASGVDAKAILSARLSKSRRLENLIAQLPGEKKNGLFGNLIALSLGLTPNFKSNFDLAEDAKLQLSKDTYDDDLDNLLAQIGDQYADLFLAAKNLSDAILLSDILRVNTEITKAPLSASMIKRYDEHHQDLTLLKALVRQQLPEKYKEIFFDQSKNGYAGYIDGGASQEEFYKFIKPILEKMDGTEELLVKLNREDLLRKQRTFDNGSIPHQIHLGELHAILRRQEDFYPFLKDNREKIEKILTFRIPYYVGPLARGNSRFAWMTRKSEETITPWNFEEVVDKGASAQSFIERMTNFDKNLPNEKVLPKHSLLYEYFTVYNELTKVKYVTEGMRKPAFLSGEQKKAIVDLLFKTNRKVTVKQLKEDYFKKIECFDSVEISGVEDRFNASLGTYHDLLKIIKDKDFLDNEENEDILEDIVLTLTLFEDREMIEERLKTYAHLFDDKVMKQLKRRRYTGWGRLSRKLINGIRDKQSGKTILDFLKSDGFANRNFMQLIHDDSLTFKEDIQKAQVSGQGDSLHEHIANLAGSPAIKKGILQTVKVVDELVKVMGRHKPENIVIEMARENQTTQKGQKNSRERMKRIEEGIKELGSQILKEHPVENTQLQNEKLYLYYLQNGRDMYVDQELDINRLSDYDVDHIVPQSFLKDDSIDNKVLTRSDKARGKSDNVPSEEVVKKMKNYWRQLLNAKLITQRKFDNLTKAERGGLSELDKAGFIKRQLVETRQITKHVAQILDSRMNTKYDENDKLIREVKVITLKSKLVSDFRKDFQFYKVREINNYHHAHDAYLNAVVGTALIKKYPKLESEFVYGDYKVYDVRKMIAKSEQEIGKATAKYFFYSNIMNFFKTEITLANGEIRKRPLIETNGETGEIVWDKGRDFATVRKVLSMPQVNIVKKTEVQTGGFSKESILPKRNSDKLIARKKDWDPKKYGGFDSPTVAYSVLVVAKVEKGKSKKLKSVKELLGITIMERSSFEKNPIDFLEAKGYKEVKKDLIIKLPKYSLFELENGRKRMLASAGELQKGNELALPSKYVNFLYLASHYEKLKGSPEDNEQKQLFVEQHKHYLDEIIEQISEFSKRVILADANLDKVLSAYNKHRDKPIREQAENIIHLFTLTNLGAPAAFKYFDTTIDRKRYTSTKEVLDATLIHQSITGLYETRIDLSQLGGDGGPAPGSSGGGGGTLQLEEEYRLFEPESTQKQEMDIWLKNFPQAWAETGGMGTAHCQAPVLIQLKATATPISIRQYPMPHEAYQGIKPHIRRMLDQGILKPCQSPWNTPLLPVKKPGTEDYRPVQDLREVNKRVEDIHPTVPNPYNLLSTLPPSHPWYTVLDLKDAFFCLRLHSESQLLFAFEWRDPEIGLSGQLTWTRLPQGFKNSPTLFNEALHSDLADFRVRYPALVLLQYVDDLLLAAATRTECLEGTKALLETLGNKGYRASAKKAQICLQEVTYLGYSLKDGQRWLTKARKEAILSIPVPKNSRQVREFLGTAGYCRLWIPGFAELAAPLYPLTRPGTLFQWGTEQQLAFEDIKKALLSSPALGLPDITKPFELFIDENSGFAKGVLVQKLGPWKRPVAYLSKKLDTVASGWPPCLRMVAAIAILVKDAGKLTLGQPLTILTSHPVEALVRQPPNKWLSNARMTHYQAMLLDAERVHFGPTVSLNPATLLPLPSGGNHHDCLQILAETHGTRPDLTDQPLPDADLTWYTDGSSFIRNGEREAGAAVTTESEVIWAAPLPPGTSAQRAELIALTQALKMAEGKKLTVYTDSRYAFATTHVHGEIYRRRGWLTSEGKEIKNKNEILALLEALFLPKRLSIIHCPGHQKGDSPQAKGNRLADDTAKKAATETHSSLTVLPAGKRTADGSEFEKRTADGSEFESPKKKAKVE

SEQ ID NO: 1193 - protein, 2090 aa, synthetic construct
MPAAKRVKLDGGDKKYSIGLDIGTNSVGWAVITDEYKVPSKKFKVLGNTDRHSIKKNLIGALLFDSGETAEATRLKRTARRRYTRRKNRICYLQEIFSNEMAKVDDSFFHRLEESFLVEEDKKHERHPIFGNIVDEVAYHEKYPTIYHLRKKLVDSTDKADLRLIYLALAHMIKFRGHFLIEGDLNPDNSDVDKLFIQLVQTYNQLFEENPINASGVDAKAILSARLSKSRRLENLIAQLPGEKKNGLFGNLIALSLGLTPNFKSNFDLAEDAKLQLSKDTYDDDLDNLLAQIGDQYADLFLAAKNLSDAILLSDILRVNTEITKAPLSASMIKRYDEHHQDLTLLKALVRQQLPEKYKEIFFDQSKNGYAGYIDGGASQEEFYKFIKPILEKMDGTEELLVKLNREDLLRKQRTFDNGSIPHQIHLGELHAILRRQEDFYPFLKDNREKIEKILTFRIPYYVGPLARGNSRFAWMTRKSEETITPWNFEEVVDKGASAQSFIERMTNFDKNLPNEKVLPKHSLLYEYFTVYNELTKVKYVTEGMRKPAFLSGEQKKAIVDLLFKTNRKVTVKQLKEDYFKKIECFDSVEISGVEDRFNASLGTYHDLLKIIKDKDFLDNEENEDILEDIVLTLTLFEDREMIEERLKTYAHLFDDKVMKQLKRRRYTGWGRLSRKLINGIRDKQSGKTILDFLKSDGFANRNFMQLIHDDSLTFKEDIQKAQVSGQGDSLHEHIANLAGSPAIKKGILQTVKVVDELVKVMGRHKPENIVIEMARENQTTQKGQKNSRERMKRIEEGIKELGSQILKEHPVENTQLQNEKLYLYYLQNGRDMYVDQELDINRLSDYDVDHIVPQSFLKDDSIDNKVLTRSDKARGKSDNVPSEEVVKKMKNYWRQLLNAKLITQRKFDNLTKAERGGLSELDKAGFIKRQLVETRQITKHVAQILDSRMNTKYDENDKLIREVKVITLKSKLVSDFRKDFQFYKVREINNYHHAHDAYLNAVVGTALIKKYPKLESEFVYGDYKVYDVRKMIAKSEQEIGKATAKYFFYSNIMNFFKTEITLANGEIRKRPLIETNGETGEIVWDKGRDFATVRKVLSMPQVNIVKKTEVQTGGFSKESILPKRNSDKLIARKKDWDPKKYGGFDSPTVAYSVLVVAKVEKGKSKKLKSVKELLGITIMERSSFEKNPIDFLEAKGYKEVKKDLIIKLPKYSLFELENGRKRMLASAGELQKGNELALPSKYVNFLYLASHYEKLKGSPEDNEQKQLFVEQHKHYLDEIIEQISEFSKRVILADANLDKVLSAYNKHRDKPIREQAENIIHLFTLTNLGAPAAFKYFDTTIDRKRYTSTKEVLDATLIHQSITGLYETRIDLSQLGGDGGGGSGGSGGTLQLEEEYRLFEPESTQKQEMDIWLKNFPQAWAETGGMGTAHCQAPVLIQLKATATPISIRQYPMPHEAYQGIKPHIRRMLDQGILKPCQSPWNTPLLPVKKPGTEDYRPVQDLREVNKRVEDIHPTVPNPYNLLSTLPPSHPWYTVLDLKDAFFCLRLHSESQLLFAFEWRDPEIGLSGQLTWTRLPQGFKNSPTLFNEALHSDLADFRVRYPALVLLQYVDDLLLAAATRTECLEGTKALLETLGNKGYRASAKKAQICLQEVTYLGYSLKDGQRWLTKARKEAILSIPVPKNSRQVREFLGTAGYCRLWIPGFAELAAPLYPLTRPGTLFQWGTEQQLAFEDIKKALLSSPALGLPDITKPFELFIDENSGFAKGVLVQKLGPWKRPVAYLSKKLDTVASGWPPCLRMVAAIAILVKDAGKLTLGQPLTILTSHPVEALVRQPPNKWLSNARMTHYQAMLLDAERVHFGPTVSLNPATLLPLPSGGNHHDCLQILAETHGTRPDLTDQPLPDADLTWYTDGSSFIRNGEREAGAAVTTESEVIWAAPLPPGTSAQRAELIALTQALKMAEGKKLTVYTDSRYAFATTHVHGEIYRRRGWLTSEGKEIKNKNEILALLEALFLPKRLSIIHCPGHQKGDSPQAKGNRLADDTAKKAATETHSSLTVLPAGKRTADGSEFEKRTADGSEFESPKKKAKVE

SEQ ID NO: 1194 - protein, 2093 aa, synthetic construct
MPAAKRVKLDGGDKKYSIGLDIGTNSVGWAVITDEYKVPSKKFKVLGNTDRHSIKKNLIGALLFDSGETAEATRLKRTARRRYTRRKNRICYLQEIFSNEMAKVDDSFFHRLEESFLVEEDKKHERHPIFGNIVDEVAYHEKYPTIYHLRKKLVDSTDKADLRLIYLALAHMIKFRGHFLIEGDLNPDNSDVDKLFIQLVQTYNQLFEENPINASGVDAKAILSARLSKSRRLENLIAQLPGEKKNGLFGNLIALSLGLTPNFKSNFDLAEDAKLQLSKDTYDDDLDNLLAQIGDQYADLFLAAKNLSDAILLSDILRVNTEITKAPLSASMIKRYDEHHQDLTLLKALVRQQLPEKYKEIFFDQSKNGYAGYIDGGASQEEFYKFIKPILEKMDGTEELLVKLNREDLLRKQRTFDNGSIPHQIHLGELHAILRRQEDFYPFLKDNREKIEKILTFRIPYYVGPLARGNSRFAWMTRKSEETITPWNFEEVVDKGASAQSFIERMTNFDKNLPNEKVLPKHSLLYEYFTVYNELTKVKYVTEGMRKPAFLSGEQKKAIVDLLFKTNRKVTVKQLKEDYFKKIECFDSVEISGVEDRFNASLGTYHDLLKIIKDKDFLDNEENEDILEDIVLTLTLFEDREMIEERLKTYAHLFDDKVMKQLKRRRYTGWGRLSRKLINGIRDKQSGKTILDFLKSDGFANRNFMQLIHDDSLTFKEDIQKAQVSGQGDSLHEHIANLAGSPAIKKGILQTVKVVDELVKVMGRHKPENIVIEMARENQTTQKGQKNSRERMKRIEEGIKELGSQILKEHPVENTQLQNEKLYLYYLQNGRDMYVDQELDINRLSDYDVDHIVPQSFLKDDSIDNKVLTRSDKARGKSDNVPSEEVVKKMKNYWRQLLNAKLITQRKFDNLTKAERGGLSELDKAGFIKRQLVETRQITKHVAQILDSRMNTKYDENDKLIREVKVITLKSKLVSDFRKDFQFYKVREINNYHHAHDAYLNAVVGTALIKKYPKLESEFVYGDYKVYDVRKMIAKSEQEIGKATAKYFFYSNIMNFFKTEITLANGEIRKRPLIETNGETGEIVWDKGRDFATVRKVLSMPQVNIVKKTEVQTGGFSKESILPKRNSDKLIARKKDWDPKKYGGFDSPTVAYSVLVVAKVEKGKSKKLKSVKELLGITIMERSSFEKNPIDFLEAKGYKEVKKDLIIKLPKYSLFELENGRKRMLASAGELQKGNELALPSKYVNFLYLASHYEKLKGSPEDNEQKQLFVEQHKHYLDEIIEQISEFSKRVILADANLDKVLSAYNKHRDKPIREQAENIIHLFTLTNLGAPAAFKYFDTTIDRKRYTSTKEVLDATLIHQSITGLYETRIDLSQLGGDGGGGSPAPGGGGGTLQLEEEYRLFEPESTQKQEMDIWLKNFPQAWAETGGMGTAHCQAPVLIQLKATATPISIRQYPMPHEAYQGIKPHIRRMLDQGILKPCQSPWNTPLLPVKKPGTEDYRPVQDLREVNKRVEDIHPTVPNPYNLLSTLPPSHPWYTVLDLKDAFFCLRLHSESQLLFAFEWRDPEIGLSGQLTWTRLPQGFKNSPTLFNEALHSDLADFRVRYPALVLLQYVDDLLLAAATRTECLEGTKALLETLGNKGYRASAKKAQICLQEVTYLGYSLKDGQRWLTKARKEAILSIPVPKNSRQVREFLGTAGYCRLWIPGFAELAAPLYPLTRPGTLFQWGTEQQLAFEDIKKALLSSPALGLPDITKPFELFIDENSGFAKGVLVQKLGPWKRPVAYLSKKLDTVASGWPPCLRMVAAIAILVKDAGKLTLGQPLTILTSHPVEALVRQPPNKWLSNARMTHYQAMLLDAERVHFGPTVSLNPATLLPLPSGGNHHDCLQILAETHGTRPDLTDQPLPDADLTWYTDGSSFIRNGEREAGAAVTTESEVIWAAPLPPGTSAQRAELIALTQALKMAEGKKLTVYTDSRYAFATTHVHGEIYRRRGWLTSEGKEIKNKNEILALLEALFLPKRLSIIHCPGHQKGDSPQAKGNRLADDTAKKAATETHSSLTVLPAGKRTADGSEFEKRTADGSEFESPKKKAKVE

SEQ ID NO: 1195 - protein, 2089 aa, synthetic construct
MPAAKRVKLDGGDKKYSIGLDIGTNSVGWAVITDEYKVPSKKFKVLGNTDRHSIKKNLIGALLFDSGETAEATRLKRTARRRYTRRKNRICYLQEIFSNEMAKVDDSFFHRLEESFLVEEDKKHERHPIFGNIVDEVAYHEKYPTIYHLRKKLVDSTDKADLRLIYLALAHMIKFRGHFLIEGDLNPDNSDVDKLFIQLVQTYNQLFEENPINASGVDAKAILSARLSKSRRLENLIAQLPGEKKNGLFGNLIALSLGLTPNFKSNFDLAEDAKLQLSKDTYDDDLDNLLAQIGDQYADLFLAAKNLSDAILLSDILRVNTEITKAPLSASMIKRYDEHHQDLTLLKALVRQQLPEKYKEIFFDQSKNGYAGYIDGGASQEEFYKFIKPILEKMDGTEELLVKLNREDLLRKQRTFDNGSIPHQIHLGELHAILRRQEDFYPFLKDNREKIEKILTFRIPYYVGPLARGNSRFAWMTRKSEETITPWNFEEVVDKGASAQSFIERMTNFDKNLPNEKVLPKHSLLYEYFTVYNELTKVKYVTEGMRKPAFLSGEQKKAIVDLLFKTNRKVTVKQLKEDYFKKIECFDSVEISGVEDRFNASLGTYHDLLKIIKDKDFLDNEENEDILEDIVLTLTLFEDREMIEERLKTYAHLFDDKVMKQLKRRRYTGWGRLSRKLINGIRDKQSGKTILDFLKSDGFANRNFMQLIHDDSLTFKEDIQKAQVSGQGDSLHEHIANLAGSPAIKKGILQTVKVVDELVKVMGRHKPENIVIEMARENQTTQKGQKNSRERMKRIEEGIKELGSQILKEHPVENTQLQNEKLYLYYLQNGRDMYVDQELDINRLSDYDVDHIVPQSFLKDDSIDNKVLTRSDKARGKSDNVPSEEVVKKMKNYWRQLLNAKLITQRKFDNLTKAERGGLSELDKAGFIKRQLVETRQITKHVAQILDSRMNTKYDENDKLIREVKVITLKSKLVSDFRKDFQFYKVREINNYHHAHDAYLNAVVGTALIKKYPKLESEFVYGDYKVYDVRKMIAKSEQEIGKATAKYFFYSNIMNFFKTEITLANGEIRKRPLIETNGETGEIVWDKGRDFATVRKVLSMPQVNIVKKTEVQTGGFSKESILPKRNSDKLIARKKDWDPKKYGGFDSPTVAYSVLVVAKVEKGKSKKLKSVKELLGITIMERSSFEKNPIDFLEAKGYKEVKKDLIIKLPKYSLFELENGRKRMLASAGELQKGNELALPSKYVNFLYLASHYEKLKGSPEDNEQKQLFVEQHKHYLDEIIEQISEFSKRVILADANLDKVLSAYNKHRDKPIREQAENIIHLFTLTNLGAPAAFKYFDTTIDRKRYTSTKEVLDATLIHQSITGLYETRIDLSQLGGDGGGGGGGGGTLQLEEEYRLFEPESTQKQEMDIWLKNFPQAWAETGGMGTAHCQAPVLIQLKATATPISIRQYPMPHEAYQGIKPHIRRMLDQGILKPCQSPWNTPLLPVKKPGTEDYRPVQDLREVNKRVEDIHPTVPNPYNLLSTLPPSHPWYTVLDLKDAFFCLRLHSESQLLFAFEWRDPEIGLSGQLTWTRLPQGFKNSPTLFNEALHSDLADFRVRYPALVLLQYVDDLLLAAATRTECLEGTKALLETLGNKGYRASAKKAQICLQEVTYLGYSLKDGQRWLTKARKEAILSIPVPKNSRQVREFLGTAGYCRLWIPGFAELAAPLYPLTRPGTLFQWGTEQQLAFEDIKKALLSSPALGLPDITKPFELFIDENSGFAKGVLVQKLGPWKRPVAYLSKKLDTVASGWPPCLRMVAAIAILVKDAGKLTLGQPLTILTSHPVEALVRQPPNKWLSNARMTHYQAMLLDAERVHFGPTVSLNPATLLPLPSGGNHHDCLQILAETHGTRPDLTDQPLPDADLTWYTDGSSFIRNGEREAGAAVTTESEVIWAAPLPPGTSAQRAELIALTQALKMAEGKKLTVYTDSRYAFATTHVHGEIYRRRGWLTSEGKEIKNKNEILALLEALFLPKRLSIIHCPGHQKGDSPQAKGNRLADDTAKKAATETHSSLTVLPAGKRTADGSEFEKRTADGSEFESPKKKAKVE

SEQ ID NO: 1196 - protein, 2093 aa, synthetic construct
MPAAKRVKLDGGDKKYSIGLDIGTNSVGWAVITDEYKVPSKKFKVLGNTDRHSIKKNLIGALLFDSGETAEATRLKRTARRRYTRRKNRICYLQEIFSNEMAKVDDSFFHRLEESFLVEEDKKHERHPIFGNIVDEVAYHEKYPTIYHLRKKLVDSTDKADLRLIYLALAHMIKFRGHFLIEGDLNPDNSDVDKLFIQLVQTYNQLFEENPINASGVDAKAILSARLSKSRRLENLIAQLPGEKKNGLFGNLIALSLGLTPNFKSNFDLAEDAKLQLSKDTYDDDLDNLLAQIGDQYADLFLAAKNLSDAILLSDILRVNTEITKAPLSASMIKRYDEHHQDLTLLKALVRQQLPEKYKEIFFDQSKNGYAGYIDGGASQEEFYKFIKPILEKMDGTEELLVKLNREDLLRKQRTFDNGSIPHQIHLGELHAILRRQEDFYPFLKDNREKIEKILTFRIPYYVGPLARGNSRFAWMTRKSEETITPWNFEEVVDKGASAQSFIERMTNFDKNLPNEKVLPKHSLLYEYFTVYNELTKVKYVTEGMRKPAFLSGEQKKAIVDLLFKTNRKVTVKQLKEDYFKKIECFDSVEISGVEDRFNASLGTYHDLLKIIKDKDFLDNEENEDILEDIVLTLTLFEDREMIEERLKTYAHLFDDKVMKQLKRRRYTGWGRLSRKLINGIRDKQSGKTILDFLKSDGFANRNFMQLIHDDSLTFKEDIQKAQVSGQGDSLHEHIANLAGSPAIKKGILQTVKVVDELVKVMGRHKPENIVIEMARENQTTQKGQKNSRERMKRIEEGIKELGSQILKEHPVENTQLQNEKLYLYYLQNGRDMYVDQELDINRLSDYDVDHIVPQSFLKDDSIDNKVLTRSDKARGKSDNVPSEEVVKKMKNYWRQLLNAKLITQRKFDNLTKAERGGLSELDKAGFIKRQLVETRQITKHVAQILDSRMNTKYDENDKLIREVKVITLKSKLVSDFRKDFQFYKVREINNYHHAHDAYLNAVVGTALIKKYPKLESEFVYGDYKVYDVRKMIAKSEQEIGKATAKYFFYSNIMNFFKTEITLANGEIRKRPLIETNGETGEIVWDKGRDFATVRKVLSMPQVNIVKKTEVQTGGFSKESILPKRNSDKLIARKKDWDPKKYGGFDSPTVAYSVLVVAKVEKGKSKKLKSVKELLGITIMERSSFEKNPIDFLEAKGYKEVKKDLIIKLPKYSLFELENGRKRMLASAGELQKGNELALPSKYVNFLYLASHYEKLKGSPEDNEQKQLFVEQHKHYLDEIIEQISEFSKRVILADANLDKVLSAYNKHRDKPIREQAENIIHLFTLTNLGAPAAFKYFDTTIDRKRYTSTKEVLDATLIHQSITGLYETRIDLSQLGGDGGPAPGGSGGGGGTLQLEEEYRLFEPESTQKQEMDIWLKNFPQAWAETGGMGTAHCQAPVLIQLKATATPISIRQYPMPHEAYQGIKPHIRRMLDQGILKPCQSPWNTPLLPVKKPGTEDYRPVQDLREVNKRVEDIHPTVPNPYNLLSTLPPSHPWYTVLDLKDAFFCLRLHSESQLLFAFEWRDPEIGLSGQLTWTRLPQGFKNSPTLFNEALHSDLADFRVRYPALVLLQYVDDLLLAAATRTECLEGTKALLETLGNKGYRASAKKAQICLQEVTYLGYSLKDGQRWLTKARKEAILSIPVPKNSRQVREFLGTAGYCRLWIPGFAELAAPLYPLTRPGTLFQWGTEQQLAFEDIKKALLSSPALGLPDITKPFELFIDENSGFAKGVLVQKLGPWKRPVAYLSKKLDTVASGWPPCLRMVAAIAILVKDAGKLTLGQPLTILTSHPVEALVRQPPNKWLSNARMTHYQAMLLDAERVHFGPTVSLNPATLLPLPSGGNHHDCLQILAETHGTRPDLTDQPLPDADLTWYTDGSSFIRNGEREAGAAVTTESEVIWAAPLPPGTSAQRAELIALTQALKMAEGKKLTVYTDSRYAFATTHVHGEIYRRRGWLTSEGKEIKNKNEILALLEALFLPKRLSIIHCPGHQKGDSPQAKGNRLADDTAKKAATETHSSLTVLPAGKRTADGSEFEKRTADGSEFESPKKKAKVE

SEQ ID NO: 1197 - protein, 2130 aa, synthetic construct
MPAAKRVKLDGGDKKYSIGLDIGTNSVGWAVITDEYKVPSKKFKVLGNTDRHSIKKNLIGALLFDSGETAEATRLKRTARRRYTRRKNRICYLQEIFSNEMAKVDDSFFHRLEESFLVEEDKKHERHPIFGNIVDEVAYHEKYPTIYHLRKKLVDSTDKADLRLIYLALAHMIKFRGHFLIEGDLNPDNSDVDKLFIQLVQTYNQLFEENPINASGVDAKAILSARLSKSRRLENLIAQLPGEKKNGLFGNLIALSLGLTPNFKSNFDLAEDAKLQLSKDTYDDDLDNLLAQIGDQYADLFLAAKNLSDAILLSDILRVNTEITKAPLSASMIKRYDEHHQDLTLLKALVRQQLPEKYKEIFFDQSKNGYAGYIDGGASQEEFYKFIKPILEKMDGTEELLVKLNREDLLRKQRTFDNGSIPHQIHLGELHAILRRQEDFYPFLKDNREKIEKILTFRIPYYVGPLARGNSRFAWMTRKSEETITPWNFEEVVDKGASAQSFIERMTNFDKNLPNEKVLPKHSLLYEYFTVYNELTKVKYVTEGMRKPAFLSGEQKKAIVDLLFKTNRKVTVKQLKEDYFKKIECFDSVEISGVEDRFNASLGTYHDLLKIIKDKDFLDNEENEDILEDIVLTLTLFEDREMIEERLKTYAHLFDDKVMKQLKRRRYTGWGRLSRKLINGIRDKQSGKTILDFLKSDGFANRNFMQLIHDDSLTFKEDIQKAQVSGQGDSLHEHIANLAGSPAIKKGILQTVKVVDELVKVMGRHKPENIVIEMARENQTTQKGQKNSRERMKRIEEGIKELGSQILKEHPVENTQLQNEKLYLYYLQNGRDMYVDQELDINRLSDYDVDHIVPQSFLKDDSIDNKVLTRSDKARGKSDNVPSEEVVKKMKNYWRQLLNAKLITQRKFDNLTKAERGGLSELDKAGFIKRQLVETRQITKHVAQILDSRMNTKYDENDKLIREVKVITLKSKLVSDFRKDFQFYKVREINNYHHAHDAYLNAVVGTALIKKYPKLESEFVYGDYKVYDVRKMIAKSEQEIGKATAKYFFYSNIMNFFKTEITLANGEIRKRPLIETNGETGEIVWDKGRDFATVRKVLSMPQVNIVKKTEVQTGGFSKESILPKRNSDKLIARKKDWDPKKYGGFDSPTVAYSVLVVAKVEKGKSKKLKSVKELLGITIMERSSFEKNPIDFLEAKGYKEVKKDLIIKLPKYSLFELENGRKRMLASAGELQKGNELALPSKYVNFLYLASHYEKLKGSPEDNEQKQLFVEQHKHYLDEIIEQISEFSKRVILADANLDKVLSAYNKHRDKPIREQAENIIHLFTLTNLGAPAAFKYFDTTIDRKRYTSTKEVLDATLIHQSITGLYETRIDLSQLGGDGGAEAAAKEAAAKEAAAKEAAAKALEAEAAAKEAAAKEAAAKEAAAKAGGTLQLEEEYRLFEPESTQKQEMDIWLKNFPQAWAETGGMGTAHCQAPVLIQLKATATPISIRQYPMPHEAYQGIKPHIRRMLDQGILKPCQSPWNTPLLPVKKPGTEDYRPVQDLREVNKRVEDIHPTVPNPYNLLSTLPPSHPWYTVLDLKDAFFCLRLHSESQLLFAFEWRDPEIGLSGQLTWTRLPQGFKNSPTLFNEALHSDLADFRVRYPALVLLQYVDDLLLAAATRTECLEGTKALLETLGNKGYRASAKKAQICLQEVTYLGYSLKDGQRWLTKARKEAILSIPVPKNSRQVREFLGKAGYCRLFIPGFAELAAPLYPLTRPGTLFQWGTEQQLAFEDIKKALLSSPALGLPDITKPFELFIDENSGFAKGVLVQKLGPWKRPVAYLSKKLDTVASGWPPCLRMVAAIAILVKDAGKLTLGQPLTILTSHPVEALVRQPPNKWLSNARMTHYQAMLLDAERVHFGPTVSLNPATLLPLPSGGNHHDCLQILAETHGTRPDLTDQPLPDADLTWYTDGSSFIRNGEREAGAAVTTESEVIWAAPLPPGTSAQRAELIALTQALKMAEGKKLTVYTDSRYAFATTHVHGEIYRRRGWLTSEGKEIKNKNEILALLEALFLPKRLSIIHCPGHQKGDSPQAKGNRLADDTAKKAATETHSSLTVLPAGKRTADGSEFEKRTADGSEFESPKKKAKVE

SEQ ID NO: 1198 - protein, 2104 aa, synthetic construct
MPAAKRVKLDGGDKKYSIGLDIGTNSVGWAVITDEYKVPSKKFKVLGNTDRHSIKKNLIGALLFDSGETAEATRLKRTARRRYTRRKNRICYLQEIFSNEMAKVDDSFFHRLEESFLVEEDKKHERHPIFGNIVDEVAYHEKYPTIYHLRKKLVDSTDKADLRLIYLALAHMIKFRGHFLIEGDLNPDNSDVDKLFIQLVQTYNQLFEENPINASGVDAKAILSARLSKSRRLENLIAQLPGEKKNGLFGNLIALSLGLTPNFKSNFDLAEDAKLQLSKDTYDDDLDNLLAQIGDQYADLFLAAKNLSDAILLSDILRVNTEITKAPLSASMIKRYDEHHQDLTLLKALVRQQLPEKYKEIFFDQSKNGYAGYIDGGASQEEFYKFIKPILEKMDGTEELLVKLNREDLLRKQRTFDNGSIPHQIHLGELHAILRRQEDFYPFLKDNREKIEKILTFRIPYYVGPLARGNSRFAWMTRKSEETITPWNFEEVVDKGASAQSFIERMTNFDKNLPNEKVLPKHSLLYEYFTVYNELTKVKYVTEGMRKPAFLSGEQKKAIVDLLFKTNRKVTVKQLKEDYFKKIECFDSVEISGVEDRFNASLGTYHDLLKIIKDKDFLDNEENEDILEDIVLTLTLFEDREMIEERLKTYAHLFDDKVMKQLKRRRYTGWGRLSRKLINGIRDKQSGKTILDFLKSDGFANRNFMQLIHDDSLTFKEDIQKAQVSGQGDSLHEHIANLAGSPAIKKGILQTVKVVDELVKVMGRHKPENIVIEMARENQTTQKGQKNSRERMKRIEEGIKELGSQILKEHPVENTQLQNEKLYLYYLQNGRDMYVDQELDINRLSDYDVDHIVPQSFLKDDSIDNKVLTRSDKARGKSDNVPSEEVVKKMKNYWRQLLNAKLITQRKFDNLTKAERGGLSELDKAGFIKRQLVETRQITKHVAQILDSRMNTKYDENDKLIREVKVITLKSKLVSDFRKDFQFYKVREINNYHHAHDAYLNAVVGTALIKKYPKLESEFVYGDYKVYDVRKMIAKSEQEIGKATAKYFFYSNIMNFFKTEITLANGEIRKRPLIETNGETGEIVWDKGRDFATVRKVLSMPQVNIVKKTEVQTGGFSKESILPKRNSDKLIARKKDWDPKKYGGFDSPTVAYSVLVVAKVEKGKSKKLKSVKELLGITIMERSSFEKNPIDFLEAKGYKEVKKDLIIKLPKYSLFELENGRKRMLASAGELQKGNELALPSKYVNFLYLASHYEKLKGSPEDNEQKQLFVEQHKHYLDEIIEQISEFSKRVILADANLDKVLSAYNKHRDKPIREQAENIIHLFTLTNLGAPAAFKYFDTTIDRKRYTSTKEVLDATLIHQSITGLYETRIDLSQLGGDGGEAAAKEAAAKEAAAKEAAAKGGTLQLEEEYRLFEPESTQKQEMDIWLKNFPQAWAETGGMGTAHCQAPVLIQLKATATPISIRQYPMPHEAYQGIKPHIRRMLDQGILKPCQSPWNTPLLPVKKPGTEDYRPVQDLREVNKRVEDIHPTVPNPYNLLSTLPPSHPWYTVLDLKDAFFCLRLHSESQLLFAFEWRDPEIGLSGQLTWTRLPQGFKNSPTLFNEALHSDLADFRVRYPALVLLQYVDDLLLAAATRTECLEGTKALLETLGNKGYRASAKKAQICLQEVTYLGYSLKDGQRWLTKARKEAILSIPVPKNSRQVREFLGKAGYCRLFIPGFAELAAPLYPLTRPGTLFQWGTEQQLAFEDIKKALLSSPALGLPDITKPFELFIDENSGFAKGVLVQKLGPWKRPVAYLSKKLDTVASGWPPCLRMVAAIAILVKDAGKLTLGQPLTILTSHPVEALVRQPPNKWLSNARMTHYQAMLLDAERVHFGPTVSLNPATLLPLPSGGNHHDCLQILAETHGTRPDLTDQPLPDADLTWYTDGSSFIRNGEREAGAAVTTESEVIWAAPLPPGTSAQRAELIALTQALKMAEGKKLTVYTDSRYAFATTHVHGEIYRRRGWLTSEGKEIKNKNEILALLEALFLPKRLSIIHCPGHQKGDSPQAKGNRLADDTAKKAATETHSSLTVLPAGKRTADGSEFEKRTADGSEFESPKKKAKVE

SEQ ID NO: 1199 - protein, 2114 aa, synthetic construct
MPAAKRVKLDGGDKKYSIGLDIGTNSVGWAVITDEYKVPSKKFKVLGNTDRHSIKKNLIGALLFDSGETAEATRLKRTARRRYTRRKNRICYLQEIFSNEMAKVDDSFFHRLEESFLVEEDKKHERHPIFGNIVDEVAYHEKYPTIYHLRKKLVDSTDKADLRLIYLALAHMIKFRGHFLIEGDLNPDNSDVDKLFIQLVQTYNQLFEENPINASGVDAKAILSARLSKSRRLENLIAQLPGEKKNGLFGNLIALSLGLTPNFKSNFDLAEDAKLQLSKDTYDDDLDNLLAQIGDQYADLFLAAKNLSDAILLSDILRVNTEITKAPLSASMIKRYDEHHQDLTLLKALVRQQLPEKYKEIFFDQSKNGYAGYIDGGASQEEFYKFIKPILEKMDGTEELLVKLNREDLLRKQRTFDNGSIPHQIHLGELHAILRRQEDFYPFLKDNREKIEKILTFRIPYYVGPLARGNSRFAWMTRKSEETITPWNFEEVVDKGASAQSFIERMTNFDKNLPNEKVLPKHSLLYEYFTVYNELTKVKYVTEGMRKPAFLSGEQKKAIVDLLFKTNRKVTVKQLKEDYFKKIECFDSVEISGVEDRFNASLGTYHDLLKIIKDKDFLDNEENEDILEDIVLTLTLFEDREMIEERLKTYAHLFDDKVMKQLKRRRYTGWGRLSRKLINGIRDKQSGKTILDFLKSDGFANRNFMQLIHDDSLTFKEDIQKAQVSGQGDSLHEHIANLAGSPAIKKGILQTVKVVDELVKVMGRHKPENIVIEMARENQTTQKGQKNSRERMKRIEEGIKELGSQILKEHPVENTQLQNEKLYLYYLQNGRDMYVDQELDINRLSDYDVDHIVPQSFLKDDSIDNKVLTRSDKARGKSDNVPSEEVVKKMKNYWRQLLNAKLITQRKFDNLTKAERGGLSELDKAGFIKRQLVETRQITKHVAQILDSRMNTKYDENDKLIREVKVITLKSKLVSDFRKDFQFYKVREINNYHHAHDAYLNAVVGTALIKKYPKLESEFVYGDYKVYDVRKMIAKSEQEIGKATAKYFFYSNIMNFFKTEITLANGEIRKRPLIETNGETGEIVWDKGRDFATVRKVLSMPQVNIVKKTEVQTGGFSKESILPKRNSDKLIARKKDWDPKKYGGFDSPTVAYSVLVVAKVEKGKSKKLKSVKELLGITIMERSSFEKNPIDFLEAKGYKEVKKDLIIKLPKYSLFELENGRKRMLASAGELQKGNELALPSKYVNFLYLASHYEKLKGSPEDNEQKQLFVEQHKHYLDEIIEQISEFSKRVILADANLDKVLSAYNKHRDKPIREQAENIIHLFTLTNLGAPAAFKYFDTTIDRKRYTSTKEVLDATLIHQSITGLYETRIDLSQLGGDGGEAAAKEAAAKEAAAKEAAAKEAAAKEAAAKGGTLQLEEEYRLFEPESTQKQEMDIWLKNFPQAWAETGGMGTAHCQAPVLIQLKATATPISIRQYPMPHEAYQGIKPHIRRMLDQGILKPCQSPWNTPLLPVKKPGTEDYRPVQDLREVNKRVEDIHPTVPNPYNLLSTLPPSHPWYTVLDLKDAFFCLRLHSESQLLFAFEWRDPEIGLSGQLTWTRLPQGFKNSPTLFNEALHSDLADFRVRYPALVLLQYVDDLLLAAATRTECLEGTKALLETLGNKGYRASAKKAQICLQEVTYLGYSLKDGQRWLTKARKEAILSIPVPKNSRQVREFLGKAGYCRLFIPGFAELAAPLYPLTRPGTLFQWGTEQQLAFEDIKKALLSSPALGLPDITKPFELFIDENSGFAKGVLVQKLGPWKRPVAYLSKKLDTVASGWPPCLRMVAAIAILVKDAGKLTLGQPLTILTSHPVEALVRQPPNKWLSNARMTHYQAMLLDAERVHFGPTVSLNPATLLPLPSGGNHHDCLQILAETHGTRPDLTDQPLPDADLTWYTDGSSFIRNGEREAGAAVTTESEVIWAAPLPPGTSAQRAELIALTQALKMAEGKKLTVYTDSRYAFATTHVHGEIYRRRGWLTSEGKEIKNKNEILALLEALFLPKRLSIIHCPGHQKGDSPQAKGNRLADDTAKKAATETHSSLTVLPAGKRTADGSEFEKRTADGSEFESPKKKAKVE

SEQ ID NO: 1200 - protein, 2095 aa, synthetic construct
MPAAKRVKLDGGDKKYSIGLDIGTNSVGWAVITDEYKVPSKKFKVLGNTDRHSIKKNLIGALLFDSGETAEATRLKRTARRRYTRRKNRICYLQEIFSNEMAKVDDSFFHRLEESFLVEEDKKHERHPIFGNIVDEVAYHEKYPTIYHLRKKLVDSTDKADLRLIYLALAHMIKFRGHFLIEGDLNPDNSDVDKLFIQLVQTYNQLFEENPINASGVDAKAILSARLSKSRRLENLIAQLPGEKKNGLFGNLIALSLGLTPNFKSNFDLAEDAKLQLSKDTYDDDLDNLLAQIGDQYADLFLAAKNLSDAILLSDILRVNTEITKAPLSASMIKRYDEHHQDLTLLKALVRQQLPEKYKEIFFDQSKNGYAGYIDGGASQEEFYKFIKPILEKMDGTEELLVKLNREDLLRKQRTFDNGSIPHQIHLGELHAILRRQEDFYPFLKDNREKIEKILTFRIPYYVGPLARGNSRFAWMTRKSEETITPWNFEEVVDKGASAQSFIERMTNFDKNLPNEKVLPKHSLLYEYFTVYNELTKVKYVTEGMRKPAFLSGEQKKAIVDLLFKTNRKVTVKQLKEDYFKKIECFDSVEISGVEDRFNASLGTYHDLLKIIKDKDFLDNEENEDILEDIVLTLTLFEDREMIEERLKTYAHLFDDKVMKQLKRRRYTGWGRLSRKLINGIRDKQSGKTILDFLKSDGFANRNFMQLIHDDSLTFKEDIQKAQVSGQGDSLHEHIANLAGSPAIKKGILQTVKVVDELVKVMGRHKPENIVIEMARENQTTQKGQKNSRERMKRIEEGIKELGSQILKEHPVENTQLQNEKLYLYYLQNGRDMYVDQELDINRLSDYDVDHIVPQSFLKDDSIDNKVLTRSDKARGKSDNVPSEEVVKKMKNYWRQLLNAKLITQRKFDNLTKAERGGLSELDKAGFIKRQLVETRQITKHVAQILDSRMNTKYDENDKLIREVKVITLKSKLVSDFRKDFQFYKVREINNYHHAHDAYLNAVVGTALIKKYPKLESEFVYGDYKVYDVRKMIAKSEQEIGKATAKYFFYSNIMNFFKTEITLANGEIRKRPLIETNGETGEIVWDKGRDFATVRKVLSMPQVNIVKKTEVQTGGFSKESILPKRNSDKLIARKKDWDPKKYGGFDSPTVAYSVLVVAKVEKGKSKKLKSVKELLGITIMERSSFEKNPIDFLEAKGYKEVKKDLIIKLPKYSLFELENGRKRMLASAGELQKGNELALPSKYVNFLYLASHYEKLKGSPEDNEQKQLFVEQHKHYLDEIIEQISEFSKRVILADANLDKVLSAYNKHRDKPIREQAENIIHLFTLTNLGAPAAFKYFDTTIDRKRYTSTKEVLDATLIHQSITGLYETRIDLSQLGGDGGPAPEAAAKGGGGGTLQLEEEYRLFEPESTQKQEMDIWLKNFPQAWAETGGMGTAHCQAPVLIQLKATATPISIRQYPMPHEAYQGIKPHIRRMLDQGILKPCQSPWNTPLLPVKKPGTEDYRPVQDLREVNKRVEDIHPTVPNPYNLLSTLPPSHPWYTVLDLKDAFFCLRLHSESQLLFAFEWRDPEIGLSGQLTWTRLPQGFKNSPTLFNEALHSDLADFRVRYPALVLLQYVDDLLLAAATRTECLEGTKALLETLGNKGYRASAKKAQICLQEVTYLGYSLKDGQRWLTKARKEAILSIPVPKNSRQVREFLGKAGYCRLFIPGFAELAAPLYPLTRPGTLFQWGTEQQLAFEDIKKALLSSPALGLPDITKPFELFIDENSGFAKGVLVQKLGPWKRPVAYLSKKLDTVASGWPPCLRMVAAIAILVKDAGKLTLGQPLTILTSHPVEALVRQPPNKWLSNARMTHYQAMLLDAERVHFGPTVSLNPATLLPLPSGGNHHDCLQILAETHGTRPDLTDQPLPDADLTWYTDGSSFIRNGEREAGAAVTTESEVIWAAPLPPGTSAQRAELIALTQALKMAEGKKLTVYTDSRYAFATTHVHGEIYRRRGWLTSEGKEIKNKNEILALLEALFLPKRLSIIHCPGHQKGDSPQAKGNRLADDTAKKAATETHSSLTVLPAGKRTADGSEFEKRTADGSEFESPKKKAKVE

SEQ ID NO: 1201 - protein, 2095 aa, synthetic construct
MPAAKRVKLDGGDKKYSIGLDIGTNSVGWAVITDEYKVPSKKFKVLGNTDRHSIKKNLIGALLFDSGETAEATRLKRTARRRYTRRKNRICYLQEIFSNEMAKVDDSFFHRLEESFLVEEDKKHERHPIFGNIVDEVAYHEKYPTIYHLRKKLVDSTDKADLRLIYLALAHMIKFRGHFLIEGDLNPDNSDVDKLFIQLVQTYNQLFEENPINASGVDAKAILSARLSKSRRLENLIAQLPGEKKNGLFGNLIALSLGLTPNFKSNFDLAEDAKLQLSKDTYDDDLDNLLAQIGDQYADLFLAAKNLSDAILLSDILRVNTEITKAPLSASMIKRYDEHHQDLTLLKALVRQQLPEKYKEIFFDQSKNGYAGYIDGGASQEEFYKFIKPILEKMDGTEELLVKLNREDLLRKQRTFDNGSIPHQIHLGELHAILRRQEDFYPFLKDNREKIEKILTFRIPYYVGPLARGNSRFAWMTRKSEETITPWNFEEVVDKGASAQSFIERMTNFDKNLPNEKVLPKHSLLYEYFTVYNELTKVKYVTEGMRKPAFLSGEQKKAIVDLLFKTNRKVTVKQLKEDYFKKIECFDSVEISGVEDRFNASLGTYHDLLKIIKDKDFLDNEENEDILEDIVLTLTLFEDREMIEERLKTYAHLFDDKVMKQLKRRRYTGWGRLSRKLINGIRDKQSGKTILDFLKSDGFANRNFMQLIHDDSLTFKEDIQKAQVSGQGDSLHEHIANLAGSPAIKKGILQTVKVVDELVKVMGRHKPENIVIEMARENQTTQKGQKNSRERMKRIEEGIKELGSQILKEHPVENTQLQNEKLYLYYLQNGRDMYVDQELDINRLSDYDVDHIVPQSFLKDDSIDNKVLTRSDKARGKSDNVPSEEVVKKMKNYWRQLLNAKLITQRKFDNLTKAERGGLSELDKAGFIKRQLVETRQITKHVAQILDSRMNTKYDENDKLIREVKVITLKSKLVSDFRKDFQFYKVREINNYHHAHDAYLNAVVGTALIKKYPKLESEFVYGDYKVYDVRKMIAKSEQEIGKATAKYFFYSNIMNFFKTEITLANGEIRKRPLIETNGETGEIVWDKGRDFATVRKVLSMPQVNIVKKTEVQTGGFSKESILPKRNSDKLIARKKDWDPKKYGGFDSPTVAYSVLVVAKVEKGKSKKLKSVKELLGITIMERSSFEKNPIDFLEAKGYKEVKKDLIIKLPKYSLFELENGRKRMLASAGELQKGNELALPSKYVNFLYLASHYEKLKGSPEDNEQKQLFVEQHKHYLDEIIEQISEFSKRVILADANLDKVLSAYNKHRDKPIREQAENIIHLFTLTNLGAPAAFKYFDTTIDRKRYTSTKEVLDATLIHQSITGLYETRIDLSQLGGDGGEAAAKGSSPAPGGTLQLEEEYRLFEPESTQKQEMDIWLKNFPQAWAETGGMGTAHCQAPVLIQLKATATPISIRQYPMPHEAYQGIKPHIRRMLDQGILKPCQSPWNTPLLPVKKPGTEDYRPVQDLREVNKRVEDIHPTVPNPYNLLSTLPPSHPWYTVLDLKDAFFCLRLHSESQLLFAFEWRDPEIGLSGQLTWTRLPQGFKNSPTLFNEALHSDLADFRVRYPALVLLQYVDDLLLAAATRTECLEGTKALLETLGNKGYRASAKKAQICLQEVTYLGYSLKDGQRWLTKARKEAILSIPVPKNSRQVREFLGKAGYCRLFIPGFAELAAPLYPLTRPGTLFQWGTEQQLAFEDIKKALLSSPALGLPDITKPFELFIDENSGFAKGVLVQKLGPWKRPVAYLSKKLDTVASGWPPCLRMVAAIAILVKDAGKLTLGQPLTILTSHPVEALVRQPPNKWLSNARMTHYQAMLLDAERVHFGPTVSLNPATLLPLPSGGNHHDCLQILAETHGTRPDLTDQPLPDADLTWYTDGSSFIRNGEREAGAAVTTESEVIWAAPLPPGTSAQRAELIALTQALKMAEGKKLTVYTDSRYAFATTHVHGEIYRRRGWLTSEGKEIKNKNEILALLEALFLPKRLSIIHCPGHQKGDSPQAKGNRLADDTAKKAATETHSSLTVLPAGKRTADGSEFEKRTADGSEFESPKKKAKVE

SEQ ID NO: 1202 - protein, 2109 aa, synthetic construct
MPAAKRVKLDGGDKKYSIGLDIGTNSVGWAVITDEYKVPSKKFKVLGNTDRHSIKKNLIGALLFDSGETAEATRLKRTARRRYTRRKNRICYLQEIFSNEMAKVDDSFFHRLEESFLVEEDKKHERHPIFGNIVDEVAYHEKYPTIYHLRKKLVDSTDKADLRLIYLALAHMIKFRGHFLIEGDLNPDNSDVDKLFIQLVQTYNQLFEENPINASGVDAKAILSARLSKSRRLENLIAQLPGEKKNGLFGNLIALSLGLTPNFKSNFDLAEDAKLQLSKDTYDDDLDNLLAQIGDQYADLFLAAKNLSDAILLSDILRVNTEITKAPLSASMIKRYDEHHQDLTLLKALVRQQLPEKYKEIFFDQSKNGYAGYIDGGASQEEFYKFIKPILEKMDGTEELLVKLNREDLLRKQRTFDNGSIPHQIHLGELHAILRRQEDFYPFLKDNREKIEKILTFRIPYYVGPLARGNSRFAWMTRKSEETITPWNFEEVVDKGASAQSFIERMTNFDKNLPNEKVLPKHSLLYEYFTVYNELTKVKYVTEGMRKPAFLSGEQKKAIVDLLFKTNRKVTVKQLKEDYFKKIECFDSVEISGVEDRFNASLGTYHDLLKIIKDKDFLDNEENEDILEDIVLTLTLFEDREMIEERLKTYAHLFDDKVMKQLKRRRYTGWGRLSRKLINGIRDKQSGKTILDFLKSDGFANRNFMQLIHDDSLTFKEDIQKAQVSGQGDSLHEHIANLAGSPAIKKGILQTVKVVDELVKVMGRHKPENIVIEMARENQTTQKGQKNSRERMKRIEEGIKELGSQILKEHPVENTQLQNEKLYLYYLQNGRDMYVDQELDINRLSDYDVDHIVPQSFLKDDSIDNKVLTRSDKARGKSDNVPSEEVVKKMKNYWRQLLNAKLITQRKFDNLTKAERGGLSELDKAGFIKRQLVETRQITKHVAQILDSRMNTKYDENDKLIREVKVITLKSKLVSDFRKDFQFYKVREINNYHHAHDAYLNAVVGTALIKKYPKLESEFVYGDYKVYDVRKMIAKSEQEIGKATAKYFFYSNIMNFFKTEITLANGEIRKRPLIETNGETGEIVWDKGRDFATVRKVLSMPQVNIVKKTEVQTGGFSKESILPKRNSDKLIARKKDWDPKKYGGFDSPTVAYSVLVVAKVEKGKSKKLKSVKELLGITIMERSSFEKNPIDFLEAKGYKEVKKDLIIKLPKYSLFELENGRKRMLASAGELQKGNELALPSKYVNFLYLASHYEKLKGSPEDNEQKQLFVEQHKHYLDEIIEQISEFSKRVILADANLDKVLSAYNKHRDKPIREQAENIIHLFTLTNLGAPAAFKYFDTTIDRKRYTSTKEVLDATLIHQSITGLYETRIDLSQLGGDGGGGGGSGGGGSGGGGSGGGGSGGGGSGGTLQLEEEYRLFEPESTQKQEMDIWLKNFPQAWAETGGMGTAHCQAPVLIQLKATATPISIRQYPMPHEAYQGIKPHIRRMLDQGILKPCQSPWNTPLLPVKKPGTEDYRPVQDLREVNKRVEDIHPTVPNPYNLLSTLPPSHPWYTVLDLKDAFFCLRLHSESQLLFAFEWRDPEIGLSGQLTWTRLPQGFKNSPTLFNEALHSDLADFRVRYPALVLLQYVDDLLLAAATRTECLEGTKALLETLGNKGYRASAKKAQICLQEVTYLGYSLKDGQRWLTKARKEAILSIPVPKNSRQVREFLGKAGYCRLFIPGFAELAAPLYPLTRPGTLFQWGTEQQLAFEDIKKALLSSPALGLPDITKPFELFIDENSGFAKGVLVQKLGPWKRPVAYLSKKLDTVASGWPPCLRMVAAIAILVKDAGKLTLGQPLTILTSHPVEALVRQPPNKWLSNARMTHYQAMLLDAERVHFGPTVSLNPATLLPLPSGGNHHDCLQILAETHGTRPDLTDQPLPDADLTWYTDGSSFIRNGEREAGAAVTTESEVIWAAPLPPGTSAQRAELIALTQALKMAEGKKLTVYTDSRYAFATTHVHGEIYRRRGWLTSEGKEIKNKNEILALLEALFLPKRLSIIHCPGHQKGDSPQAKGNRLADDTAKKAATETHSSLTVLPAGKRTADGSEFEKRTADGSEFESPKKKAKVE

SEQ ID NO: 1203 - protein, 2099 aa, synthetic construct
MPAAKRVKLDGGDKKYSIGLDIGTNSVGWAVITDEYKVPSKKFKVLGNTDRHSIKKNLIGALLFDSGETAEATRLKRTARRRYTRRKNRICYLQEIFSNEMAKVDDSFFHRLEESFLVEEDKKHERHPIFGNIVDEVAYHEKYPTIYHLRKKLVDSTDKADLRLIYLALAHMIKFRGHFLIEGDLNPDNSDVDKLFIQLVQTYNQLFEENPINASGVDAKAILSARLSKSRRLENLIAQLPGEKKNGLFGNLIALSLGLTPNFKSNFDLAEDAKLQLSKDTYDDDLDNLLAQIGDQYADLFLAAKNLSDAILLSDILRVNTEITKAPLSASMIKRYDEHHQDLTLLKALVRQQLPEKYKEIFFDQSKNGYAGYIDGGASQEEFYKFIKPILEKMDGTEELLVKLNREDLLRKQRTFDNGSIPHQIHLGELHAILRRQEDFYPFLKDNREKIEKILTFRIPYYVGPLARGNSRFAWMTRKSEETITPWNFEEVVDKGASAQSFIERMTNFDKNLPNEKVLPKHSLLYEYFTVYNELTKVKYVTEGMRKPAFLSGEQKKAIVDLLFKTNRKVTVKQLKEDYFKKIECFDSVEISGVEDRFNASLGTYHDLLKIIKDKDFLDNEENEDILEDIVLTLTLFEDREMIEERLKTYAHLFDDKVMKQLKRRRYTGWGRLSRKLINGIRDKQSGKTILDFLKSDGFANRNFMQLIHDDSLTFKEDIQKAQVSGQGDSLHEHIANLAGSPAIKKGILQTVKVVDELVKVMGRHKPENIVIEMARENQTTQKGQKNSRERMKRIEEGIKELGSQILKEHPVENTQLQNEKLYLYYLQNGRDMYVDQELDINRLSDYDVDHIVPQSFLKDDSIDNKVLTRSDKARGKSDNVPSEEVVKKMKNYWRQLLNAKLITQRKFDNLTKAERGGLSELDKAGFIKRQLVETRQITKHVAQILDSRMNTKYDENDKLIREVKVITLKSKLVSDFRKDFQFYKVREINNYHHAHDAYLNAVVGTALIKKYPKLESEFVYGDYKVYDVRKMIAKSEQEIGKATAKYFFYSNIMNFFKTEITLANGEIRKRPLIETNGETGEIVWDKGRDFATVRKVLSMPQVNIVKKTEVQTGGFSKESILPKRNSDKLIARKKDWDPKKYGGFDSPTVAYSVLVVAKVEKGKSKKLKSVKELLGITIMERSSFEKNPIDFLEAKGYKEVKKDLIIKLPKYSLFELENGRKRMLASAGELQKGNELALPSKYVNFLYLASHYEKLKGSPEDNEQKQLFVEQHKHYLDEIIEQISEFSKRVILADANLDKVLSAYNKHRDKPIREQAENIIHLFTLTNLGAPAAFKYFDTTIDRKRYTSTKEVLDATLIHQSITGLYETRIDLSQLGGDGGGGGGSEAAAKGGGGSGGTLQLEEEYRLFEPESTQKQEMDIWLKNFPQAWAETGGMGTAHCQAPVLIQLKATATPISIRQYPMPHEAYQGIKPHIRRMLDQGILKPCQSPWNTPLLPVKKPGTEDYRPVQDLREVNKRVEDIHPTVPNPYNLLSTLPPSHPWYTVLDLKDAFFCLRLHSESQLLFAFEWRDPEIGLSGQLTWTRLPQGFKNSPTLFNEALHSDLADFRVRYPALVLLQYVDDLLLAAATRTECLEGTKALLETLGNKGYRASAKKAQICLQEVTYLGYSLKDGQRWLTKARKEAILSIPVPKNSRQVREFLGKAGYCRLFIPGFAELAAPLYPLTRPGTLFQWGTEQQLAFEDIKKALLSSPALGLPDITKPFELFIDENSGFAKGVLVQKLGPWKRPVAYLSKKLDTVASGWPPCLRMVAAIAILVKDAGKLTLGQPLTILTSHPVEALVRQPPNKWLSNARMTHYQAMLLDAERVHFGPTVSLNPATLLPLPSGGNHHDCLQILAETHGTRPDLTDQPLPDADLTWYTDGSSFIRNGEREAGAAVTTESEVIWAAPLPPGTSAQRAELIALTQALKMAEGKKLTVYTDSRYAFATTHVHGEIYRRRGWLTSEGKEIKNKNEILALLEALFLPKRLSIIHCPGHQKGDSPQAKGNRLADDTAKKAATETHSSLTVLPAGKRTADGSEFEKRTADGSEFESPKKKAKVE

SEQ ID NO: 1204 - protein, 2092 aa, synthetic construct
MPAAKRVKLDGGDKKYSIGLDIGTNSVGWAVITDEYKVPSKKFKVLGNTDRHSIKKNLIGALLFDSGETAEATRLKRTARRRYTRRKNRICYLQEIFSNEMAKVDDSFFHRLEESFLVEEDKKHERHPIFGNIVDEVAYHEKYPTIYHLRKKLVDSTDKADLRLIYLALAHMIKFRGHFLIEGDLNPDNSDVDKLFIQLVQTYNQLFEENPINASGVDAKAILSARLSKSRRLENLIAQLPGEKKNGLFGNLIALSLGLTPNFKSNFDLAEDAKLQLSKDTYDDDLDNLLAQIGDQYADLFLAAKNLSDAILLSDILRVNTEITKAPLSASMIKRYDEHHQDLTLLKALVRQQLPEKYKEIFFDQSKNGYAGYIDGGASQEEFYKFIKPILEKMDGTEELLVKLNREDLLRKQRTFDNGSIPHQIHLGELHAILRRQEDFYPFLKDNREKIEKILTFRIPYYVGPLARGNSRFAWMTRKSEETITPWNFEEVVDKGASAQSFIERMTNFDKNLPNEKVLPKHSLLYEYFTVYNELTKVKYVTEGMRKPAFLSGEQKKAIVDLLFKTNRKVTVKQLKEDYFKKIECFDSVEISGVEDRFNASLGTYHDLLKIIKDKDFLDNEENEDILEDIVLTLTLFEDREMIEERLKTYAHLFDDKVMKQLKRRRYTGWGRLSRKLINGIRDKQSGKTILDFLKSDGFANRNFMQLIHDDSLTFKEDIQKAQVSGQGDSLHEHIANLAGSPAIKKGILQTVKVVDELVKVMGRHKPENIVIEMARENQTTQKGQKNSRERMKRIEEGIKELGSQILKEHPVENTQLQNEKLYLYYLQNGRDMYVDQELDINRLSDYDVDHIVPQSFLKDDSIDNKVLTRSDKARGKSDNVPSEEVVKKMKNYWRQLLNAKLITQRKFDNLTKAERGGLSELDKAGFIKRQLVETRQITKHVAQILDSRMNTKYDENDKLIREVKVITLKSKLVSDFRKDFQFYKVREINNYHHAHDAYLNAVVGTALIKKYPKLESEFVYGDYKVYDVRKMIAKSEQEIGKATAKYFFYSNIMNFFKTEITLANGEIRKRPLIETNGETGEIVWDKGRDFATVRKVLSMPQVNIVKKTEVQTGGFSKESILPKRNSDKLIARKKDWDPKKYGGFDSPTVAYSVLVVAKVEKGKSKKLKSVKELLGITIMERSSFEKNPIDFLEAKGYKEVKKDLIIKLPKYSLFELENGRKRMLASAGELQKGNELALPSKYVNFLYLASHYEKLKGSPEDNEQKQLFVEQHKHYLDEIIEQISEFSKRVILADANLDKVLSAYNKHRDKPIREQAENIIHLFTLTNLGAPAAFKYFDTTIDRKRYTSTKEVLDATLIHQSITGLYETRIDLSQLGGDGGGGSEAAAKGGTLQLEEEYRLFEPESTQKQEMDIWLKNFPQAWAETGGMGTAHCQAPVLIQLKATATPISIRQYPMPHEAYQGIKPHIRRMLDQGILKPCQSPWNTPLLPVKKPGTEDYRPVQDLREVNKRVEDIHPTVPNPYNLLSTLPPSHPWYTVLDLKDAFFCLRLHSESQLLFAFEWRDPEIGLSGQLTWTRLPQGFKNSPTLFNEALHSDLADFRVRYPALVLLQYVDDLLLAAATRTECLEGTKALLETLGNKGYRASAKKAQICLQEVTYLGYSLKDGQRWLTKARKEAILSIPVPKNSRQVREFLGKAGYCRLFIPGFAELAAPLYPLTRPGTLFQWGTEQQLAFEDIKKALLSSPALGLPDITKPFELFIDENSGFAKGVLVQKLGPWKRPVAYLSKKLDTVASGWPPCLRMVAAIAILVKDAGKLTLGQPLTILTSHPVEALVRQPPNKWLSNARMTHYQAMLLDAERVHFGPTVSLNPATLLPLPSGGNHHDCLQILAETHGTRPDLTDQPLPDADLTWYTDGSSFIRNGEREAGAAVTTESEVIWAAPLPPGTSAQRAELIALTQALKMAEGKKLTVYTDSRYAFATTHVHGEIYRRRGWLTSEGKEIKNKNEILALLEALFLPKRLSIIHCPGHQKGDSPQAKGNRLADDTAKKAATETHSSLTVLPAGKRTADGSEFEKRTADGSEFESPKKKAKVE

SEQ ID NO: 1205 - protein, 2100 aa, synthetic construct
MPAAKRVKLDGGDKKYSIGLDIGTNSVGWAVITDEYKVPSKKFKVLGNTDRHSIKKNLIGALLFDSGETAEATRLKRTARRRYTRRKNRICYLQEIFSNEMAKVDDSFFHRLEESFLVEEDKKHERHPIFGNIVDEVAYHEKYPTIYHLRKKLVDSTDKADLRLIYLALAHMIKFRGHFLIEGDLNPDNSDVDKLFIQLVQTYNQLFEENPINASGVDAKAILSARLSKSRRLENLIAQLPGEKKNGLFGNLIALSLGLTPNFKSNFDLAEDAKLQLSKDTYDDDLDNLLAQIGDQYADLFLAAKNLSDAILLSDILRVNTEITKAPLSASMIKRYDEHHQDLTLLKALVRQQLPEKYKEIFFDQSKNGYAGYIDGGASQEEFYKFIKPILEKMDGTEELLVKLNREDLLRKQRTFDNGSIPHQIHLGELHAILRRQEDFYPFLKDNREKIEKILTFRIPYYVGPLARGNSRFAWMTRKSEETITPWNFEEVVDKGASAQSFIERMTNFDKNLPNEKVLPKHSLLYEYFTVYNELTKVKYVTEGMRKPAFLSGEQKKAIVDLLFKTNRKVTVKQLKEDYFKKIECFDSVEISGVEDRFNASLGTYHDLLKIIKDKDFLDNEENEDILEDIVLTLTLFEDREMIEERLKTYAHLFDDKVMKQLKRRRYTGWGRLSRKLINGIRDKQSGKTILDFLKSDGFANRNFMQLIHDDSLTFKEDIQKAQVSGQGDSLHEHIANLAGSPAIKKGILQTVKVVDELVKVMGRHKPENIVIEMARENQTTQKGQKNSRERMKRIEEGIKELGSQILKEHPVENTQLQNEKLYLYYLQNGRDMYVDQELDINRLSDYDVDHIVPQSFLKDDSIDNKVLTRSDKARGKSDNVPSEEVVKKMKNYWRQLLNAKLITQRKFDNLTKAERGGLSELDKAGFIKRQLVETRQITKHVAQILDSRMNTKYDENDKLIREVKVITLKSKLVSDFRKDFQFYKVREINNYHHAHDAYLNAVVGTALIKKYPKLESEFVYGDYKVYDVRKMIAKSEQEIGKATAKYFFYSNIMNFFKTEITLANGEIRKRPLIETNGETGEIVWDKGRDFATVRKVLSMPQVNIVKKTEVQTGGFSKESILPKRNSDKLIARKKDWDPKKYGGFDSPTVAYSVLVVAKVEKGKSKKLKSVKELLGITIMERSSFEKNPIDFLEAKGYKEVKKDLIIKLPKYSLFELENGRKRMLASAGELQKGNELALPSKYVNFLYLASHYEKLKGSPEDNEQKQLFVEQHKHYLDEIIEQISEFSKRVILADANLDKVLSAYNKHRDKPIREQAENIIHLFTLTNLGAPAAFKYFDTTIDRKRYTSTKEVLDATLIHQSITGLYETRIDLSQLGGDGGSGSETPGTSESATPESGGTLQLEEEYRLFEPESTQKQEMDIWLKNFPQAWAETGGMGTAHCQAPVLIQLKATATPISIRQYPMPHEAYQGIKPHIRRMLDQGILKPCQSPWNTPLLPVKKPGTEDYRPVQDLREVNKRVEDIHPTVPNPYNLLSTLPPSHPWYTVLDLKDAFFCLRLHSESQLLFAFEWRDPEIGLSGQLTWTRLPQGFKNSPTLFNEALHSDLADFRVRYPALVLLQYVDDLLLAAATRTECLEGTKALLETLGNKGYRASAKKAQICLQEVTYLGYSLKDGQRWLTKARKEAILSIPVPKNSRQVREFLGKAGYCRLFIPGFAELAAPLYPLTRPGTLFQWGTEQQLAFEDIKKALLSSPALGLPDITKPFELFIDENSGFAKGVLVQKLGPWKRPVAYLSKKLDTVASGWPPCLRMVAAIAILVKDAGKLTLGQPLTILTSHPVEALVRQPPNKWLSNARMTHYQAMLLDAERVHFGPTVSLNPATLLPLPSGGNHHDCLQILAETHGTRPDLTDQPLPDADLTWYTDGSSFIRNGEREAGAAVTTESEVIWAAPLPPGTSAQRAELIALTQALKMAEGKKLTVYTDSRYAFATTHVHGEIYRRRGWLTSEGKEIKNKNEILALLEALFLPKRLSIIHCPGHQKGDSPQAKGNRLADDTAKKAATETHSSLTVLPAGKRTADGSEFEKRTADGSEFESPKKKAKVE

SEQ ID NO: 1206 - protein, 2094 aa, synthetic construct
MPAAKRVKLDGGDKKYSIGLDIGTNSVGWAVITDEYKVPSKKFKVLGNTDRHSIKKNLIGALLFDSGETAEATRLKRTARRRYTRRKNRICYLQEIFSNEMAKVDDSFFHRLEESFLVEEDKKHERHPIFGNIVDEVAYHEKYPTIYHLRKKLVDSTDKADLRLIYLALAHMIKFRGHFLIEGDLNPDNSDVDKLFIQLVQTYNQLFEENPINASGVDAKAILSARLSKSRRLENLIAQLPGEKKNGLFGNLIALSLGLTPNFKSNFDLAEDAKLQLSKDTYDDDLDNLLAQIGDQYADLFLAAKNLSDAILLSDILRVNTEITKAPLSASMIKRYDEHHQDLTLLKALVRQQLPEKYKEIFFDQSKNGYAGYIDGGASQEEFYKFIKPILEKMDGTEELLVKLNREDLLRKQRTFDNGSIPHQIHLGELHAILRRQEDFYPFLKDNREKIEKILTFRIPYYVGPLARGNSRFAWMTRKSEETITPWNFEEVVDKGASAQSFIERMTNFDKNLPNEKVLPKHSLLYEYFTVYNELTKVKYVTEGMRKPAFLSGEQKKAIVDLLFKTNRKVTVKQLKEDYFKKIECFDSVEISGVEDRFNASLGTYHDLLKIIKDKDFLDNEENEDILEDIVLTLTLFEDREMIEERLKTYAHLFDDKVMKQLKRRRYTGWGRLSRKLINGIRDKQSGKTILDFLKSDGFANRNFMQLIHDDSLTFKEDIQKAQVSGQGDSLHEHIANLAGSPAIKKGILQTVKVVDELVKVMGRHKPENIVIEMARENQTTQKGQKNSRERMKRIEEGIKELGSQILKEHPVENTQLQNEKLYLYYLQNGRDMYVDQELDINRLSDYDVDHIVPQSFLKDDSIDNKVLTRSDKARGKSDNVPSEEVVKKMKNYWRQLLNAKLITQRKFDNLTKAERGGLSELDKAGFIKRQLVETRQITKHVAQILDSRMNTKYDENDKLIREVKVITLKSKLVSDFRKDFQFYKVREINNYHHAHDAYLNAVVGTALIKKYPKLESEFVYGDYKVYDVRKMIAKSEQEIGKATAKYFFYSNIMNFFKTEITLANGEIRKRPLIETNGETGEIVWDKGRDFATVRKVLSMPQVNIVKKTEVQTGGFSKESILPKRNSDKLIARKKDWDPKKYGGFDSPTVAYSVLVVAKVEKGKSKKLKSVKELLGITIMERSSFEKNPIDFLEAKGYKEVKKDLIIKLPKYSLFELENGRKRMLASAGELQKGNELALPSKYVNFLYLASHYEKLKGSPEDNEQKQLFVEQHKHYLDEIIEQISEFSKRVILADANLDKVLSAYNKHRDKPIREQAENIIHLFTLTNLGAPAAFKYFDTTIDRKRYTSTKEVLDATLIHQSITGLYETRIDLSQLGGDGGEAAAKEAAAKGGTLQLEEEYRLFEPESTQKQEMDIWLKNFPQAWAETGGMGTAHCQAPVLIQLKATATPISIRQYPMPHEAYQGIKPHIRRMLDQGILKPCQSPWNTPLLPVKKPGTEDYRPVQDLREVNKRVEDIHPTVPNPYNLLSTLPPSHPWYTVLDLKDAFFCLRLHSESQLLFAFEWRDPEIGLSGQLTWTRLPQGFKNSPTLFNEALHSDLADFRVRYPALVLLQYVDDLLLAAATRTECLEGTKALLETLGNKGYRASAKKAQICLQEVTYLGYSLKDGQRWLTKARKEAILSIPVPKNSRQVREFLGKAGYCRLFIPGFAELAAPLYPLTRPGTLFQWGTEQQLAFEDIKKALLSSPALGLPDITKPFELFIDENSGFAKGVLVQKLGPWKRPVAYLSKKLDTVASGWPPCLRMVAAIAILVKDAGKLTLGQPLTILTSHPVEALVRQPPNKWLSNARMTHYQAMLLDAERVHFGPTVSLNPATLLPLPSGGNHHDCLQILAETHGTRPDLTDQPLPDADLTWYTDGSSFIRNGEREAGAAVTTESEVIWAAPLPPGTSAQRAELIALTQALKMAEGKKLTVYTDSRYAFATTHVHGEIYRRRGWLTSEGKEIKNKNEILALLEALFLPKRLSIIHCPGHQKGDSPQAKGNRLADDTAKKAATETHSSLTVLPAGKRTADGSEFEKRTADGSEFESPKKKAKVE

SEQ ID NO: 1207 - protein, 2096 aa, synthetic construct
MPAAKRVKLDGGDKKYSIGLDIGTNSVGWAVITDEYKVPSKKFKVLGNTDRHSIKKNLIGALLFDSGETAEATRLKRTARRRYTRRKNRICYLQEIFSNEMAKVDDSFFHRLEESFLVEEDKKHERHPIFGNIVDEVAYHEKYPTIYHLRKKLVDSTDKADLRLIYLALAHMIKFRGHFLIEGDLNPDNSDVDKLFIQLVQTYNQLFEENPINASGVDAKAILSARLSKSRRLENLIAQLPGEKKNGLFGNLIALSLGLTPNFKSNFDLAEDAKLQLSKDTYDDDLDNLLAQIGDQYADLFLAAKNLSDAILLSDILRVNTEITKAPLSASMIKRYDEHHQDLTLLKALVRQQLPEKYKEIFFDQSKNGYAGYIDGGASQEEFYKFIKPILEKMDGTEELLVKLNREDLLRKQRTFDNGSIPHQIHLGELHAILRRQEDFYPFLKDNREKIEKILTFRIPYYVGPLARGNSRFAWMTRKSEETITPWNFEEVVDKGASAQSFIERMTNFDKNLPNEKVLPKHSLLYEYFTVYNELTKVKYVTEGMRKPAFLSGEQKKAIVDLLFKTNRKVTVKQLKEDYFKKIECFDSVEISGVEDRFNASLGTYHDLLKIIKDKDFLDNEENEDILEDIVLTLTLFEDREMIEERLKTYAHLFDDKVMKQLKRRRYTGWGRLSRKLINGIRDKQSGKTILDFLKSDGFANRNFMQLIHDDSLTFKEDIQKAQVSGQGDSLHEHIANLAGSPAIKKGILQTVKVVDELVKVMGRHKPENIVIEMARENQTTQKGQKNSRERMKRIEEGIKELGSQILKEHPVENTQLQNEKLYLYYLQNGRDMYVDQELDINRLSDYDVDHIVPQSFLKDDSIDNKVLTRSDKARGKSDNVPSEEVVKKMKNYWRQLLNAKLITQRKFDNLTKAERGGLSELDKAGFIKRQLVETRQITKHVAQILDSRMNTKYDENDKLIREVKVITLKSKLVSDFRKDFQFYKVREINNYHHAHDAYLNAVVGTALIKKYPKLESEFVYGDYKVYDVRKMIAKSEQEIGKATAKYFFYSNIMNFFKTEITLANGEIRKRPLIETNGETGEIVWDKGRDFATVRKVLSMPQVNIVKKTEVQTGGFSKESILPKRNSDKLIARKKDWDPKKYGGFDSPTVAYSVLVVAKVEKGKSKKLKSVKELLGITIMERSSFEKNPIDFLEAKGYKEVKKDLIIKLPKYSLFELENGRKRMLASAGELQKGNELALPSKYVNFLYLASHYEKLKGSPEDNEQKQLFVEQHKHYLDEIIEQISEFSKRVILADANLDKVLSAYNKHRDKPIREQAENIIHLFTLTNLGAPAAFKYFDTTIDRKRYTSTKEVLDATLIHQSITGLYETRIDLSQLGGDGGGGSGGSGGSGGSGGTLQLEEEYRLFEPESTQKQEMDIWLKNFPQAWAETGGMGTAHCQAPVLIQLKATATPISIRQYPMPHEAYQGIKPHIRRMLDQGILKPCQSPWNTPLLPVKKPGTEDYRPVQDLREVNKRVEDIHPTVPNPYNLLSTLPPSHPWYTVLDLKDAFFCLRLHSESQLLFAFEWRDPEIGLSGQLTWTRLPQGFKNSPTLFNEALHSDLADFRVRYPALVLLQYVDDLLLAAATRTECLEGTKALLETLGNKGYRASAKKAQICLQEVTYLGYSLKDGQRWLTKARKEAILSIPVPKNSRQVREFLGKAGYCRLFIPGFAELAAPLYPLTRPGTLFQWGTEQQLAFEDIKKALLSSPALGLPDITKPFELFIDENSGFAKGVLVQKLGPWKRPVAYLSKKLDTVASGWPPCLRMVAAIAILVKDAGKLTLGQPLTILTSHPVEALVRQPPNKWLSNARMTHYQAMLLDAERVHFGPTVSLNPATLLPLPSGGNHHDCLQILAETHGTRPDLTDQPLPDADLTWYTDGSSFIRNGEREAGAAVTTESEVIWAAPLPPGTSAQRAELIALTQALKMAEGKKLTVYTDSRYAFATTHVHGEIYRRRGWLTSEGKEIKNKNEILALLEALFLPKRLSIIHCPGHQKGDSPQAKGNRLADDTAKKAATETHSSLTVLPAGKRTADGSEFEKRTADGSEFESPKKKAKVE

SEQ ID NO: 1208 - protein, 2095 aa, synthetic construct
MPAAKRVKLDGGDKKYSIGLDIGTNSVGWAVITDEYKVPSKKFKVLGNTDRHSIKKNLIGALLFDSGETAEATRLKRTARRRYTRRKNRICYLQEIFSNEMAKVDDSFFHRLEESFLVEEDKKHERHPIFGNIVDEVAYHEKYPTIYHLRKKLVDSTDKADLRLIYLALAHMIKFRGHFLIEGDLNPDNSDVDKLFIQLVQTYNQLFEENPINASGVDAKAILSARLSKSRRLENLIAQLPGEKKNGLFGNLIALSLGLTPNFKSNFDLAEDAKLQLSKDTYDDDLDNLLAQIGDQYADLFLAAKNLSDAILLSDILRVNTEITKAPLSASMIKRYDEHHQDLTLLKALVRQQLPEKYKEIFFDQSKNGYAGYIDGGASQEEFYKFIKPILEKMDGTEELLVKLNREDLLRKQRTFDNGSIPHQIHLGELHAILRRQEDFYPFLKDNREKIEKILTFRIPYYVGPLARGNSRFAWMTRKSEETITPWNFEEVVDKGASAQSFIERMTNFDKNLPNEKVLPKHSLLYEYFTVYNELTKVKYVTEGMRKPAFLSGEQKKAIVDLLFKTNRKVTVKQLKEDYFKKIECFDSVEISGVEDRFNASLGTYHDLLKIIKDKDFLDNEENEDILEDIVLTLTLFEDREMIEERLKTYAHLFDDKVMKQLKRRRYTGWGRLSRKLINGIRDKQSGKTILDFLKSDGFANRNFMQLIHDDSLTFKEDIQKAQVSGQGDSLHEHIANLAGSPAIKKGILQTVKVVDELVKVMGRHKPENIVIEMARENQTTQKGQKNSRERMKRIEEGIKELGSQILKEHPVENTQLQNEKLYLYYLQNGRDMYVDQELDINRLSDYDVDHIVPQSFLKDDSIDNKVLTRSDKARGKSDNVPSEEVVKKMKNYWRQLLNAKLITQRKFDNLTKAERGGLSELDKAGFIKRQLVETRQITKHVAQILDSRMNTKYDENDKLIREVKVITLKSKLVSDFRKDFQFYKVREINNYHHAHDAYLNAVVGTALIKKYPKLESEFVYGDYKVYDVRKMIAKSEQEIGKATAKYFFYSNIMNFFKTEITLANGEIRKRPLIETNGETGEIVWDKGRDFATVRKVLSMPQVNIVKKTEVQTGGFSKESILPKRNSDKLIARKKDWDPKKYGGFDSPTVAYSVLVVAKVEKGKSKKLKSVKELLGITIMERSSFEKNPIDFLEAKGYKEVKKDLIIKLPKYSLFELENGRKRMLASAGELQKGNELALPSKYVNFLYLASHYEKLKGSPEDNEQKQLFVEQHKHYLDEIIEQISEFSKRVILADANLDKVLSAYNKHRDKPIREQAENIIHLFTLTNLGAPAAFKYFDTTIDRKRYTSTKEVLDATLIHQSITGLYETRIDLSQLGGDGGPAPEAAAKGSSGGTLQLEEEYRLFEPESTQKQEMDIWLKNFPQAWAETGGMGTAHCQAPVLIQLKATATPISIRQYPMPHEAYQGIKPHIRRMLDQGILKPCQSPWNTPLLPVKKPGTEDYRPVQDLREVNKRVEDIHPTVPNPYNLLSTLPPSHPWYTVLDLKDAFFCLRLHSESQLLFAFEWRDPEIGLSGQLTWTRLPQGFKNSPTLFNEALHSDLADFRVRYPALVLLQYVDDLLLAAATRTECLEGTKALLETLGNKGYRASAKKAQICLQEVTYLGYSLKDGQRWLTKARKEAILSIPVPKNSRQVREFLGKAGYCRLFIPGFAELAAPLYPLTRPGTLFQWGTEQQLAFEDIKKALLSSPALGLPDITKPFELFIDENSGFAKGVLVQKLGPWKRPVAYLSKKLDTVASGWPPCLRMVAAIAILVKDAGKLTLGQPLTILTSHPVEALVRQPPNKWLSNARMTHYQAMLLDAERVHFGPTVSLNPATLLPLPSGGNHHDCLQILAETHGTRPDLTDQPLPDADLTWYTDGSSFIRNGEREAGAAVTTESEVIWAAPLPPGTSAQRAELIALTQALKMAEGKKLTVYTDSRYAFATTHVHGEIYRRRGWLTSEGKEIKNKNEILALLEALFLPKRLSIIHCPGHQKGDSPQAKGNRLADDTAKKAATETHSSLTVLPAGKRTADGSEFEKRTADGSEFESPKKKAKVE

SEQ ID NO: 1209 - protein, 2114 aa, synthetic construct
MPAAKRVKLDGGDKKYSIGLDIGTNSVGWAVITDEYKVPSKKFKVLGNTDRHSIKKNLIGALLFDSGETAEATRLKRTARRRYTRRKNRICYLQEIFSNEMAKVDDSFFHRLEESFLVEEDKKHERHPIFGNIVDEVAYHEKYPTIYHLRKKLVDSTDKADLRLIYLALAHMIKFRGHFLIEGDLNPDNSDVDKLFIQLVQTYNQLFEENPINASGVDAKAILSARLSKSRRLENLIAQLPGEKKNGLFGNLIALSLGLTPNFKSNFDLAEDAKLQLSKDTYDDDLDNLLAQIGDQYADLFLAAKNLSDAILLSDILRVNTEITKAPLSASMIKRYDEHHQDLTLLKALVRQQLPEKYKEIFFDQSKNGYAGYIDGGASQEEFYKFIKPILEKMDGTEELLVKLNREDLLRKQRTFDNGSIPHQIHLGELHAILRRQEDFYPFLKDNREKIEKILTFRIPYYVGPLARGNSRFAWMTRKSEETITPWNFEEVVDKGASAQSFIERMTNFDKNLPNEKVLPKHSLLYEYFTVYNELTKVKYVTEGMRKPAFLSGEQKKAIVDLLFKTNRKVTVKQLKEDYFKKIECFDSVEISGVEDRFNASLGTYHDLLKIIKDKDFLDNEENEDILEDIVLTLTLFEDREMIEERLKTYAHLFDDKVMKQLKRRRYTGWGRLSRKLINGIRDKQSGKTILDFLKSDGFANRNFMQLIHDDSLTFKEDIQKAQVSGQGDSLHEHIANLAGSPAIKKGILQTVKVVDELVKVMGRHKPENIVIEMARENQTTQKGQKNSRERMKRIEEGIKELGSQILKEHPVENTQLQNEKLYLYYLQNGRDMYVDQELDINRLSDYDVDHIVPQSFLKDDSIDNKVLTRSDKARGKSDNVPSEEVVKKMKNYWRQLLNAKLITQRKFDNLTKAERGGLSELDKAGFIKRQLVETRQITKHVAQILDSRMNTKYDENDKLIREVKVITLKSKLVSDFRKDFQFYKVREINNYHHAHDAYLNAVVGTALIKKYPKLESEFVYGDYKVYDVRKMIAKSEQEIGKATAKYFFYSNIMNFFKTEITLANGEIRKRPLIETNGETGEIVWDKGRDFATVRKVLSMPQVNIVKKTEVQTGGFSKESILPKRNSDKLIARKKDWDPKKYGGFDSPTVAYSVLVVAKVEKGKSKKLKSVKELLGITIMERSSFEKNPIDFLEAKGYKEVKKDLIIKLPKYSLFELENGRKRMLASAGELQKGNELALPSKYVNFLYLASHYEKLKGSPEDNEQKQLFVEQHKHYLDEIIEQISEFSKRVILADANLDKVLSAYNKHRDKPIREQAENIIHLFTLTNLGAPAAFKYFDTTIDRKRYTSTKEVLDATLIHQSITGLYETRIDLSQLGGDGGGGGGSGGGGSGGGGSGGGGSGGGGSGGGGSGGTLQLEEEYRLFEPESTQKQEMDIWLKNFPQAWAETGGMGTAHCQAPVLIQLKATATPISIRQYPMPHEAYQGIKPHIRRMLDQGILKPCQSPWNTPLLPVKKPGTEDYRPVQDLREVNKRVEDIHPTVPNPYNLLSTLPPSHPWYTVLDLKDAFFCLRLHSESQLLFAFEWRDPEIGLSGQLTWTRLPQGFKNSPTLFNEALHSDLADFRVRYPALVLLQYVDDLLLAAATRTECLEGTKALLETLGNKGYRASAKKAQICLQEVTYLGYSLKDGQRWLTKARKEAILSIPVPKNSRQVREFLGKAGYCRLFIPGFAELAAPLYPLTRPGTLFQWGTEQQLAFEDIKKALLSSPALGLPDITKPFELFIDENSGFAKGVLVQKLGPWKRPVAYLSKKLDTVASGWPPCLRMVAAIAILVKDAGKLTLGQPLTILTSHPVEALVRQPPNKWLSNARMTHYQAMLLDAERVHFGPTVSLNPATLLPLPSGGNHHDCLQILAETHGTRPDLTDQPLPDADLTWYTDGSSFIRNGEREAGAAVTTESEVIWAAPLPPGTSAQRAELIALTQALKMAEGKKLTVYTDSRYAFATTHVHGEIYRRRGWLTSEGKEIKNKNEILALLEALFLPKRLSIIHCPGHQKGDSPQAKGNRLADDTAKKAATETHSSLTVLPAGKRTADGSEFEKRTADGSEFESPKKKAKVE

SEQ ID NO: 1210 - protein, 2095 aa, synthetic construct
MPAAKRVKLDGGDKKYSIGLDIGTNSVGWAVITDEYKVPSKKFKVLGNTDRHSIKKNLIGALLFDSGETAEATRLKRTARRRYTRRKNRICYLQEIFSNEMAKVDDSFFHRLEESFLVEEDKKHERHPIFGNIVDEVAYHEKYPTIYHLRKKLVDSTDKADLRLIYLALAHMIKFRGHFLIEGDLNPDNSDVDKLFIQLVQTYNQLFEENPINASGVDAKAILSARLSKSRRLENLIAQLPGEKKNGLFGNLIALSLGLTPNFKSNFDLAEDAKLQLSKDTYDDDLDNLLAQIGDQYADLFLAAKNLSDAILLSDILRVNTEITKAPLSASMIKRYDEHHQDLTLLKALVRQQLPEKYKEIFFDQSKNGYAGYIDGGASQEEFYKFIKPILEKMDGTEELLVKLNREDLLRKQRTFDNGSIPHQIHLGELHAILRRQEDFYPFLKDNREKIEKILTFRIPYYVGPLARGNSRFAWMTRKSEETITPWNFEEVVDKGASAQSFIERMTNFDKNLPNEKVLPKHSLLYEYFTVYNELTKVKYVTEGMRKPAFLSGEQKKAIVDLLFKTNRKVTVKQLKEDYFKKIECFDSVEISGVEDRFNASLGTYHDLLKIIKDKDFLDNEENEDILEDIVLTLTLFEDREMIEERLKTYAHLFDDKVMKQLKRRRYTGWGRLSRKLINGIRDKQSGKTILDFLKSDGFANRNFMQLIHDDSLTFKEDIQKAQVSGQGDSLHEHIANLAGSPAIKKGILQTVKVVDELVKVMGRHKPENIVIEMARENQTTQKGQKNSRERMKRIEEGIKELGSQILKEHPVENTQLQNEKLYLYYLQNGRDMYVDQELDINRLSDYDVDHIVPQSFLKDDSIDNKVLTRSDKARGKSDNVPSEEVVKKMKNYWRQLLNAKLITQRKFDNLTKAERGGLSELDKAGFIKRQLVETRQITKHVAQILDSRMNTKYDENDKLIREVKVITLKSKLVSDFRKDFQFYKVREINNYHHAHDAYLNAVVGTALIKKYPKLESEFVYGDYKVYDVRKMIAKSEQEIGKATAKYFFYSNIMNFFKTEITLANGEIRKRPLIETNGETGEIVWDKGRDFATVRKVLSMPQVNIVKKTEVQTGGFSKESILPKRNSDKLIARKKDWDPKKYGGFDSPTVAYSVLVVAKVEKGKSKKLKSVKELLGITIMERSSFEKNPIDFLEAKGYKEVKKDLIIKLPKYSLFELENGRKRMLASAGELQKGNELALPSKYVNFLYLASHYEKLKGSPEDNEQKQLFVEQHKHYLDEIIEQISEFSKRVILADANLDKVLSAYNKHRDKPIREQAENIIHLFTLTNLGAPAAFKYFDTTIDRKRYTSTKEVLDATLIHQSITGLYETRIDLSQLGGDGGEAAAKGSSGGGGGTLQLEEEYRLFEPESTQKQEMDIWLKNFPQAWAETGGMGTAHCQAPVLIQLKATATPISIRQYPMPHEAYQGIKPHIRRMLDQGILKPCQSPWNTPLLPVKKPGTEDYRPVQDLREVNKRVEDIHPTVPNPYNLLSTLPPSHPWYTVLDLKDAFFCLRLHSESQLLFAFEWRDPEIGLSGQLTWTRLPQGFKNSPTLFNEALHSDLADFRVRYPALVLLQYVDDLLLAAATRTECLEGTKALLETLGNKGYRASAKKAQICLQEVTYLGYSLKDGQRWLTKARKEAILSIPVPKNSRQVREFLGKAGYCRLFIPGFAELAAPLYPLTRPGTLFQWGTEQQLAFEDIKKALLSSPALGLPDITKPFELFIDENSGFAKGVLVQKLGPWKRPVAYLSKKLDTVASGWPPCLRMVAAIAILVKDAGKLTLGQPLTILTSHPVEALVRQPPNKWLSNARMTHYQAMLLDAERVHFGPTVSLNPATLLPLPSGGNHHDCLQILAETHGTRPDLTDQPLPDADLTWYTDGSSFIRNGEREAGAAVTTESEVIWAAPLPPGTSAQRAELIALTQALKMAEGKKLTVYTDSRYAFATTHVHGEIYRRRGWLTSEGKEIKNKNEILALLEALFLPKRLSIIHCPGHQKGDSPQAKGNRLADDTAKKAATETHSSLTVLPAGKRTADGSEFEKRTADGSEFESPKKKAKVE

SEQ ID NO: 1211 - protein, 2090 aa, synthetic construct
MPAAKRVKLDGGDKKYSIGLDIGTNSVGWAVITDEYKVPSKKFKVLGNTDRHSIKKNLIGALLFDSGETAEATRLKRTARRRYTRRKNRICYLQEIFSNEMAKVDDSFFHRLEESFLVEEDKKHERHPIFGNIVDEVAYHEKYPTIYHLRKKLVDSTDKADLRLIYLALAHMIKFRGHFLIEGDLNPDNSDVDKLFIQLVQTYNQLFEENPINASGVDAKAILSARLSKSRRLENLIAQLPGEKKNGLFGNLIALSLGLTPNFKSNFDLAEDAKLQLSKDTYDDDLDNLLAQIGDQYADLFLAAKNLSDAILLSDILRVNTEITKAPLSASMIKRYDEHHQDLTLLKALVRQQLPEKYKEIFFDQSKNGYAGYIDGGASQEEFYKFIKPILEKMDGTEELLVKLNREDLLRKQRTFDNGSIPHQIHLGELHAILRRQEDFYPFLKDNREKIEKILTFRIPYYVGPLARGNSRFAWMTRKSEETITPWNFEEVVDKGASAQSFIERMTNFDKNLPNEKVLPKHSLLYEYFTVYNELTKVKYVTEGMRKPAFLSGEQKKAIVDLLFKTNRKVTVKQLKEDYFKKIECFDSVEISGVEDRFNASLGTYHDLLKIIKDKDFLDNEENEDILEDIVLTLTLFEDREMIEERLKTYAHLFDDKVMKQLKRRRYTGWGRLSRKLINGIRDKQSGKTILDFLKSDGFANRNFMQLIHDDSLTFKEDIQKAQVSGQGDSLHEHIANLAGSPAIKKGILQTVKVVDELVKVMGRHKPENIVIEMARENQTTQKGQKNSRERMKRIEEGIKELGSQILKEHPVENTQLQNEKLYLYYLQNGRDMYVDQELDINRLSDYDVDHIVPQSFLKDDSIDNKVLTRSDKARGKSDNVPSEEVVKKMKNYWRQLLNAKLITQRKFDNLTKAERGGLSELDKAGFIKRQLVETRQITKHVAQILDSRMNTKYDENDKLIREVKVITLKSKLVSDFRKDFQFYKVREINNYHHAHDAYLNAVVGTALIKKYPKLESEFVYGDYKVYDVRKMIAKSEQEIGKATAKYFFYSNIMNFFKTEITLANGEIRKRPLIETNGETGEIVWDKGRDFATVRKVLSMPQVNIVKKTEVQTGGFSKESILPKRNSDKLIARKKDWDPKKYGGFDSPTVAYSVLVVAKVEKGKSKKLKSVKELLGITIMERSSFEKNPIDFLEAKGYKEVKKDLIIKLPKYSLFELENGRKRMLASAGELQKGNELALPSKYVNFLYLASHYEKLKGSPEDNEQKQLFVEQHKHYLDEIIEQISEFSKRVILADANLDKVLSAYNKHRDKPIREQAENIIHLFTLTNLGAPAAFKYFDTTIDRKRYTSTKEVLDATLIHQSITGLYETRIDLSQLGGDGGGGGGGGGGTLQLEEEYRLFEPESTQKQEMDIWLKNFPQAWAETGGMGTAHCQAPVLIQLKATATPISIRQYPMPHEAYQGIKPHIRRMLDQGILKPCQSPWNTPLLPVKKPGTEDYRPVQDLREVNKRVEDIHPTVPNPYNLLSTLPPSHPWYTVLDLKDAFFCLRLHSESQLLFAFEWRDPEIGLSGQLTWTRLPQGFKNSPTLFNEALHSDLADFRVRYPALVLLQYVDDLLLAAATRTECLEGTKALLETLGNKGYRASAKKAQICLQEVTYLGYSLKDGQRWLTKARKEAILSIPVPKNSRQVREFLGKAGYCRLFIPGFAELAAPLYPLTRPGTLFQWGTEQQLAFEDIKKALLSSPALGLPDITKPFELFIDENSGFAKGVLVQKLGPWKRPVAYLSKKLDTVASGWPPCLRMVAAIAILVKDAGKLTLGQPLTILTSHPVEALVRQPPNKWLSNARMTHYQAMLLDAERVHFGPTVSLNPATLLPLPSGGNHHDCLQILAETHGTRPDLTDQPLPDADLTWYTDGSSFIRNGEREAGAAVTTESEVIWAAPLPPGTSAQRAELIALTQALKMAEGKKLTVYTDSRYAFATTHVHGEIYRRRGWLTSEGKEIKNKNEILALLEALFLPKRLSIIHCPGHQKGDSPQAKGNRLADDTAKKAATETHSSLTVLPAGKRTADGSEFEKRTADGSEFESPKKKAKVE

SEQ ID NO: 1212 - protein, 2102 aa, synthetic construct
MPAAKRVKLDGGDKKYSIGLDIGTNSVGWAVITDEYKVPSKKFKVLGNTDRHSIKKNLIGALLFDSGETAEATRLKRTARRRYTRRKNRICYLQEIFSNEMAKVDDSFFHRLEESFLVEEDKKHERHPIFGNIVDEVAYHEKYPTIYHLRKKLVDSTDKADLRLIYLALAHMIKFRGHFLIEGDLNPDNSDVDKLFIQLVQTYNQLFEENPINASGVDAKAILSARLSKSRRLENLIAQLPGEKKNGLFGNLIALSLGLTPNFKSNFDLAEDAKLQLSKDTYDDDLDNLLAQIGDQYADLFLAAKNLSDAILLSDILRVNTEITKAPLSASMIKRYDEHHQDLTLLKALVRQQLPEKYKEIFFDQSKNGYAGYIDGGASQEEFYKFIKPILEKMDGTEELLVKLNREDLLRKQRTFDNGSIPHQIHLGELHAILRRQEDFYPFLKDNREKIEKILTFRIPYYVGPLARGNSRFAWMTRKSEETITPWNFEEVVDKGASAQSFIERMTNFDKNLPNEKVLPKHSLLYEYFTVYNELTKVKYVTEGMRKPAFLSGEQKKAIVDLLFKTNRKVTVKQLKEDYFKKIECFDSVEISGVEDRFNASLGTYHDLLKIIKDKDFLDNEENEDILEDIVLTLTLFEDREMIEERLKTYAHLFDDKVMKQLKRRRYTGWGRLSRKLINGIRDKQSGKTILDFLKSDGFANRNFMQLIHDDSLTFKEDIQKAQVSGQGDSLHEHIANLAGSPAIKKGILQTVKVVDELVKVMGRHKPENIVIEMARENQTTQKGQKNSRERMKRIEEGIKELGSQILKEHPVENTQLQNEKLYLYYLQNGRDMYVDQELDINRLSDYDVDHIVPQSFLKDDSIDNKVLTRSDKARGKSDNVPSEEVVKKMKNYWRQLLNAKLITQRKFDNLTKAERGGLSELDKAGFIKRQLVETRQITKHVAQILDSRMNTKYDENDKLIREVKVITLKSKLVSDFRKDFQFYKVREINNYHHAHDAYLNAVVGTALIKKYPKLESEFVYGDYKVYDVRKMIAKSEQEIGKATAKYFFYSNIMNFFKTEITLANGEIRKRPLIETNGETGEIVWDKGRDFATVRKVLSMPQVNIVKKTEVQTGGFSKESILPKRNSDKLIARKKDWDPKKYGGFDSPTVAYSVLVVAKVEKGKSKKLKSVKELLGITIMERSSFEKNPIDFLEAKGYKEVKKDLIIKLPKYSLFELENGRKRMLASAGELQKGNELALPSKYVNFLYLASHYEKLKGSPEDNEQKQLFVEQHKHYLDEIIEQISEFSKRVILADANLDKVLSAYNKHRDKPIREQAENIIHLFTLTNLGAPAAFKYFDTTIDRKRYTSTKEVLDATLIHQSITGLYETRIDLSQLGGDGGGSSGSSGSSGSSGSSGSSGGTLQLEEEYRLFEPESTQKQEMDIWLKNFPQAWAETGGMGTAHCQAPVLIQLKATATPISIRQYPMPHEAYQGIKPHIRRMLDQGILKPCQSPWNTPLLPVKKPGTEDYRPVQDLREVNKRVEDIHPTVPNPYNLLSTLPPSHPWYTVLDLKDAFFCLRLHSESQLLFAFEWRDPEIGLSGQLTWTRLPQGFKNSPTLFNEALHSDLADFRVRYPALVLLQYVDDLLLAAATRTECLEGTKALLETLGNKGYRASAKKAQICLQEVTYLGYSLKDGQRWLTKARKEAILSIPVPKNSRQVREFLGKAGYCRLFIPGFAELAAPLYPLTRPGTLFQWGTEQQLAFEDIKKALLSSPALGLPDITKPFELFIDENSGFAKGVLVQKLGPWKRPVAYLSKKLDTVASGWPPCLRMVAAIAILVKDAGKLTLGQPLTILTSHPVEALVRQPPNKWLSNARMTHYQAMLLDAERVHFGPTVSLNPATLLPLPSGGNHHDCLQILAETHGTRPDLTDQPLPDADLTWYTDGSSFIRNGEREAGAAVTTESEVIWAAPLPPGTSAQRAELIALTQALKMAEGKKLTVYTDSRYAFATTHVHGEIYRRRGWLTSEGKEIKNKNEILALLEALFLPKRLSIIHCPGHQKGDSPQAKGNRLADDTAKKAATETHSSLTVLPAGKRTADGSEFEKRTADGSEFESPKKKAKVE

SEQ ID NO: 1213 - protein, 2099 aa, synthetic construct
MPAAKRVKLDGGDKKYSIGLDIGTNSVGWAVITDEYKVPSKKFKVLGNTDRHSIKKNLIGALLFDSGETAEATRLKRTARRRYTRRKNRICYLQEIFSNEMAKVDDSFFHRLEESFLVEEDKKHERHPIFGNIVDEVAYHEKYPTIYHLRKKLVDSTDKADLRLIYLALAHMIKFRGHFLIEGDLNPDNSDVDKLFIQLVQTYNQLFEENPINASGVDAKAILSARLSKSRRLENLIAQLPGEKKNGLFGNLIALSLGLTPNFKSNFDLAEDAKLQLSKDTYDDDLDNLLAQIGDQYADLFLAAKNLSDAILLSDILRVNTEITKAPLSASMIKRYDEHHQDLTLLKALVRQQLPEKYKEIFFDQSKNGYAGYIDGGASQEEFYKFIKPILEKMDGTEELLVKLNREDLLRKQRTFDNGSIPHQIHLGELHAILRRQEDFYPFLKDNREKIEKILTFRIPYYVGPLARGNSRFAWMTRKSEETITPWNFEEVVDKGASAQSFIERMTNFDKNLPNEKVLPKHSLLYEYFTVYNELTKVKYVTEGMRKPAFLSGEQKKAIVDLLFKTNRKVTVKQLKEDYFKKIECFDSVEISGVEDRFNASLGTYHDLLKIIKDKDFLDNEENEDILEDIVLTLTLFEDREMIEERLKTYAHLFDDKVMKQLKRRRYTGWGRLSRKLINGIRDKQSGKTILDFLKSDGFANRNFMQLIHDDSLTFKEDIQKAQVSGQGDSLHEHIANLAGSPAIKKGILQTVKVVDELVKVMGRHKPENIVIEMARENQTTQKGQKNSRERMKRIEEGIKELGSQILKEHPVENTQLQNEKLYLYYLQNGRDMYVDQELDINRLSDYDVDHIVPQSFLKDDSIDNKVLTRSDKARGKSDNVPSEEVVKKMKNYWRQLLNAKLITQRKFDNLTKAERGGLSELDKAGFIKRQLVETRQITKHVAQILDSRMNTKYDENDKLIREVKVITLKSKLVSDFRKDFQFYKVREINNYHHAHDAYLNAVVGTALIKKYPKLESEFVYGDYKVYDVRKMIAKSEQEIGKATAKYFFYSNIMNFFKTEITLANGEIRKRPLIETNGETGEIVWDKGRDFATVRKVLSMPQVNIVKKTEVQTGGFSKESILPKRNSDKLIARKKDWDPKKYGGFDSPTVAYSVLVVAKVEKGKSKKLKSVKELLGITIMERSSFEKNPIDFLEAKGYKEVKKDLIIKLPKYSLFELENGRKRMLASAGELQKGNELALPSKYVNFLYLASHYEKLKGSPEDNEQKQLFVEQHKHYLDEIIEQISEFSKRVILADANLDKVLSAYNKHRDKPIREQAENIIHLFTLTNLGAPAAFKYFDTTIDRKRYTSTKEVLDATLIHQSITGLYETRIDLSQLGGDGGEAAAKEAAAKEAAAKGGTLQLEEEYRLFEPESTQKQEMDIWLKNFPQAWAETGGMGTAHCQAPVLIQLKATATPISIRQYPMPHEAYQGIKPHIRRMLDQGILKPCQSPWNTPLLPVKKPGTEDYRPVQDLREVNKRVEDIHPTVPNPYNLLSTLPPSHPWYTVLDLKDAFFCLRLHSESQLLFAFEWRDPEIGLSGQLTWTRLPQGFKNSPTLFNEALHSDLADFRVRYPALVLLQYVDDLLLAAATRTECLEGTKALLETLGNKGYRASAKKAQICLQEVTYLGYSLKDGQRWLTKARKEAILSIPVPKNSRQVREFLGKAGYCRLFIPGFAELAAPLYPLTRPGTLFQWGTEQQLAFEDIKKALLSSPALGLPDITKPFELFIDENSGFAKGVLVQKLGPWKRPVAYLSKKLDTVASGWPPCLRMVAAIAILVKDAGKLTLGQPLTILTSHPVEALVRQPPNKWLSNARMTHYQAMLLDAERVHFGPTVSLNPATLLPLPSGGNHHDCLQILAETHGTRPDLTDQPLPDADLTWYTDGSSFIRNGEREAGAAVTTESEVIWAAPLPPGTSAQRAELIALTQALKMAEGKKLTVYTDSRYAFATTHVHGEIYRRRGWLTSEGKEIKNKNEILALLEALFLPKRLSIIHCPGHQKGDSPQAKGNRLADDTAKKAATETHSSLTVLPAGKRTADGSEFEKRTADGSEFESPKKKAKVE

SEQ ID NO: 1214 - protein, 2095 aa, synthetic construct
MPAAKRVKLDGGDKKYSIGLDIGTNSVGWAVITDEYKVPSKKFKVLGNTDRHSIKKNLIGALLFDSGETAEATRLKRTARRRYTRRKNRICYLQEIFSNEMAKVDDSFFHRLEESFLVEEDKKHERHPIFGNIVDEVAYHEKYPTIYHLRKKLVDSTDKADLRLIYLALAHMIKFRGHFLIEGDLNPDNSDVDKLFIQLVQTYNQLFEENPINASGVDAKAILSARLSKSRRLENLIAQLPGEKKNGLFGNLIALSLGLTPNFKSNFDLAEDAKLQLSKDTYDDDLDNLLAQIGDQYADLFLAAKNLSDAILLSDILRVNTEITKAPLSASMIKRYDEHHQDLTLLKALVRQQLPEKYKEIFFDQSKNGYAGYIDGGASQEEFYKFIKPILEKMDGTEELLVKLNREDLLRKQRTFDNGSIPHQIHLGELHAILRRQEDFYPFLKDNREKIEKILTFRIPYYVGPLARGNSRFAWMTRKSEETITPWNFEEVVDKGASAQSFIERMTNFDKNLPNEKVLPKHSLLYEYFTVYNELTKVKYVTEGMRKPAFLSGEQKKAIVDLLFKTNRKVTVKQLKEDYFKKIECFDSVEISGVEDRFNASLGTYHDLLKIIKDKDFLDNEENEDILEDIVLTLTLFEDREMIEERLKTYAHLFDDKVMKQLKRRRYTGWGRLSRKLINGIRDKQSGKTILDFLKSDGFANRNFMQLIHDDSLTFKEDIQKAQVSGQGDSLHEHIANLAGSPAIKKGILQTVKVVDELVKVMGRHKPENIVIEMARENQTTQKGQKNSRERMKRIEEGIKELGSQILKEHPVENTQLQNEKLYLYYLQNGRDMYVDQELDINRLSDYDVDHIVPQSFLKDDSIDNKVLTRSDKARGKSDNVPSEEVVKKMKNYWRQLLNAKLITQRKFDNLTKAERGGLSELDKAGFIKRQLVETRQITKHVAQILDSRMNTKYDENDKLIREVKVITLKSKLVSDFRKDFQFYKVREINNYHHAHDAYLNAVVGTALIKKYPKLESEFVYGDYKVYDVRKMIAKSEQEIGKATAKYFFYSNIMNFFKTEITLANGEIRKRPLIETNGETGEIVWDKGRDFATVRKVLSMPQVNIVKKTEVQTGGFSKESILPKRNSDKLIARKKDWDPKKYGGFDSPTVAYSVLVVAKVEKGKSKKLKSVKELLGITIMERSSFEKNPIDFLEAKGYKEVKKDLIIKLPKYSLFELENGRKRMLASAGELQKGNELALPSKYVNFLYLASHYEKLKGSPEDNEQKQLFVEQHKHYLDEIIEQISEFSKRVILADANLDKVLSAYNKHRDKPIREQAENIIHLFTLTNLGAPAAFKYFDTTIDRKRYTSTKEVLDATLIHQSITGLYETRIDLSQLGGDGGPAPGSSEAAAKGGTLQLEEEYRLFEPESTQKQEMDIWLKNFPQAWAETGGMGTAHCQAPVLIQLKATATPISIRQYPMPHEAYQGIKPHIRRMLDQGILKPCQSPWNTPLLPVKKPGTEDYRPVQDLREVNKRVEDIHPTVPNPYNLLSTLPPSHPWYTVLDLKDAFFCLRLHSESQLLFAFEWRDPEIGLSGQLTWTRLPQGFKNSPTLFNEALHSDLADFRVRYPALVLLQYVDDLLLAAATRTECLEGTKALLETLGNKGYRASAKKAQICLQEVTYLGYSLKDGQRWLTKARKEAILSIPVPKNSRQVREFLGKAGYCRLFIPGFAELAAPLYPLTRPGTLFQWGTEQQLAFEDIKKALLSSPALGLPDITKPFELFIDENSGFAKGVLVQKLGPWKRPVAYLSKKLDTVASGWPPCLRMVAAIAILVKDAGKLTLGQPLTILTSHPVEALVRQPPNKWLSNARMTHYQAMLLDAERVHFGPTVSLNPATLLPLPSGGNHHDCLQILAETHGTRPDLTDQPLPDADLTWYTDGSSFIRNGEREAGAAVTTESEVIWAAPLPPGTSAQRAELIALTQALKMAEGKKLTVYTDSRYAFATTHVHGEIYRRRGWLTSEGKEIKNKNEILALLEALFLPKRLSIIHCPGHQKGDSPQAKGNRLADDTAKKAATETHSSLTVLPAGKRTADGSEFEKRTADGSEFESPKKKAKVE

SEQ ID NO: 1215 - protein, 2092 aa, synthetic construct
MPAAKRVKLDGGDKKYSIGLDIGTNSVGWAVITDEYKVPSKKFKVLGNTDRHSIKKNLIGALLFDSGETAEATRLKRTARRRYTRRKNRICYLQEIFSNEMAKVDDSFFHRLEESFLVEEDKKHERHPIFGNIVDEVAYHEKYPTIYHLRKKLVDSTDKADLRLIYLALAHMIKFRGHFLIEGDLNPDNSDVDKLFIQLVQTYNQLFEENPINASGVDAKAILSARLSKSRRLENLIAQLPGEKKNGLFGNLIALSLGLTPNFKSNFDLAEDAKLQLSKDTYDDDLDNLLAQIGDQYADLFLAAKNLSDAILLSDILRVNTEITKAPLSASMIKRYDEHHQDLTLLKALVRQQLPEKYKEIFFDQSKNGYAGYIDGGASQEEFYKFIKPILEKMDGTEELLVKLNREDLLRKQRTFDNGSIPHQIHLGELHAILRRQEDFYPFLKDNREKIEKILTFRIPYYVGPLARGNSRFAWMTRKSEETITPWNFEEVVDKGASAQSFIERMTNFDKNLPNEKVLPKHSLLYEYFTVYNELTKVKYVTEGMRKPAFLSGEQKKAIVDLLFKTNRKVTVKQLKEDYFKKIECFDSVEISGVEDRFNASLGTYHDLLKIIKDKDFLDNEENEDILEDIVLTLTLFEDREMIEERLKTYAHLFDDKVMKQLKRRRYTGWGRLSRKLINGIRDKQSGKTILDFLKSDGFANRNFMQLIHDDSLTFKEDIQKAQVSGQGDSLHEHIANLAGSPAIKKGILQTVKVVDELVKVMGRHKPENIVIEMARENQTTQKGQKNSRERMKRIEEGIKELGSQILKEHPVENTQLQNEKLYLYYLQNGRDMYVDQELDINRLSDYDVDHIVPQSFLKDDSIDNKVLTRSDKARGKSDNVPSEEVVKKMKNYWRQLLNAKLITQRKFDNLTKAERGGLSELDKAGFIKRQLVETRQITKHVAQILDSRMNTKYDENDKLIREVKVITLKSKLVSDFRKDFQFYKVREINNYHHAHDAYLNAVVGTALIKKYPKLESEFVYGDYKVYDVRKMIAKSEQEIGKATAKYFFYSNIMNFFKTEITLANGEIRKRPLIETNGETGEIVWDKGRDFATVRKVLSMPQVNIVKKTEVQTGGFSKESILPKRNSDKLIARKKDWDPKKYGGFDSPTVAYSVLVVAKVEKGKSKKLKSVKELLGITIMERSSFEKNPIDFLEAKGYKEVKKDLIIKLPKYSLFELENGRKRMLASAGELQKGNELALPSKYVNFLYLASHYEKLKGSPEDNEQKQLFVEQHKHYLDEIIEQISEFSKRVILADANLDKVLSAYNKHRDKPIREQAENIIHLFTLTNLGAPAAFKYFDTTIDRKRYTSTKEVLDATLIHQSITGLYETRIDLSQLGGDGGGGGGGGGGGGTLQLEEEYRLFEPESTQKQEMDIWLKNFPQAWAETGGMGTAHCQAPVLIQLKATATPISIRQYPMPHEAYQGIKPHIRRMLDQGILKPCQSPWNTPLLPVKKPGTEDYRPVQDLREVNKRVEDIHPTVPNPYNLLSTLPPSHPWYTVLDLKDAFFCLRLHSESQLLFAFEWRDPEIGLSGQLTWTRLPQGFKNSPTLFNEALHSDLADFRVRYPALVLLQYVDDLLLAAATRTECLEGTKALLETLGNKGYRASAKKAQICLQEVTYLGYSLKDGQRWLTKARKEAILSIPVPKNSRQVREFLGKAGYCRLFIPGFAELAAPLYPLTRPGTLFQWGTEQQLAFEDIKKALLSSPALGLPDITKPFELFIDENSGFAKGVLVQKLGPWKRPVAYLSKKLDTVASGWPPCLRMVAAIAILVKDAGKLTLGQPLTILTSHPVEALVRQPPNKWLSNARMTHYQAMLLDAERVHFGPTVSLNPATLLPLPSGGNHHDCLQILAETHGTRPDLTDQPLPDADLTWYTDGSSFIRNGEREAGAAVTTESEVIWAAPLPPGTSAQRAELIALTQALKMAEGKKLTVYTDSRYAFATTHVHGEIYRRRGWLTSEGKEIKNKNEILALLEALFLPKRLSIIHCPGHQKGDSPQAKGNRLADDTAKKAATETHSSLTVLPAGKRTADGSEFEKRTADGSEFESPKKKAKVE

SEQ ID NO: 1216 - protein, 2093 aa, synthetic construct
MPAAKRVKLDGGDKKYSIGLDIGTNSVGWAVITDEYKVPSKKFKVLGNTDRHSIKKNLIGALLFDSGETAEATRLKRTARRRYTRRKNRICYLQEIFSNEMAKVDDSFFHRLEESFLVEEDKKHERHPIFGNIVDEVAYHEKYPTIYHLRKKLVDSTDKADLRLIYLALAHMIKFRGHFLIEGDLNPDNSDVDKLFIQLVQTYNQLFEENPINASGVDAKAILSARLSKSRRLENLIAQLPGEKKNGLFGNLIALSLGLTPNFKSNFDLAEDAKLQLSKDTYDDDLDNLLAQIGDQYADLFLAAKNLSDAILLSDILRVNTEITKAPLSASMIKRYDEHHQDLTLLKALVRQQLPEKYKEIFFDQSKNGYAGYIDGGASQEEFYKFIKPILEKMDGTEELLVKLNREDLLRKQRTFDNGSIPHQIHLGELHAILRRQEDFYPFLKDNREKIEKILTFRIPYYVGPLARGNSRFAWMTRKSEETITPWNFEEVVDKGASAQSFIERMTNFDKNLPNEKVLPKHSLLYEYFTVYNELTKVKYVTEGMRKPAFLSGEQKKAIVDLLFKTNRKVTVKQLKEDYFKKIECFDSVEISGVEDRFNASLGTYHDLLKIIKDKDFLDNEENEDILEDIVLTLTLFEDREMIEERLKTYAHLFDDKVMKQLKRRRYTGWGRLSRKLINGIRDKQSGKTILDFLKSDGFANRNFMQLIHDDSLTFKEDIQKAQVSGQGDSLHEHIANLAGSPAIKKGILQTVKVVDELVKVMGRHKPENIVIEMARENQTTQKGQKNSRERMKRIEEGIKELGSQILKEHPVENTQLQNEKLYLYYLQNGRDMYVDQELDINRLSDYDVDHIVPQSFLKDDSIDNKVLTRSDKARGKSDNVPSEEVVKKMKNYWRQLLNAKLITQRKFDNLTKAERGGLSELDKAGFIKRQLVETRQITKHVAQILDSRMNTKYDENDKLIREVKVITLKSKLVSDFRKDFQFYKVREINNYHHAHDAYLNAVVGTALIKKYPKLESEFVYGDYKVYDVRKMIAKSEQEIGKATAKYFFYSNIMNFFKTEITLANGEIRKRPLIETNGETGEIVWDKGRDFATVRKVLSMPQVNIVKKTEVQTGGFSKESILPKRNSDKLIARKKDWDPKKYGGFDSPTVAYSVLVVAKVEKGKSKKLKSVKELLGITIMERSSFEKNPIDFLEAKGYKEVKKDLIIKLPKYSLFELENGRKRMLASAGELQKGNELALPSKYVNFLYLASHYEKLKGSPEDNEQKQLFVEQHKHYLDEIIEQISEFSKRVILADANLDKVLSAYNKHRDKPIREQAENIIHLFTLTNLGAPAAFKYFDTTIDRKRYTSTKEVLDATLIHQSITGLYETRIDLSQLGGDGGPAPAPAPAPGGTLQLEEEYRLFEPESTQKQEMDIWLKNFPQAWAETGGMGTAHCQAPVLIQLKATATPISIRQYPMPHEAYQGIKPHIRRMLDQGILKPCQSPWNTPLLPVKKPGTEDYRPVQDLREVNKRVEDIHPTVPNPYNLLSTLPPSHPWYTVLDLKDAFFCLRLHSESQLLFAFEWRDPEIGLSGQLTWTRLPQGFKNSPTLFNEALHSDLADFRVRYPALVLLQYVDDLLLAAATRTECLEGTKALLETLGNKGYRASAKKAQICLQEVTYLGYSLKDGQRWLTKARKEAILSIPVPKNSRQVREFLGKAGYCRLFIPGFAELAAPLYPLTRPGTLFQWGTEQQLAFEDIKKALLSSPALGLPDITKPFELFIDENSGFAKGVLVQKLGPWKRPVAYLSKKLDTVASGWPPCLRMVAAIAILVKDAGKLTLGQPLTILTSHPVEALVRQPPNKWLSNARMTHYQAMLLDAERVHFGPTVSLNPATLLPLPSGGNHHDCLQILAETHGTRPDLTDQPLPDADLTWYTDGSSFIRNGEREAGAAVTTESEVIWAAPLPPGTSAQRAELIALTQALKMAEGKKLTVYTDSRYAFATTHVHGEIYRRRGWLTSEGKEIKNKNEILALLEALFLPKRLSIIHCPGHQKGDSPQAKGNRLADDTAKKAATETHSSLTVLPAGKRTADGSEFEKRTADGSEFESPKKKAKVE

SEQ ID NO: 1217 - protein, 2089 aa, synthetic construct
MPAAKRVKLDGGDKKYSIGLDIGTNSVGWAVITDEYKVPSKKFKVLGNTDRHSIKKNLIGALLFDSGETAEATRLKRTARRRYTRRKNRICYLQEIFSNEMAKVDDSFFHRLEESFLVEEDKKHERHPIFGNIVDEVAYHEKYPTIYHLRKKLVDSTDKADLRLIYLALAHMIKFRGHFLIEGDLNPDNSDVDKLFIQLVQTYNQLFEENPINASGVDAKAILSARLSKSRRLENLIAQLPGEKKNGLFGNLIALSLGLTPNFKSNFDLAEDAKLQLSKDTYDDDLDNLLAQIGDQYADLFLAAKNLSDAILLSDILRVNTEITKAPLSASMIKRYDEHHQDLTLLKALVRQQLPEKYKEIFFDQSKNGYAGYIDGGASQEEFYKFIKPILEKMDGTEELLVKLNREDLLRKQRTFDNGSIPHQIHLGELHAILRRQEDFYPFLKDNREKIEKILTFRIPYYVGPLARGNSRFAWMTRKSEETITPWNFEEVVDKGASAQSFIERMTNFDKNLPNEKVLPKHSLLYEYFTVYNELTKVKYVTEGMRKPAFLSGEQKKAIVDLLFKTNRKVTVKQLKEDYFKKIECFDSVEISGVEDRFNASLGTYHDLLKIIKDKDFLDNEENEDILEDIVLTLTLFEDREMIEERLKTYAHLFDDKVMKQLKRRRYTGWGRLSRKLINGIRDKQSGKTILDFLKSDGFANRNFMQLIHDDSLTFKEDIQKAQVSGQGDSLHEHIANLAGSPAIKKGILQTVKVVDELVKVMGRHKPENIVIEMARENQTTQKGQKNSRERMKRIEEGIKELGSQILKEHPVENTQLQNEKLYLYYLQNGRDMYVDQELDINRLSDYDVDHIVPQSFLKDDSIDNKVLTRSDKARGKSDNVPSEEVVKKMKNYWRQLLNAKLITQRKFDNLTKAERGGLSELDKAGFIKRQLVETRQITKHVAQILDSRMNTKYDENDKLIREVKVITLKSKLVSDFRKDFQFYKVREINNYHHAHDAYLNAVVGTALIKKYPKLESEFVYGDYKVYDVRKMIAKSEQEIGKATAKYFFYSNIMNFFKTEITLANGEIRKRPLIETNGETGEIVWDKGRDFATVRKVLSMPQVNIVKKTEVQTGGFSKESILPKRNSDKLIARKKDWDPKKYGGFDSPTVAYSVLVVAKVEKGKSKKLKSVKELLGITIMERSSFEKNPIDFLEAKGYKEVKKDLIIKLPKYSLFELENGRKRMLASAGELQKGNELALPSKYVNFLYLASHYEKLKGSPEDNEQKQLFVEQHKHYLDEIIEQISEFSKRVILADANLDKVLSAYNKHRDKPIREQAENIIHLFTLTNLGAPAAFKYFDTTIDRKRYTSTKEVLDATLIHQSITGLYETRIDLSQLGGDGGGGGGGGGTLQLEEEYRLFEPESTQKQEMDIWLKNFPQAWAETGGMGTAHCQAPVLIQLKATATPISIRQYPMPHEAYQGIKPHIRRMLDQGILKPCQSPWNTPLLPVKKPGTEDYRPVQDLREVNKRVEDIHPTVPNPYNLLSTLPPSHPWYTVLDLKDAFFCLRLHSESQLLFAFEWRDPEIGLSGQLTWTRLPQGFKNSPTLFNEALHSDLADFRVRYPALVLLQYVDDLLLAAATRTECLEGTKALLETLGNKGYRASAKKAQICLQEVTYLGYSLKDGQRWLTKARKEAILSIPVPKNSRQVREFLGKAGYCRLFIPGFAELAAPLYPLTRPGTLFQWGTEQQLAFEDIKKALLSSPALGLPDITKPFELFIDENSGFAKGVLVQKLGPWKRPVAYLSKKLDTVASGWPPCLRMVAAIAILVKDAGKLTLGQPLTILTSHPVEALVRQPPNKWLSNARMTHYQAMLLDAERVHFGPTVSLNPATLLPLPSGGNHHDCLQILAETHGTRPDLTDQPLPDADLTWYTDGSSFIRNGEREAGAAVTTESEVIWAAPLPPGTSAQRAELIALTQALKMAEGKKLTVYTDSRYAFATTHVHGEIYRRRGWLTSEGKEIKNKNEILALLEALFLPKRLSIIHCPGHQKGDSPQAKGNRLADDTAKKAATETHSSLTVLPAGKRTADGSEFEKRTADGSEFESPKKKAKVE

SEQ ID NO: 1218 - protein, 2095 aa, synthetic construct
MPAAKRVKLDGGDKKYSIGLDIGTNSVGWAVITDEYKVPSKKFKVLGNTDRHSIKKNLIGALLFDSGETAEATRLKRTARRRYTRRKNRICYLQEIFSNEMAKVDDSFFHRLEESFLVEEDKKHERHPIFGNIVDEVAYHEKYPTIYHLRKKLVDSTDKADLRLIYLALAHMIKFRGHFLIEGDLNPDNSDVDKLFIQLVQTYNQLFEENPINASGVDAKAILSARLSKSRRLENLIAQLPGEKKNGLFGNLIALSLGLTPNFKSNFDLAEDAKLQLSKDTYDDDLDNLLAQIGDQYADLFLAAKNLSDAILLSDILRVNTEITKAPLSASMIKRYDEHHQDLTLLKALVRQQLPEKYKEIFFDQSKNGYAGYIDGGASQEEFYKFIKPILEKMDGTEELLVKLNREDLLRKQRTFDNGSIPHQIHLGELHAILRRQEDFYPFLKDNREKIEKILTFRIPYYVGPLARGNSRFAWMTRKSEETITPWNFEEVVDKGASAQSFIERMTNFDKNLPNEKVLPKHSLLYEYFTVYNELTKVKYVTEGMRKPAFLSGEQKKAIVDLLFKTNRKVTVKQLKEDYFKKIECFDSVEISGVEDRFNASLGTYHDLLKIIKDKDFLDNEENEDILEDIVLTLTLFEDREMIEERLKTYAHLFDDKVMKQLKRRRYTGWGRLSRKLINGIRDKQSGKTILDFLKSDGFANRNFMQLIHDDSLTFKEDIQKAQVSGQGDSLHEHIANLAGSPAIKKGILQTVKVVDELVKVMGRHKPENIVIEMARENQTTQKGQKNSRERMKRIEEGIKELGSQILKEHPVENTQLQNEKLYLYYLQNGRDMYVDQELDINRLSDYDVDHIVPQSFLKDDSIDNKVLTRSDKARGKSDNVPSEEVVKKMKNYWRQLLNAKLITQRKFDNLTKAERGGLSELDKAGFIKRQLVETRQITKHVAQILDSRMNTKYDENDKLIREVKVITLKSKLVSDFRKDFQFYKVREINNYHHAHDAYLNAVVGTALIKKYPKLESEFVYGDYKVYDVRKMIAKSEQEIGKATAKYFFYSNIMNFFKTEITLANGEIRKRPLIETNGETGEIVWDKGRDFATVRKVLSMPQVNIVKKTEVQTGGFSKESILPKRNSDKLIARKKDWDPKKYGGFDSPTVAYSVLVVAKVEKGKSKKLKSVKELLGITIMERSSFEKNPIDFLEAKGYKEVKKDLIIKLPKYSLFELENGRKRMLASAGELQKGNELALPSKYVNFLYLASHYEKLKGSPEDNEQKQLFVEQHKHYLDEIIEQISEFSKRVILADANLDKVLSAYNKHRDKPIREQAENIIHLFTLTNLGAPAAFKYFDTTIDRKRYTSTKEVLDATLIHQSITGLYETRIDLSQLGGDGGGSSEAAAKPAPGGTLQLEEEYRLFEPESTQKQEMDIWLKNFPQAWAETGGMGTAHCQAPVLIQLKATATPISIRQYPMPHEAYQGIKPHIRRMLDQGILKPCQSPWNTPLLPVKKPGTEDYRPVQDLREVNKRVEDIHPTVPNPYNLLSTLPPSHPWYTVLDLKDAFFCLRLHSESQLLFAFEWRDPEIGLSGQLTWTRLPQGFKNSPTLFNEALHSDLADFRVRYPALVLLQYVDDLLLAAATRTECLEGTKALLETLGNKGYRASAKKAQICLQEVTYLGYSLKDGQRWLTKARKEAILSIPVPKNSRQVREFLGKAGYCRLFIPGFAELAAPLYPLTRPGTLFQWGTEQQLAFEDIKKALLSSPALGLPDITKPFELFIDENSGFAKGVLVQKLGPWKRPVAYLSKKLDTVASGWPPCLRMVAAIAILVKDAGKLTLGQPLTILTSHPVEALVRQPPNKWLSNARMTHYQAMLLDAERVHFGPTVSLNPATLLPLPSGGNHHDCLQILAETHGTRPDLTDQPLPDADLTWYTDGSSFIRNGEREAGAAVTTESEVIWAAPLPPGTSAQRAELIALTQALKMAEGKKLTVYTDSRYAFATTHVHGEIYRRRGWLTSEGKEIKNKNEILALLEALFLPKRLSIIHCPGHQKGDSPQAKGNRLADDTAKKAATETHSSLTVLPAGKRTADGSEFEKRTADGSEFESPKKKAKVE

SEQ ID NO: 1219 - protein, 2097 aa, synthetic construct
MPAAKRVKLDGGDKKYSIGLDIGTNSVGWAVITDEYKVPSKKFKVLGNTDRHSIKKNLIGALLFDSGETAEATRLKRTARRRYTRRKNRICYLQEIFSNEMAKVDDSFFHRLEESFLVEEDKKHERHPIFGNIVDEVAYHEKYPTIYHLRKKLVDSTDKADLRLIYLALAHMIKFRGHFLIEGDLNPDNSDVDKLFIQLVQTYNQLFEENPINASGVDAKAILSARLSKSRRLENLIAQLPGEKKNGLFGNLIALSLGLTPNFKSNFDLAEDAKLQLSKDTYDDDLDNLLAQIGDQYADLFLAAKNLSDAILLSDILRVNTEITKAPLSASMIKRYDEHHQDLTLLKALVRQQLPEKYKEIFFDQSKNGYAGYIDGGASQEEFYKFIKPILEKMDGTEELLVKLNREDLLRKQRTFDNGSIPHQIHLGELHAILRRQEDFYPFLKDNREKIEKILTFRIPYYVGPLARGNSRFAWMTRKSEETITPWNFEEVVDKGASAQSFIERMTNFDKNLPNEKVLPKHSLLYEYFTVYNELTKVKYVTEGMRKPAFLSGEQKKAIVDLLFKTNRKVTVKQLKEDYFKKIECFDSVEISGVEDRFNASLGTYHDLLKIIKDKDFLDNEENEDILEDIVLTLTLFEDREMIEERLKTYAHLFDDKVMKQLKRRRYTGWGRLSRKLINGIRDKQSGKTILDFLKSDGFANRNFMQLIHDDSLTFKEDIQKAQVSGQGDSLHEHIANLAGSPAIKKGILQTVKVVDELVKVMGRHKPENIVIEMARENQTTQKGQKNSRERMKRIEEGIKELGSQILKEHPVENTQLQNEKLYLYYLQNGRDMYVDQELDINRLSDYDVDHIVPQSFLKDDSIDNKVLTRSDKARGKSDNVPSEEVVKKMKNYWRQLLNAKLITQRKFDNLTKAERGGLSELDKAGFIKRQLVETRQITKHVAQILDSRMNTKYDENDKLIREVKVITLKSKLVSDFRKDFQFYKVREINNYHHAHDAYLNAVVGTALIKKYPKLESEFVYGDYKVYDVRKMIAKSEQEIGKATAKYFFYSNIMNFFKTEITLANGEIRKRPLIETNGETGEIVWDKGRDFATVRKVLSMPQVNIVKKTEVQTGGFSKESILPKRNSDKLIARKKDWDPKKYGGFDSPTVAYSVLVVAKVEKGKSKKLKSVKELLGITIMERSSFEKNPIDFLEAKGYKEVKKDLIIKLPKYSLFELENGRKRMLASAGELQKGNELALPSKYVNFLYLASHYEKLKGSPEDNEQKQLFVEQHKHYLDEIIEQISEFSKRVILADANLDKVLSAYNKHRDKPIREQAENIIHLFTLTNLGAPAAFKYFDTTIDRKRYTSTKEVLDATLIHQSITGLYETRIDLSQLGGDGGPAPAPAPAPAPAPGGTLQLEEEYRLFEPESTQKQEMDIWLKNFPQAWAETGGMGTAHCQAPVLIQLKATATPISIRQYPMPHEAYQGIKPHIRRMLDQGILKPCQSPWNTPLLPVKKPGTEDYRPVQDLREVNKRVEDIHPTVPNPYNLLSTLPPSHPWYTVLDLKDAFFCLRLHSESQLLFAFEWRDPEIGLSGQLTWTRLPQGFKNSPTLFNEALHSDLADFRVRYPALVLLQYVDDLLLAAATRTECLEGTKALLETLGNKGYRASAKKAQICLQEVTYLGYSLKDGQRWLTKARKEAILSIPVPKNSRQVREFLGKAGYCRLFIPGFAELAAPLYPLTRPGTLFQWGTEQQLAFEDIKKALLSSPALGLPDITKPFELFIDENSGFAKGVLVQKLGPWKRPVAYLSKKLDTVASGWPPCLRMVAAIAILVKDAGKLTLGQPLTILTSHPVEALVRQPPNKWLSNARMTHYQAMLLDAERVHFGPTVSLNPATLLPLPSGGNHHDCLQILAETHGTRPDLTDQPLPDADLTWYTDGSSFIRNGEREAGAAVTTESEVIWAAPLPPGTSAQRAELIALTQALKMAEGKKLTVYTDSRYAFATTHVHGEIYRRRGWLTSEGKEIKNKNEILALLEALFLPKRLSIIHCPGHQKGDSPQAKGNRLADDTAKKAATETHSSLTVLPAGKRTADGSEFEKRTADGSEFESPKKKAKVE

SEQ ID NO: 1220 - protein, 2095 aa, synthetic construct
MPAAKRVKLDGGDKKYSIGLDIGTNSVGWAVITDEYKVPSKKFKVLGNTDRHSIKKNLIGALLFDSGETAEATRLKRTARRRYTRRKNRICYLQEIFSNEMAKVDDSFFHRLEESFLVEEDKKHERHPIFGNIVDEVAYHEKYPTIYHLRKKLVDSTDKADLRLIYLALAHMIKFRGHFLIEGDLNPDNSDVDKLFIQLVQTYNQLFEENPINASGVDAKAILSARLSKSRRLENLIAQLPGEKKNGLFGNLIALSLGLTPNFKSNFDLAEDAKLQLSKDTYDDDLDNLLAQIGDQYADLFLAAKNLSDAILLSDILRVNTEITKAPLSASMIKRYDEHHQDLTLLKALVRQQLPEKYKEIFFDQSKNGYAGYIDGGASQEEFYKFIKPILEKMDGTEELLVKLNREDLLRKQRTFDNGSIPHQIHLGELHAILRRQEDFYPFLKDNREKIEKILTFRIPYYVGPLARGNSRFAWMTRKSEETITPWNFEEVVDKGASAQSFIERMTNFDKNLPNEKVLPKHSLLYEYFTVYNELTKVKYVTEGMRKPAFLSGEQKKAIVDLLFKTNRKVTVKQLKEDYFKKIECFDSVEISGVEDRFNASLGTYHDLLKIIKDKDFLDNEENEDILEDIVLTLTLFEDREMIEERLKTYAHLFDDKVMKQLKRRRYTGWGRLSRKLINGIRDKQSGKTILDFLKSDGFANRNFMQLIHDDSLTFKEDIQKAQVSGQGDSLHEHIANLAGSPAIKKGILQTVKVVDELVKVMGRHKPENIVIEMARENQTTQKGQKNSRERMKRIEEGIKELGSQILKEHPVENTQLQNEKLYLYYLQNGRDMYVDQELDINRLSDYDVDHIVPQSFLKDDSIDNKVLTRSDKARGKSDNVPSEEVVKKMKNYWRQLLNAKLITQRKFDNLTKAERGGLSELDKAGFIKRQLVETRQITKHVAQILDSRMNTKYDENDKLIREVKVITLKSKLVSDFRKDFQFYKVREINNYHHAHDAYLNAVVGTALIKKYPKLESEFVYGDYKVYDVRKMIAKSEQEIGKATAKYFFYSNIMNFFKTEITLANGEIRKRPLIETNGETGEIVWDKGRDFATVRKVLSMPQVNIVKKTEVQTGGFSKESILPKRNSDKLIARKKDWDPKKYGGFDSPTVAYSVLVVAKVEKGKSKKLKSVKELLGITIMERSSFEKNPIDFLEAKGYKEVKKDLIIKLPKYSLFELENGRKRMLASAGELQKGNELALPSKYVNFLYLASHYEKLKGSPEDNEQKQLFVEQHKHYLDEIIEQISEFSKRVILADANLDKVLSAYNKHRDKPIREQAENIIHLFTLTNLGAPAAFKYFDTTIDRKRYTSTKEVLDATLIHQSITGLYETRIDLSQLGGDGGGGSGSSEAAAKGGTLQLEEEYRLFEPESTQKQEMDIWLKNFPQAWAETGGMGTAHCQAPVLIQLKATATPISIRQYPMPHEAYQGIKPHIRRMLDQGILKPCQSPWNTPLLPVKKPGTEDYRPVQDLREVNKRVEDIHPTVPNPYNLLSTLPPSHPWYTVLDLKDAFFCLRLHSESQLLFAFEWRDPEIGLSGQLTWTRLPQGFKNSPTLFNEALHSDLADFRVRYPALVLLQYVDDLLLAAATRTECLEGTKALLETLGNKGYRASAKKAQICLQEVTYLGYSLKDGQRWLTKARKEAILSIPVPKNSRQVREFLGKAGYCRLFIPGFAELAAPLYPLTRPGTLFQWGTEQQLAFEDIKKALLSSPALGLPDITKPFELFIDENSGFAKGVLVQKLGPWKRPVAYLSKKLDTVASGWPPCLRMVAAIAILVKDAGKLTLGQPLTILTSHPVEALVRQPPNKWLSNARMTHYQAMLLDAERVHFGPTVSLNPATLLPLPSGGNHHDCLQILAETHGTRPDLTDQPLPDADLTWYTDGSSFIRNGEREAGAAVTTESEVIWAAPLPPGTSAQRAELIALTQALKMAEGKKLTVYTDSRYAFATTHVHGEIYRRRGWLTSEGKEIKNKNEILALLEALFLPKRLSIIHCPGHQKGDSPQAKGNRLADDTAKKAATETHSSLTVLPAGKRTADGSEFEKRTADGSEFESPKKKAKVE

SEQ ID NO: 1221 - protein, 2095 aa, synthetic construct
MPAAKRVKLDGGDKKYSIGLDIGTNSVGWAVITDEYKVPSKKFKVLGNTDRHSIKKNLIGALLFDSGETAEATRLKRTARRRYTRRKNRICYLQEIFSNEMAKVDDSFFHRLEESFLVEEDKKHERHPIFGNIVDEVAYHEKYPTIYHLRKKLVDSTDKADLRLIYLALAHMIKFRGHFLIEGDLNPDNSDVDKLFIQLVQTYNQLFEENPINASGVDAKAILSARLSKSRRLENLIAQLPGEKKNGLFGNLIALSLGLTPNFKSNFDLAEDAKLQLSKDTYDDDLDNLLAQIGDQYADLFLAAKNLSDAILLSDILRVNTEITKAPLSASMIKRYDEHHQDLTLLKALVRQQLPEKYKEIFFDQSKNGYAGYIDGGASQEEFYKFIKPILEKMDGTEELLVKLNREDLLRKQRTFDNGSIPHQIHLGELHAILRRQEDFYPFLKDNREKIEKILTFRIPYYVGPLARGNSRFAWMTRKSEETITPWNFEEVVDKGASAQSFIERMTNFDKNLPNEKVLPKHSLLYEYFTVYNELTKVKYVTEGMRKPAFLSGEQKKAIVDLLFKTNRKVTVKQLKEDYFKKIECFDSVEISGVEDRFNASLGTYHDLLKIIKDKDFLDNEENEDILEDIVLTLTLFEDREMIEERLKTYAHLFDDKVMKQLKRRRYTGWGRLSRKLINGIRDKQSGKTILDFLKSDGFANRNFMQLIHDDSLTFKEDIQKAQVSGQGDSLHEHIANLAGSPAIKKGILQTVKVVDELVKVMGRHKPENIVIEMARENQTTQKGQKNSRERMKRIEEGIKELGSQILKEHPVENTQLQNEKLYLYYLQNGRDMYVDQELDINRLSDYDVDHIVPQSFLKDDSIDNKVLTRSDKARGKSDNVPSEEVVKKMKNYWRQLLNAKLITQRKFDNLTKAERGGLSELDKAGFIKRQLVETRQITKHVAQILDSRMNTKYDENDKLIREVKVITLKSKLVSDFRKDFQFYKVREINNYHHAHDAYLNAVVGTALIKKYPKLESEFVYGDYKVYDVRKMIAKSEQEIGKATAKYFFYSNIMNFFKTEITLANGEIRKRPLIETNGETGEIVWDKGRDFATVRKVLSMPQVNIVKKTEVQTGGFSKESILPKRNSDKLIARKKDWDPKKYGGFDSPTVAYSVLVVAKVEKGKSKKLKSVKELLGITIMERSSFEKNPIDFLEAKGYKEVKKDLIIKLPKYSLFELENGRKRMLASAGELQKGNELALPSKYVNFLYLASHYEKLKGSPEDNEQKQLFVEQHKHYLDEIIEQISEFSKRVILADANLDKVLSAYNKHRDKPIREQAENIIHLFTLTNLGAPAAFKYFDTTIDRKRYTSTKEVLDATLIHQSITGLYETRIDLSQLGGDGGGGGPAPEAAAKGGTLQLEEEYRLFEPESTQKQEMDIWLKNFPQAWAETGGMGTAHCQAPVLIQLKATATPISIRQYPMPHEAYQGIKPHIRRMLDQGILKPCQSPWNTPLLPVKKPGTEDYRPVQDLREVNKRVEDIHPTVPNPYNLLSTLPPSHPWYTVLDLKDAFFCLRLHSESQLLFAFEWRDPEIGLSGQLTWTRLPQGFKNSPTLFNEALHSDLADFRVRYPALVLLQYVDDLLLAAATRTECLEGTKALLETLGNKGYRASAKKAQICLQEVTYLGYSLKDGQRWLTKARKEAILSIPVPKNSRQVREFLGKAGYCRLFIPGFAELAAPLYPLTRPGTLFQWGTEQQLAFEDIKKALLSSPALGLPDITKPFELFIDENSGFAKGVLVQKLGPWKRPVAYLSKKLDTVASGWPPCLRMVAAIAILVKDAGKLTLGQPLTILTSHPVEALVRQPPNKWLSNARMTHYQAMLLDAERVHFGPTVSLNPATLLPLPSGGNHHDCLQILAETHGTRPDLTDQPLPDADLTWYTDGSSFIRNGEREAGAAVTTESEVIWAAPLPPGTSAQRAELIALTQALKMAEGKKLTVYTDSRYAFATTHVHGEIYRRRGWLTSEGKEIKNKNEILALLEALFLPKRLSIIHCPGHQKGDSPQAKGNRLADDTAKKAATETHSSLTVLPAGKRTADGSEFEKRTADGSEFESPKKKAKVE

SEQ ID NO: 1222 - protein, 2117 aa, synthetic construct
MPAAKRVKLDGGDKKYSIGLDIGTNSVGWAVITDEYKVPSKKFKVLGNTDRHSIKKNLIGALLFDSGETAEATRLKRTARRRYTRRKNRICYLQEIFSNEMAKVDDSFFHRLEESFLVEEDKKHERHPIFGNIVDEVAYHEKYPTIYHLRKKLVDSTDKADLRLIYLALAHMIKFRGHFLIEGDLNPDNSDVDKLFIQLVQTYNQLFEENPINASGVDAKAILSARLSKSRRLENLIAQLPGEKKNGLFGNLIALSLGLTPNFKSNFDLAEDAKLQLSKDTYDDDLDNLLAQIGDQYADLFLAAKNLSDAILLSDILRVNTEITKAPLSASMIKRYDEHHQDLTLLKALVRQQLPEKYKEIFFDQSKNGYAGYIDGGASQEEFYKFIKPILEKMDGTEELLVKLNREDLLRKQRTFDNGSIPHQIHLGELHAILRRQEDFYPFLKDNREKIEKILTFRIPYYVGPLARGNSRFAWMTRKSEETITPWNFEEVVDKGASAQSFIERMTNFDKNLPNEKVLPKHSLLYEYFTVYNELTKVKYVTEGMRKPAFLSGEQKKAIVDLLFKTNRKVTVKQLKEDYFKKIECFDSVEISGVEDRFNASLGTYHDLLKIIKDKDFLDNEENEDILEDIVLTLTLFEDREMIEERLKTYAHLFDDKVMKQLKRRRYTGWGRLSRKLINGIRDKQSGKTILDFLKSDGFANRNFMQLIHDDSLTFKEDIQKAQVSGQGDSLHEHIANLAGSPAIKKGILQTVKVVDELVKVMGRHKPENIVIEMARENQTTQKGQKNSRERMKRIEEGIKELGSQILKEHPVENTQLQNEKLYLYYLQNGRDMYVDQELDINRLSDYDVDHIVPQSFLKDDSIDNKVLTRSDKARGKSDNVPSEEVVKKMKNYWRQLLNAKLITQRKFDNLTKAERGGLSELDKAGFIKRQLVETRQITKHVAQILDSRMNTKYDENDKLIREVKVITLKSKLVSDFRKDFQFYKVREINNYHHAHDAYLNAVVGTALIKKYPKLESEFVYGDYKVYDVRKMIAKSEQEIGKATAKYFFYSNIMNFFKTEITLANGEIRKRPLIETNGETGEIVWDKGRDFATVRKVLSMPQVNIVKKTEVQTGGFSKESILPKRNSDKLIARKKDWDPKKYGGFDSPTVAYSVLVVAKVEKGKSKKLKSVKELLGITIMERSSFEKNPIDFLEAKGYKEVKKDLIIKLPKYSLFELENGRKRMLASAGELQKGNELALPSKYVNFLYLASHYEKLKGSPEDNEQKQLFVEQHKHYLDEIIEQISEFSKRVILADANLDKVLSAYNKHRDKPIREQAENIIHLFTLTNLGAPAAFKYFDTTIDRKRYTSTKEVLDATLIHQSITGLYETRIDLSQLGGDGGSGGSSGGSSGSETPGTSESATPESSGGSSGGSSGGTLQLEEEYRLFEPESTQKQEMDIWLKNFPQAWAETGGMGTAHCQAPVLIQLKATATPISIRQYPMPHEAYQGIKPHIRRMLDQGILKPCQSPWNTPLLPVKKPGTEDYRPVQDLREVNKRVEDIHPTVPNPYNLLSTLPPSHPWYTVLDLKDAFFCLRLHSESQLLFAFEWRDPEIGLSGQLTWTRLPQGFKNSPTLFNEALHSDLADFRVRYPALVLLQYVDDLLLAAATRTECLEGTKALLETLGNKGYRASAKKAQICLQEVTYLGYSLKDGQRWLTKARKEAILSIPVPKNSRQVREFLGKAGYCRLFIPGFAELAAPLYPLTRPGTLFQWGTEQQLAFEDIKKALLSSPALGLPDITKPFELFIDENSGFAKGVLVQKLGPWKRPVAYLSKKLDTVASGWPPCLRMVAAIAILVKDAGKLTLGQPLTILTSHPVEALVRQPPNKWLSNARMTHYQAMLLDAERVHFGPTVSLNPATLLPLPSGGNHHDCLQILAETHGTRPDLTDQPLPDADLTWYTDGSSFIRNGEREAGAAVTTESEVIWAAPLPPGTSAQRAELIALTQALKMAEGKKLTVYTDSRYAFATTHVHGEIYRRRGWLTSEGKEIKNKNEILALLEALFLPKRLSIIHCPGHQKGDSPQAKGNRLADDTAKKAATETHSSLTVLPAGKRTADGSEFEKRTADGSEFESPKKKAKVE

SEQ ID NO: 1223 - protein, 2087 aa, synthetic construct
MPAAKRVKLDGGDKKYSIGLDIGTNSVGWAVITDEYKVPSKKFKVLGNTDRHSIKKNLIGALLFDSGETAEATRLKRTARRRYTRRKNRICYLQEIFSNEMAKVDDSFFHRLEESFLVEEDKKHERHPIFGNIVDEVAYHEKYPTIYHLRKKLVDSTDKADLRLIYLALAHMIKFRGHFLIEGDLNPDNSDVDKLFIQLVQTYNQLFEENPINASGVDAKAILSARLSKSRRLENLIAQLPGEKKNGLFGNLIALSLGLTPNFKSNFDLAEDAKLQLSKDTYDDDLDNLLAQIGDQYADLFLAAKNLSDAILLSDILRVNTEITKAPLSASMIKRYDEHHQDLTLLKALVRQQLPEKYKEIFFDQSKNGYAGYIDGGASQEEFYKFIKPILEKMDGTEELLVKLNREDLLRKQRTFDNGSIPHQIHLGELHAILRRQEDFYPFLKDNREKIEKILTFRIPYYVGPLARGNSRFAWMTRKSEETITPWNFEEVVDKGASAQSFIERMTNFDKNLPNEKVLPKHSLLYEYFTVYNELTKVKYVTEGMRKPAFLSGEQKKAIVDLLFKTNRKVTVKQLKEDYFKKIECFDSVEISGVEDRFNASLGTYHDLLKIIKDKDFLDNEENEDILEDIVLTLTLFEDREMIEERLKTYAHLFDDKVMKQLKRRRYTGWGRLSRKLINGIRDKQSGKTILDFLKSDGFANRNFMQLIHDDSLTFKEDIQKAQVSGQGDSLHEHIANLAGSPAIKKGILQTVKVVDELVKVMGRHKPENIVIEMARENQTTQKGQKNSRERMKRIEEGIKELGSQILKEHPVENTQLQNEKLYLYYLQNGRDMYVDQELDINRLSDYDVDHIVPQSFLKDDSIDNKVLTRSDKARGKSDNVPSEEVVKKMKNYWRQLLNAKLITQRKFDNLTKAERGGLSELDKAGFIKRQLVETRQITKHVAQILDSRMNTKYDENDKLIREVKVITLKSKLVSDFRKDFQFYKVREINNYHHAHDAYLNAVVGTALIKKYPKLESEFVYGDYKVYDVRKMIAKSEQEIGKATAKYFFYSNIMNFFKTEITLANGEIRKRPLIETNGETGEIVWDKGRDFATVRKVLSMPQVNIVKKTEVQTGGFSKESILPKRNSDKLIARKKDWDPKKYGGFDSPTVAYSVLVVAKVEKGKSKKLKSVKELLGITIMERSSFEKNPIDFLEAKGYKEVKKDLIIKLPKYSLFELENGRKRMLASAGELQKGNELALPSKYVNFLYLASHYEKLKGSPEDNEQKQLFVEQHKHYLDEIIEQISEFSKRVILADANLDKVLSAYNKHRDKPIREQAENIIHLFTLTNLGAPAAFKYFDTTIDRKRYTSTKEVLDATLIHQSITGLYETRIDLSQLGGDGGPAPGGTLQLEEEYRLFEPESTQKQEMDIWLKNFPQAWAETGGMGTAHCQAPVLIQLKATATPISIRQYPMPHEAYQGIKPHIRRMLDQGILKPCQSPWNTPLLPVKKPGTEDYRPVQDLREVNKRVEDIHPTVPNPYNLLSTLPPSHPWYTVLDLKDAFFCLRLHSESQLLFAFEWRDPEIGLSGQLTWTRLPQGFKNSPTLFNEALHSDLADFRVRYPALVLLQYVDDLLLAAATRTECLEGTKALLETLGNKGYRASAKKAQICLQEVTYLGYSLKDGQRWLTKARKEAILSIPVPKNSRQVREFLGKAGYCRLFIPGFAELAAPLYPLTRPGTLFQWGTEQQLAFEDIKKALLSSPALGLPDITKPFELFIDENSGFAKGVLVQKLGPWKRPVAYLSKKLDTVASGWPPCLRMVAAIAILVKDAGKLTLGQPLTILTSHPVEALVRQPPNKWLSNARMTHYQAMLLDAERVHFGPTVSLNPATLLPLPSGGNHHDCLQILAETHGTRPDLTDQPLPDADLTWYTDGSSFIRNGEREAGAAVTTESEVIWAAPLPPGTSAQRAELIALTQALKMAEGKKLTVYTDSRYAFATTHVHGEIYRRRGWLTSEGKEIKNKNEILALLEALFLPKRLSIIHCPGHQKGDSPQAKGNRLADDTAKKAATETHSSLTVLPAGKRTADGSEFEKRTADGSEFESPKKKAKVE

SEQ ID NO: 1224 - protein, 2093 aa, synthetic construct
MPAAKRVKLDGGDKKYSIGLDIGTNSVGWAVITDEYKVPSKKFKVLGNTDRHSIKKNLIGALLFDSGETAEATRLKRTARRRYTRRKNRICYLQEIFSNEMAKVDDSFFHRLEESFLVEEDKKHERHPIFGNIVDEVAYHEKYPTIYHLRKKLVDSTDKADLRLIYLALAHMIKFRGHFLIEGDLNPDNSDVDKLFIQLVQTYNQLFEENPINASGVDAKAILSARLSKSRRLENLIAQLPGEKKNGLFGNLIALSLGLTPNFKSNFDLAEDAKLQLSKDTYDDDLDNLLAQIGDQYADLFLAAKNLSDAILLSDILRVNTEITKAPLSASMIKRYDEHHQDLTLLKALVRQQLPEKYKEIFFDQSKNGYAGYIDGGASQEEFYKFIKPILEKMDGTEELLVKLNREDLLRKQRTFDNGSIPHQIHLGELHAILRRQEDFYPFLKDNREKIEKILTFRIPYYVGPLARGNSRFAWMTRKSEETITPWNFEEVVDKGASAQSFIERMTNFDKNLPNEKVLPKHSLLYEYFTVYNELTKVKYVTEGMRKPAFLSGEQKKAIVDLLFKTNRKVTVKQLKEDYFKKIECFDSVEISGVEDRFNASLGTYHDLLKIIKDKDFLDNEENEDILEDIVLTLTLFEDREMIEERLKTYAHLFDDKVMKQLKRRRYTGWGRLSRKLINGIRDKQSGKTILDFLKSDGFANRNFMQLIHDDSLTFKEDIQKAQVSGQGDSLHEHIANLAGSPAIKKGILQTVKVVDELVKVMGRHKPENIVIEMARENQTTQKGQKNSRERMKRIEEGIKELGSQILKEHPVENTQLQNEKLYLYYLQNGRDMYVDQELDINRLSDYDVDHIVPQSFLKDDSIDNKVLTRSDKARGKSDNVPSEEVVKKMKNYWRQLLNAKLITQRKFDNLTKAERGGLSELDKAGFIKRQLVETRQITKHVAQILDSRMNTKYDENDKLIREVKVITLKSKLVSDFRKDFQFYKVREINNYHHAHDAYLNAVVGTALIKKYPKLESEFVYGDYKVYDVRKMIAKSEQEIGKATAKYFFYSNIMNFFKTEITLANGEIRKRPLIETNGETGEIVWDKGRDFATVRKVLSMPQVNIVKKTEVQTGGFSKESILPKRNSDKLIARKKDWDPKKYGGFDSPTVAYSVLVVAKVEKGKSKKLKSVKELLGITIMERSSFEKNPIDFLEAKGYKEVKKDLIIKLPKYSLFELENGRKRMLASAGELQKGNELALPSKYVNFLYLASHYEKLKGSPEDNEQKQLFVEQHKHYLDEIIEQISEFSKRVILADANLDKVLSAYNKHRDKPIREQAENIIHLFTLTNLGAPAAFKYFDTTIDRKRYTSTKEVLDATLIHQSITGLYETRIDLSQLGGDGGGSSPAPGGGGGTLQLEEEYRLFEPESTQKQEMDIWLKNFPQAWAETGGMGTAHCQAPVLIQLKATATPISIRQYPMPHEAYQGIKPHIRRMLDQGILKPCQSPWNTPLLPVKKPGTEDYRPVQDLREVNKRVEDIHPTVPNPYNLLSTLPPSHPWYTVLDLKDAFFCLRLHSESQLLFAFEWRDPEIGLSGQLTWTRLPQGFKNSPTLFNEALHSDLADFRVRYPALVLLQYVDDLLLAAATRTECLEGTKALLETLGNKGYRASAKKAQICLQEVTYLGYSLKDGQRWLTKARKEAILSIPVPKNSRQVREFLGKAGYCRLFIPGFAELAAPLYPLTRPGTLFQWGTEQQLAFEDIKKALLSSPALGLPDITKPFELFIDENSGFAKGVLVQKLGPWKRPVAYLSKKLDTVASGWPPCLRMVAAIAILVKDAGKLTLGQPLTILTSHPVEALVRQPPNKWLSNARMTHYQAMLLDAERVHFGPTVSLNPATLLPLPSGGNHHDCLQILAETHGTRPDLTDQPLPDADLTWYTDGSSFIRNGEREAGAAVTTESEVIWAAPLPPGTSAQRAELIALTQALKMAEGKKLTVYTDSRYAFATTHVHGEIYRRRGWLTSEGKEIKNKNEILALLEALFLPKRLSIIHCPGHQKGDSPQAKGNRLADDTAKKAATETHSSLTVLPAGKRTADGSEFEKRTADGSEFESPKKKAKVE

SEQ ID NO: 1225 - protein, 2095 aa, synthetic construct
MPAAKRVKLDGGDKKYSIGLDIGTNSVGWAVITDEYKVPSKKFKVLGNTDRHSIKKNLIGALLFDSGETAEATRLKRTARRRYTRRKNRICYLQEIFSNEMAKVDDSFFHRLEESFLVEEDKKHERHPIFGNIVDEVAYHEKYPTIYHLRKKLVDSTDKADLRLIYLALAHMIKFRGHFLIEGDLNPDNSDVDKLFIQLVQTYNQLFEENPINASGVDAKAILSARLSKSRRLENLIAQLPGEKKNGLFGNLIALSLGLTPNFKSNFDLAEDAKLQLSKDTYDDDLDNLLAQIGDQYADLFLAAKNLSDAILLSDILRVNTEITKAPLSASMIKRYDEHHQDLTLLKALVRQQLPEKYKEIFFDQSKNGYAGYIDGGASQEEFYKFIKPILEKMDGTEELLVKLNREDLLRKQRTFDNGSIPHQIHLGELHAILRRQEDFYPFLKDNREKIEKILTFRIPYYVGPLARGNSRFAWMTRKSEETITPWNFEEVVDKGASAQSFIERMTNFDKNLPNEKVLPKHSLLYEYFTVYNELTKVKYVTEGMRKPAFLSGEQKKAIVDLLFKTNRKVTVKQLKEDYFKKIECFDSVEISGVEDRFNASLGTYHDLLKIIKDKDFLDNEENEDILEDIVLTLTLFEDREMIEERLKTYAHLFDDKVMKQLKRRRYTGWGRLSRKLINGIRDKQSGKTILDFLKSDGFANRNFMQLIHDDSLTFKEDIQKAQVSGQGDSLHEHIANLAGSPAIKKGILQTVKVVDELVKVMGRHKPENIVIEMARENQTTQKGQKNSRERMKRIEEGIKELGSQILKEHPVENTQLQNEKLYLYYLQNGRDMYVDQELDINRLSDYDVDHIVPQSFLKDDSIDNKVLTRSDKARGKSDNVPSEEVVKKMKNYWRQLLNAKLITQRKFDNLTKAERGGLSELDKAGFIKRQLVETRQITKHVAQILDSRMNTKYDENDKLIREVKVITLKSKLVSDFRKDFQFYKVREINNYHHAHDAYLNAVVGTALIKKYPKLESEFVYGDYKVYDVRKMIAKSEQEIGKATAKYFFYSNIMNFFKTEITLANGEIRKRPLIETNGETGEIVWDKGRDFATVRKVLSMPQVNIVKKTEVQTGGFSKESILPKRNSDKLIARKKDWDPKKYGGFDSPTVAYSVLVVAKVEKGKSKKLKSVKELLGITIMERSSFEKNPIDFLEAKGYKEVKKDLIIKLPKYSLFELENGRKRMLASAGELQKGNELALPSKYVNFLYLASHYEKLKGSPEDNEQKQLFVEQHKHYLDEIIEQISEFSKRVILADANLDKVLSAYNKHRDKPIREQAENIIHLFTLTNLGAPAAFKYFDTTIDRKRYTSTKEVLDATLIHQSITGLYETRIDLSQLGGDGGGSSPAPEAAAKGGTLQLEEEYRLFEPESTQKQEMDIWLKNFPQAWAETGGMGTAHCQAPVLIQLKATATPISIRQYPMPHEAYQGIKPHIRRMLDQGILKPCQSPWNTPLLPVKKPGTEDYRPVQDLREVNKRVEDIHPTVPNPYNLLSTLPPSHPWYTVLDLKDAFFCLRLHSESQLLFAFEWRDPEIGLSGQLTWTRLPQGFKNSPTLFNEALHSDLADFRVRYPALVLLQYVDDLLLAAATRTECLEGTKALLETLGNKGYRASAKKAQICLQEVTYLGYSLKDGQRWLTKARKEAILSIPVPKNSRQVREFLGKAGYCRLFIPGFAELAAPLYPLTRPGTLFQWGTEQQLAFEDIKKALLSSPALGLPDITKPFELFIDENSGFAKGVLVQKLGPWKRPVAYLSKKLDTVASGWPPCLRMVAAIAILVKDAGKLTLGQPLTILTSHPVEALVRQPPNKWLSNARMTHYQAMLLDAERVHFGPTVSLNPATLLPLPSGGNHHDCLQILAETHGTRPDLTDQPLPDADLTWYTDGSSFIRNGEREAGAAVTTESEVIWAAPLPPGTSAQRAELIALTQALKMAEGKKLTVYTDSRYAFATTHVHGEIYRRRGWLTSEGKEIKNKNEILALLEALFLPKRLSIIHCPGHQKGDSPQAKGNRLADDTAKKAATETHSSLTVLPAGKRTADGSEFEKRTADGSEFESPKKKAKVE

SEQ ID NO: 1226 - protein, 2087 aa, synthetic construct
MPAAKRVKLDGGDKKYSIGLDIGTNSVGWAVITDEYKVPSKKFKVLGNTDRHSIKKNLIGALLFDSGETAEATRLKRTARRRYTRRKNRICYLQEIFSNEMAKVDDSFFHRLEESFLVEEDKKHERHPIFGNIVDEVAYHEKYPTIYHLRKKLVDSTDKADLRLIYLALAHMIKFRGHFLIEGDLNPDNSDVDKLFIQLVQTYNQLFEENPINASGVDAKAILSARLSKSRRLENLIAQLPGEKKNGLFGNLIALSLGLTPNFKSNFDLAEDAKLQLSKDTYDDDLDNLLAQIGDQYADLFLAAKNLSDAILLSDILRVNTEITKAPLSASMIKRYDEHHQDLTLLKALVRQQLPEKYKEIFFDQSKNGYAGYIDGGASQEEFYKFIKPILEKMDGTEELLVKLNREDLLRKQRTFDNGSIPHQIHLGELHAILRRQEDFYPFLKDNREKIEKILTFRIPYYVGPLARGNSRFAWMTRKSEETITPWNFEEVVDKGASAQSFIERMTNFDKNLPNEKVLPKHSLLYEYFTVYNELTKVKYVTEGMRKPAFLSGEQKKAIVDLLFKTNRKVTVKQLKEDYFKKIECFDSVEISGVEDRFNASLGTYHDLLKIIKDKDFLDNEENEDILEDIVLTLTLFEDREMIEERLKTYAHLFDDKVMKQLKRRRYTGWGRLSRKLINGIRDKQSGKTILDFLKSDGFANRNFMQLIHDDSLTFKEDIQKAQVSGQGDSLHEHIANLAGSPAIKKGILQTVKVVDELVKVMGRHKPENIVIEMARENQTTQKGQKNSRERMKRIEEGIKELGSQILKEHPVENTQLQNEKLYLYYLQNGRDMYVDQELDINRLSDYDVDHIVPQSFLKDDSIDNKVLTRSDKARGKSDNVPSEEVVKKMKNYWRQLLNAKLITQRKFDNLTKAERGGLSELDKAGFIKRQLVETRQITKHVAQILDSRMNTKYDENDKLIREVKVITLKSKLVSDFRKDFQFYKVREINNYHHAHDAYLNAVVGTALIKKYPKLESEFVYGDYKVYDVRKMIAKSEQEIGKATAKYFFYSNIMNFFKTEITLANGEIRKRPLIETNGETGEIVWDKGRDFATVRKVLSMPQVNIVKKTEVQTGGFSKESILPKRNSDKLIARKKDWDPKKYGGFDSPTVAYSVLVVAKVEKGKSKKLKSVKELLGITIMERSSFEKNPIDFLEAKGYKEVKKDLIIKLPKYSLFELENGRKRMLASAGELQKGNELALPSKYVNFLYLASHYEKLKGSPEDNEQKQLFVEQHKHYLDEIIEQISEFSKRVILADANLDKVLSAYNKHRDKPIREQAENIIHLFTLTNLGAPAAFKYFDTTIDRKRYTSTKEVLDATLIHQSITGLYETRIDLSQLGGDGGGSSGGTLQLEEEYRLFEPESTQKQEMDIWLKNFPQAWAETGGMGTAHCQAPVLIQLKATATPISIRQYPMPHEAYQGIKPHIRRMLDQGILKPCQSPWNTPLLPVKKPGTEDYRPVQDLREVNKRVEDIHPTVPNPYNLLSTLPPSHPWYTVLDLKDAFFCLRLHSESQLLFAFEWRDPEIGLSGQLTWTRLPQGFKNSPTLFNEALHSDLADFRVRYPALVLLQYVDDLLLAAATRTECLEGTKALLETLGNKGYRASAKKAQICLQEVTYLGYSLKDGQRWLTKARKEAILSIPVPKNSRQVREFLGKAGYCRLFIPGFAELAAPLYPLTRPGTLFQWGTEQQLAFEDIKKALLSSPALGLPDITKPFELFIDENSGFAKGVLVQKLGPWKRPVAYLSKKLDTVASGWPPCLRMVAAIAILVKDAGKLTLGQPLTILTSHPVEALVRQPPNKWLSNARMTHYQAMLLDAERVHFGPTVSLNPATLLPLPSGGNHHDCLQILAETHGTRPDLTDQPLPDADLTWYTDGSSFIRNGEREAGAAVTTESEVIWAAPLPPGTSAQRAELIALTQALKMAEGKKLTVYTDSRYAFATTHVHGEIYRRRGWLTSEGKEIKNKNEILALLEALFLPKRLSIIHCPGHQKGDSPQAKGNRLADDTAKKAATETHSSLTVLPAGKRTADGSEFEKRTADGSEFESPKKKAKVE

SEQ ID NO: 1227 - protein, 2095 aa, synthetic construct
MPAAKRVKLDGGDKKYSIGLDIGTNSVGWAVITDEYKVPSKKFKVLGNTDRHSIKKNLIGALLFDSGETAEATRLKRTARRRYTRRKNRICYLQEIFSNEMAKVDDSFFHRLEESFLVEEDKKHERHPIFGNIVDEVAYHEKYPTIYHLRKKLVDSTDKADLRLIYLALAHMIKFRGHFLIEGDLNPDNSDVDKLFIQLVQTYNQLFEENPINASGVDAKAILSARLSKSRRLENLIAQLPGEKKNGLFGNLIALSLGLTPNFKSNFDLAEDAKLQLSKDTYDDDLDNLLAQIGDQYADLFLAAKNLSDAILLSDILRVNTEITKAPLSASMIKRYDEHHQDLTLLKALVRQQLPEKYKEIFFDQSKNGYAGYIDGGASQEEFYKFIKPILEKMDGTEELLVKLNREDLLRKQRTFDNGSIPHQIHLGELHAILRRQEDFYPFLKDNREKIEKILTFRIPYYVGPLARGNSRFAWMTRKSEETITPWNFEEVVDKGASAQSFIERMTNFDKNLPNEKVLPKHSLLYEYFTVYNELTKVKYVTEGMRKPAFLSGEQKKAIVDLLFKTNRKVTVKQLKEDYFKKIECFDSVEISGVEDRFNASLGTYHDLLKIIKDKDFLDNEENEDILEDIVLTLTLFEDREMIEERLKTYAHLFDDKVMKQLKRRRYTGWGRLSRKLINGIRDKQSGKTILDFLKSDGFANRNFMQLIHDDSLTFKEDIQKAQVSGQGDSLHEHIANLAGSPAIKKGILQTVKVVDELVKVMGRHKPENIVIEMARENQTTQKGQKNSRERMKRIEEGIKELGSQILKEHPVENTQLQNEKLYLYYLQNGRDMYVDQELDINRLSDYDVDHIVPQSFLKDDSIDNKVLTRSDKARGKSDNVPSEEVVKKMKNYWRQLLNAKLITQRKFDNLTKAERGGLSELDKAGFIKRQLVETRQITKHVAQILDSRMNTKYDENDKLIREVKVITLKSKLVSDFRKDFQFYKVREINNYHHAHDAYLNAVVGTALIKKYPKLESEFVYGDYKVYDVRKMIAKSEQEIGKATAKYFFYSNIMNFFKTEITLANGEIRKRPLIETNGETGEIVWDKGRDFATVRKVLSMPQVNIVKKTEVQTGGFSKESILPKRNSDKLIARKKDWDPKKYGGFDSPTVAYSVLVVAKVEKGKSKKLKSVKELLGITIMERSSFEKNPIDFLEAKGYKEVKKDLIIKLPKYSLFELENGRKRMLASAGELQKGNELALPSKYVNFLYLASHYEKLKGSPEDNEQKQLFVEQHKHYLDEIIEQISEFSKRVILADANLDKVLSAYNKHRDKPIREQAENIIHLFTLTNLGAPAAFKYFDTTIDRKRYTSTKEVLDATLIHQSITGLYETRIDLSQLGGDGGGSSGGGEAAAKGGTLQLEEEYRLFEPESTQKQEMDIWLKNFPQAWAETGGMGTAHCQAPVLIQLKATATPISIRQYPMPHEAYQGIKPHIRRMLDQGILKPCQSPWNTPLLPVKKPGTEDYRPVQDLREVNKRVEDIHPTVPNPYNLLSTLPPSHPWYTVLDLKDAFFCLRLHSESQLLFAFEWRDPEIGLSGQLTWTRLPQGFKNSPTLFNEALHSDLADFRVRYPALVLLQYVDDLLLAAATRTECLEGTKALLETLGNKGYRASAKKAQICLQEVTYLGYSLKDGQRWLTKARKEAILSIPVPKNSRQVREFLGKAGYCRLFIPGFAELAAPLYPLTRPGTLFQWGTEQQLAFEDIKKALLSSPALGLPDITKPFELFIDENSGFAKGVLVQKLGPWKRPVAYLSKKLDTVASGWPPCLRMVAAIAILVKDAGKLTLGQPLTILTSHPVEALVRQPPNKWLSNARMTHYQAMLLDAERVHFGPTVSLNPATLLPLPSGGNHHDCLQILAETHGTRPDLTDQPLPDADLTWYTDGSSFIRNGEREAGAAVTTESEVIWAAPLPPGTSAQRAELIALTQALKMAEGKKLTVYTDSRYAFATTHVHGEIYRRRGWLTSEGKEIKNKNEILALLEALFLPKRLSIIHCPGHQKGDSPQAKGNRLADDTAKKAATETHSSLTVLPAGKRTADGSEFEKRTADGSEFESPKKKAKVE

SEQ ID NO: 1228 - protein, 2090 aa, synthetic construct
MPAAKRVKLDGGDKKYSIGLDIGTNSVGWAVITDEYKVPSKKFKVLGNTDRHSIKKNLIGALLFDSGETAEATRLKRTARRRYTRRKNRICYLQEIFSNEMAKVDDSFFHRLEESFLVEEDKKHERHPIFGNIVDEVAYHEKYPTIYHLRKKLVDSTDKADLRLIYLALAHMIKFRGHFLIEGDLNPDNSDVDKLFIQLVQTYNQLFEENPINASGVDAKAILSARLSKSRRLENLIAQLPGEKKNGLFGNLIALSLGLTPNFKSNFDLAEDAKLQLSKDTYDDDLDNLLAQIGDQYADLFLAAKNLSDAILLSDILRVNTEITKAPLSASMIKRYDEHHQDLTLLKALVRQQLPEKYKEIFFDQSKNGYAGYIDGGASQEEFYKFIKPILEKMDGTEELLVKLNREDLLRKQRTFDNGSIPHQIHLGELHAILRRQEDFYPFLKDNREKIEKILTFRIPYYVGPLARGNSRFAWMTRKSEETITPWNFEEVVDKGASAQSFIERMTNFDKNLPNEKVLPKHSLLYEYFTVYNELTKVKYVTEGMRKPAFLSGEQKKAIVDLLFKTNRKVTVKQLKEDYFKKIECFDSVEISGVEDRFNASLGTYHDLLKIIKDKDFLDNEENEDILEDIVLTLTLFEDREMIEERLKTYAHLFDDKVMKQLKRRRYTGWGRLSRKLINGIRDKQSGKTILDFLKSDGFANRNFMQLIHDDSLTFKEDIQKAQVSGQGDSLHEHIANLAGSPAIKKGILQTVKVVDELVKVMGRHKPENIVIEMARENQTTQKGQKNSRERMKRIEEGIKELGSQILKEHPVENTQLQNEKLYLYYLQNGRDMYVDQELDINRLSDYDVDHIVPQSFLKDDSIDNKVLTRSDKARGKSDNVPSEEVVKKMKNYWRQLLNAKLITQRKFDNLTKAERGGLSELDKAGFIKRQLVETRQITKHVAQILDSRMNTKYDENDKLIREVKVITLKSKLVSDFRKDFQFYKVREINNYHHAHDAYLNAVVGTALIKKYPKLESEFVYGDYKVYDVRKMIAKSEQEIGKATAKYFFYSNIMNFFKTEITLANGEIRKRPLIETNGETGEIVWDKGRDFATVRKVLSMPQVNIVKKTEVQTGGFSKESILPKRNSDKLIARKKDWDPKKYGGFDSPTVAYSVLVVAKVEKGKSKKLKSVKELLGITIMERSSFEKNPIDFLEAKGYKEVKKDLIIKLPKYSLFELENGRKRMLASAGELQKGNELALPSKYVNFLYLASHYEKLKGSPEDNEQKQLFVEQHKHYLDEIIEQISEFSKRVILADANLDKVLSAYNKHRDKPIREQAENIIHLFTLTNLGAPAAFKYFDTTIDRKRYTSTKEVLDATLIHQSITGLYETRIDLSQLGGDGGPAPGGSGGTLQLEEEYRLFEPESTQKQEMDIWLKNFPQAWAETGGMGTAHCQAPVLIQLKATATPISIRQYPMPHEAYQGIKPHIRRMLDQGILKPCQSPWNTPLLPVKKPGTEDYRPVQDLREVNKRVEDIHPTVPNPYNLLSTLPPSHPWYTVLDLKDAFFCLRLHSESQLLFAFEWRDPEIGLSGQLTWTRLPQGFKNSPTLFNEALHSDLADFRVRYPALVLLQYVDDLLLAAATRTECLEGTKALLETLGNKGYRASAKKAQICLQEVTYLGYSLKDGQRWLTKARKEAILSIPVPKNSRQVREFLGKAGYCRLFIPGFAELAAPLYPLTRPGTLFQWGTEQQLAFEDIKKALLSSPALGLPDITKPFELFIDENSGFAKGVLVQKLGPWKRPVAYLSKKLDTVASGWPPCLRMVAAIAILVKDAGKLTLGQPLTILTSHPVEALVRQPPNKWLSNARMTHYQAMLLDAERVHFGPTVSLNPATLLPLPSGGNHHDCLQILAETHGTRPDLTDQPLPDADLTWYTDGSSFIRNGEREAGAAVTTESEVIWAAPLPPGTSAQRAELIALTQALKMAEGKKLTVYTDSRYAFATTHVHGEIYRRRGWLTSEGKEIKNKNEILALLEALFLPKRLSIIHCPGHQKGDSPQAKGNRLADDTAKKAATETHSSLTVLPAGKRTADGSEFEKRTADGSEFESPKKKAKVE

SEQ ID NO: 1229 - protein, 2090 aa, synthetic construct
MPAAKRVKLDGGDKKYSIGLDIGTNSVGWAVITDEYKVPSKKFKVLGNTDRHSIKKNLIGALLFDSGETAEATRLKRTARRRYTRRKNRICYLQEIFSNEMAKVDDSFFHRLEESFLVEEDKKHERHPIFGNIVDEVAYHEKYPTIYHLRKKLVDSTDKADLRLIYLALAHMIKFRGHFLIEGDLNPDNSDVDKLFIQLVQTYNQLFEENPINASGVDAKAILSARLSKSRRLENLIAQLPGEKKNGLFGNLIALSLGLTPNFKSNFDLAEDAKLQLSKDTYDDDLDNLLAQIGDQYADLFLAAKNLSDAILLSDILRVNTEITKAPLSASMIKRYDEHHQDLTLLKALVRQQLPEKYKEIFFDQSKNGYAGYIDGGASQEEFYKFIKPILEKMDGTEELLVKLNREDLLRKQRTFDNGSIPHQIHLGELHAILRRQEDFYPFLKDNREKIEKILTFRIPYYVGPLARGNSRFAWMTRKSEETITPWNFEEVVDKGASAQSFIERMTNFDKNLPNEKVLPKHSLLYEYFTVYNELTKVKYVTEGMRKPAFLSGEQKKAIVDLLFKTNRKVTVKQLKEDYFKKIECFDSVEISGVEDRFNASLGTYHDLLKIIKDKDFLDNEENEDILEDIVLTLTLFEDREMIEERLKTYAHLFDDKVMKQLKRRRYTGWGRLSRKLINGIRDKQSGKTILDFLKSDGFANRNFMQLIHDDSLTFKEDIQKAQVSGQGDSLHEHIANLAGSPAIKKGILQTVKVVDELVKVMGRHKPENIVIEMARENQTTQKGQKNSRERMKRIEEGIKELGSQILKEHPVENTQLQNEKLYLYYLQNGRDMYVDQELDINRLSDYDVDHIVPQSFLKDDSIDNKVLTRSDKARGKSDNVPSEEVVKKMKNYWRQLLNAKLITQRKFDNLTKAERGGLSELDKAGFIKRQLVETRQITKHVAQILDSRMNTKYDENDKLIREVKVITLKSKLVSDFRKDFQFYKVREINNYHHAHDAYLNAVVGTALIKKYPKLESEFVYGDYKVYDVRKMIAKSEQEIGKATAKYFFYSNIMNFFKTEITLANGEIRKRPLIETNGETGEIVWDKGRDFATVRKVLSMPQVNIVKKTEVQTGGFSKESILPKRNSDKLIARKKDWDPKKYGGFDSPTVAYSVLVVAKVEKGKSKKLKSVKELLGITIMERSSFEKNPIDFLEAKGYKEVKKDLIIKLPKYSLFELENGRKRMLASAGELQKGNELALPSKYVNFLYLASHYEKLKGSPEDNEQKQLFVEQHKHYLDEIIEQISEFSKRVILADANLDKVLSAYNKHRDKPIREQAENIIHLFTLTNLGAPAAFKYFDTTIDRKRYTSTKEVLDATLIHQSITGLYETRIDLSQLGGDGGGGGPAPGGTLQLEEEYRLFEPESTQKQEMDIWLKNFPQAWAETGGMGTAHCQAPVLIQLKATATPISIRQYPMPHEAYQGIKPHIRRMLDQGILKPCQSPWNTPLLPVKKPGTEDYRPVQDLREVNKRVEDIHPTVPNPYNLLSTLPPSHPWYTVLDLKDAFFCLRLHSESQLLFAFEWRDPEIGLSGQLTWTRLPQGFKNSPTLFNEALHSDLADFRVRYPALVLLQYVDDLLLAAATRTECLEGTKALLETLGNKGYRASAKKAQICLQEVTYLGYSLKDGQRWLTKARKEAILSIPVPKNSRQVREFLGKAGYCRLFIPGFAELAAPLYPLTRPGTLFQWGTEQQLAFEDIKKALLSSPALGLPDITKPFELFIDENSGFAKGVLVQKLGPWKRPVAYLSKKLDTVASGWPPCLRMVAAIAILVKDAGKLTLGQPLTILTSHPVEALVRQPPNKWLSNARMTHYQAMLLDAERVHFGPTVSLNPATLLPLPSGGNHHDCLQILAETHGTRPDLTDQPLPDADLTWYTDGSSFIRNGEREAGAAVTTESEVIWAAPLPPGTSAQRAELIALTQALKMAEGKKLTVYTDSRYAFATTHVHGEIYRRRGWLTSEGKEIKNKNEILALLEALFLPKRLSIIHCPGHQKGDSPQAKGNRLADDTAKKAATETHSSLTVLPAGKRTADGSEFEKRTADGSEFESPKKKAKVE

SEQ ID NO: 1230 - protein, 2092 aa, synthetic construct
MPAAKRVKLDGGDKKYSIGLDIGTNSVGWAVITDEYKVPSKKFKVLGNTDRHSIKKNLIGALLFDSGETAEATRLKRTARRRYTRRKNRICYLQEIFSNEMAKVDDSFFHRLEESFLVEEDKKHERHPIFGNIVDEVAYHEKYPTIYHLRKKLVDSTDKADLRLIYLALAHMIKFRGHFLIEGDLNPDNSDVDKLFIQLVQTYNQLFEENPINASGVDAKAILSARLSKSRRLENLIAQLPGEKKNGLFGNLIALSLGLTPNFKSNFDLAEDAKLQLSKDTYDDDLDNLLAQIGDQYADLFLAAKNLSDAILLSDILRVNTEITKAPLSASMIKRYDEHHQDLTLLKALVRQQLPEKYKEIFFDQSKNGYAGYIDGGASQEEFYKFIKPILEKMDGTEELLVKLNREDLLRKQRTFDNGSIPHQIHLGELHAILRRQEDFYPFLKDNREKIEKILTFRIPYYVGPLARGNSRFAWMTRKSEETITPWNFEEVVDKGASAQSFIERMTNFDKNLPNEKVLPKHSLLYEYFTVYNELTKVKYVTEGMRKPAFLSGEQKKAIVDLLFKTNRKVTVKQLKEDYFKKIECFDSVEISGVEDRFNASLGTYHDLLKIIKDKDFLDNEENEDILEDIVLTLTLFEDREMIEERLKTYAHLFDDKVMKQLKRRRYTGWGRLSRKLINGIRDKQSGKTILDFLKSDGFANRNFMQLIHDDSLTFKEDIQKAQVSGQGDSLHEHIANLAGSPAIKKGILQTVKVVDELVKVMGRHKPENIVIEMARENQTTQKGQKNSRERMKRIEEGIKELGSQILKEHPVENTQLQNEKLYLYYLQNGRDMYVDQELDINRLSDYDVDHIVPQSFLKDDSIDNKVLTRSDKARGKSDNVPSEEVVKKMKNYWRQLLNAKLITQRKFDNLTKAERGGLSELDKAGFIKRQLVETRQITKHVAQILDSRMNTKYDENDKLIREVKVITLKSKLVSDFRKDFQFYKVREINNYHHAHDAYLNAVVGTALIKKYPKLESEFVYGDYKVYDVRKMIAKSEQEIGKATAKYFFYSNIMNFFKTEITLANGEIRKRPLIETNGETGEIVWDKGRDFATVRKVLSMPQVNIVKKTEVQTGGFSKESILPKRNSDKLIARKKDWDPKKYGGFDSPTVAYSVLVVAKVEKGKSKKLKSVKELLGITIMERSSFEKNPIDFLEAKGYKEVKKDLIIKLPKYSLFELENGRKRMLASAGELQKGNELALPSKYVNFLYLASHYEKLKGSPEDNEQKQLFVEQHKHYLDEIIEQISEFSKRVILADANLDKVLSAYNKHRDKPIREQAENIIHLFTLTNLGAPAAFKYFDTTIDRKRYTSTKEVLDATLIHQSITGLYETRIDLSQLGGDGGPAPEAAAKGGTLQLEEEYRLFEPESTQKQEMDIWLKNFPQAWAETGGMGTAHCQAPVLIQLKATATPISIRQYPMPHEAYQGIKPHIRRMLDQGILKPCQSPWNTPLLPVKKPGTEDYRPVQDLREVNKRVEDIHPTVPNPYNLLSTLPPSHPWYTVLDLKDAFFCLRLHSESQLLFAFEWRDPEIGLSGQLTWTRLPQGFKNSPTLFNEALHSDLADFRVRYPALVLLQYVDDLLLAAATRTECLEGTKALLETLGNKGYRASAKKAQICLQEVTYLGYSLKDGQRWLTKARKEAILSIPVPKNSRQVREFLGKAGYCRLFIPGFAELAAPLYPLTRPGTLFQWGTEQQLAFEDIKKALLSSPALGLPDITKPFELFIDENSGFAKGVLVQKLGPWKRPVAYLSKKLDTVASGWPPCLRMVAAIAILVKDAGKLTLGQPLTILTSHPVEALVRQPPNKWLSNARMTHYQAMLLDAERVHFGPTVSLNPATLLPLPSGGNHHDCLQILAETHGTRPDLTDQPLPDADLTWYTDGSSFIRNGEREAGAAVTTESEVIWAAPLPPGTSAQRAELIALTQALKMAEGKKLTVYTDSRYAFATTHVHGEIYRRRGWLTSEGKEIKNKNEILALLEALFLPKRLSIIHCPGHQKGDSPQAKGNRLADDTAKKAATETHSSLTVLPAGKRTADGSEFEKRTADGSEFESPKKKAKVE

SEQ ID NO: 1231 - protein, 2099 aa, synthetic construct
MPAAKRVKLDGGDKKYSIGLDIGTNSVGWAVITDEYKVPSKKFKVLGNTDRHSIKKNLIGALLFDSGETAEATRLKRTARRRYTRRKNRICYLQEIFSNEMAKVDDSFFHRLEESFLVEEDKKHERHPIFGNIVDEVAYHEKYPTIYHLRKKLVDSTDKADLRLIYLALAHMIKFRGHFLIEGDLNPDNSDVDKLFIQLVQTYNQLFEENPINASGVDAKAILSARLSKSRRLENLIAQLPGEKKNGLFGNLIALSLGLTPNFKSNFDLAEDAKLQLSKDTYDDDLDNLLAQIGDQYADLFLAAKNLSDAILLSDILRVNTEITKAPLSASMIKRYDEHHQDLTLLKALVRQQLPEKYKEIFFDQSKNGYAGYIDGGASQEEFYKFIKPILEKMDGTEELLVKLNREDLLRKQRTFDNGSIPHQIHLGELHAILRRQEDFYPFLKDNREKIEKILTFRIPYYVGPLARGNSRFAWMTRKSEETITPWNFEEVVDKGASAQSFIERMTNFDKNLPNEKVLPKHSLLYEYFTVYNELTKVKYVTEGMRKPAFLSGEQKKAIVDLLFKTNRKVTVKQLKEDYFKKIECFDSVEISGVEDRFNASLGTYHDLLKIIKDKDFLDNEENEDILEDIVLTLTLFEDREMIEERLKTYAHLFDDKVMKQLKRRRYTGWGRLSRKLINGIRDKQSGKTILDFLKSDGFANRNFMQLIHDDSLTFKEDIQKAQVSGQGDSLHEHIANLAGSPAIKKGILQTVKVVDELVKVMGRHKPENIVIEMARENQTTQKGQKNSRERMKRIEEGIKELGSQILKEHPVENTQLQNEKLYLYYLQNGRDMYVDQELDINRLSDYDVDHIVPQSFLKDDSIDNKVLTRSDKARGKSDNVPSEEVVKKMKNYWRQLLNAKLITQRKFDNLTKAERGGLSELDKAGFIKRQLVETRQITKHVAQILDSRMNTKYDENDKLIREVKVITLKSKLVSDFRKDFQFYKVREINNYHHAHDAYLNAVVGTALIKKYPKLESEFVYGDYKVYDVRKMIAKSEQEIGKATAKYFFYSNIMNFFKTEITLANGEIRKRPLIETNGETGEIVWDKGRDFATVRKVLSMPQVNIVKKTEVQTGGFSKESILPKRNSDKLIARKKDWDPKKYGGFDSPTVAYSVLVVAKVEKGKSKKLKSVKELLGITIMERSSFEKNPIDFLEAKGYKEVKKDLIIKLPKYSLFELENGRKRMLASAGELQKGNELALPSKYVNFLYLASHYEKLKGSPEDNEQKQLFVEQHKHYLDEIIEQISEFSKRVILADANLDKVLSAYNKHRDKPIREQAENIIHLFTLTNLGAPAAFKYFDTTIDRKRYTSTKEVLDATLIHQSITGLYETRIDLSQLGGDGGGGGGSGGGGSGGGGSGGTLQLEEEYRLFEPESTQKQEMDIWLKNFPQAWAETGGMGTAHCQAPVLIQLKATATPISIRQYPMPHEAYQGIKPHIRRMLDQGILKPCQSPWNTPLLPVKKPGTEDYRPVQDLREVNKRVEDIHPTVPNPYNLLSTLPPSHPWYTVLDLKDAFFCLRLHSESQLLFAFEWRDPEIGLSGQLTWTRLPQGFKNSPTLFNEALHSDLADFRVRYPALVLLQYVDDLLLAAATRTECLEGTKALLETLGNKGYRASAKKAQICLQEVTYLGYSLKDGQRWLTKARKEAILSIPVPKNSRQVREFLGKAGYCRLFIPGFAELAAPLYPLTRPGTLFQWGTEQQLAFEDIKKALLSSPALGLPDITKPFELFIDENSGFAKGVLVQKLGPWKRPVAYLSKKLDTVASGWPPCLRMVAAIAILVKDAGKLTLGQPLTILTSHPVEALVRQPPNKWLSNARMTHYQAMLLDAERVHFGPTVSLNPATLLPLPSGGNHHDCLQILAETHGTRPDLTDQPLPDADLTWYTDGSSFIRNGEREAGAAVTTESEVIWAAPLPPGTSAQRAELIALTQALKMAEGKKLTVYTDSRYAFATTHVHGEIYRRRGWLTSEGKEIKNKNEILALLEALFLPKRLSIIHCPGHQKGDSPQAKGNRLADDTAKKAATETHSSLTVLPAGKRTADGSEFEKRTADGSEFESPKKKAKVE

SEQ ID NO: 1232 - protein, 2095 aa, synthetic construct
MPAAKRVKLDGGDKKYSIGLDIGTNSVGWAVITDEYKVPSKKFKVLGNTDRHSIKKNLIGALLFDSGETAEATRLKRTARRRYTRRKNRICYLQEIFSNEMAKVDDSFFHRLEESFLVEEDKKHERHPIFGNIVDEVAYHEKYPTIYHLRKKLVDSTDKADLRLIYLALAHMIKFRGHFLIEGDLNPDNSDVDKLFIQLVQTYNQLFEENPINASGVDAKAILSARLSKSRRLENLIAQLPGEKKNGLFGNLIALSLGLTPNFKSNFDLAEDAKLQLSKDTYDDDLDNLLAQIGDQYADLFLAAKNLSDAILLSDILRVNTEITKAPLSASMIKRYDEHHQDLTLLKALVRQQLPEKYKEIFFDQSKNGYAGYIDGGASQEEFYKFIKPILEKMDGTEELLVKLNREDLLRKQRTFDNGSIPHQIHLGELHAILRRQEDFYPFLKDNREKIEKILTFRIPYYVGPLARGNSRFAWMTRKSEETITPWNFEEVVDKGASAQSFIERMTNFDKNLPNEKVLPKHSLLYEYFTVYNELTKVKYVTEGMRKPAFLSGEQKKAIVDLLFKTNRKVTVKQLKEDYFKKIECFDSVEISGVEDRFNASLGTYHDLLKIIKDKDFLDNEENEDILEDIVLTLTLFEDREMIEERLKTYAHLFDDKVMKQLKRRRYTGWGRLSRKLINGIRDKQSGKTILDFLKSDGFANRNFMQLIHDDSLTFKEDIQKAQVSGQGDSLHEHIANLAGSPAIKKGILQTVKVVDELVKVMGRHKPENIVIEMARENQTTQKGQKNSRERMKRIEEGIKELGSQILKEHPVENTQLQNEKLYLYYLQNGRDMYVDQELDINRLSDYDVDHIVPQSFLKDDSIDNKVLTRSDKARGKSDNVPSEEVVKKMKNYWRQLLNAKLITQRKFDNLTKAERGGLSELDKAGFIKRQLVETRQITKHVAQILDSRMNTKYDENDKLIREVKVITLKSKLVSDFRKDFQFYKVREINNYHHAHDAYLNAVVGTALIKKYPKLESEFVYGDYKVYDVRKMIAKSEQEIGKATAKYFFYSNIMNFFKTEITLANGEIRKRPLIETNGETGEIVWDKGRDFATVRKVLSMPQVNIVKKTEVQTGGFSKESILPKRNSDKLIARKKDWDPKKYGGFDSPTVAYSVLVVAKVEKGKSKKLKSVKELLGITIMERSSFEKNPIDFLEAKGYKEVKKDLIIKLPKYSLFELENGRKRMLASAGELQKGNELALPSKYVNFLYLASHYEKLKGSPEDNEQKQLFVEQHKHYLDEIIEQISEFSKRVILADANLDKVLSAYNKHRDKPIREQAENIIHLFTLTNLGAPAAFKYFDTTIDRKRYTSTKEVLDATLIHQSITGLYETRIDLSQLGGDGGPAPAPAPAPAPGGTLQLEEEYRLFEPESTQKQEMDIWLKNFPQAWAETGGMGTAHCQAPVLIQLKATATPISIRQYPMPHEAYQGIKPHIRRMLDQGILKPCQSPWNTPLLPVKKPGTEDYRPVQDLREVNKRVEDIHPTVPNPYNLLSTLPPSHPWYTVLDLKDAFFCLRLHSESQLLFAFEWRDPEIGLSGQLTWTRLPQGFKNSPTLFNEALHSDLADFRVRYPALVLLQYVDDLLLAAATRTECLEGTKALLETLGNKGYRASAKKAQICLQEVTYLGYSLKDGQRWLTKARKEAILSIPVPKNSRQVREFLGKAGYCRLFIPGFAELAAPLYPLTRPGTLFQWGTEQQLAFEDIKKALLSSPALGLPDITKPFELFIDENSGFAKGVLVQKLGPWKRPVAYLSKKLDTVASGWPPCLRMVAAIAILVKDAGKLTLGQPLTILTSHPVEALVRQPPNKWLSNARMTHYQAMLLDAERVHFGPTVSLNPATLLPLPSGGNHHDCLQILAETHGTRPDLTDQPLPDADLTWYTDGSSFIRNGEREAGAAVTTESEVIWAAPLPPGTSAQRAELIALTQALKMAEGKKLTVYTDSRYAFATTHVHGEIYRRRGWLTSEGKEIKNKNEILALLEALFLPKRLSIIHCPGHQKGDSPQAKGNRLADDTAKKAATETHSSLTVLPAGKRTADGSEFEKRTADGSEFESPKKKAKVE

SEQ ID NO: 1233 - protein, 2094 aa, synthetic construct
MPAAKRVKLDGGDKKYSIGLDIGTNSVGWAVITDEYKVPSKKFKVLGNTDRHSIKKNLIGALLFDSGETAEATRLKRTARRRYTRRKNRICYLQEIFSNEMAKVDDSFFHRLEESFLVEEDKKHERHPIFGNIVDEVAYHEKYPTIYHLRKKLVDSTDKADLRLIYLALAHMIKFRGHFLIEGDLNPDNSDVDKLFIQLVQTYNQLFEENPINASGVDAKAILSARLSKSRRLENLIAQLPGEKKNGLFGNLIALSLGLTPNFKSNFDLAEDAKLQLSKDTYDDDLDNLLAQIGDQYADLFLAAKNLSDAILLSDILRVNTEITKAPLSASMIKRYDEHHQDLTLLKALVRQQLPEKYKEIFFDQSKNGYAGYIDGGASQEEFYKFIKPILEKMDGTEELLVKLNREDLLRKQRTFDNGSIPHQIHLGELHAILRRQEDFYPFLKDNREKIEKILTFRIPYYVGPLARGNSRFAWMTRKSEETITPWNFEEVVDKGASAQSFIERMTNFDKNLPNEKVLPKHSLLYEYFTVYNELTKVKYVTEGMRKPAFLSGEQKKAIVDLLFKTNRKVTVKQLKEDYFKKIECFDSVEISGVEDRFNASLGTYHDLLKIIKDKDFLDNEENEDILEDIVLTLTLFEDREMIEERLKTYAHLFDDKVMKQLKRRRYTGWGRLSRKLINGIRDKQSGKTILDFLKSDGFANRNFMQLIHDDSLTFKEDIQKAQVSGQGDSLHEHIANLAGSPAIKKGILQTVKVVDELVKVMGRHKPENIVIEMARENQTTQKGQKNSRERMKRIEEGIKELGSQILKEHPVENTQLQNEKLYLYYLQNGRDMYVDQELDINRLSDYDVDHIVPQSFLKDDSIDNKVLTRSDKARGKSDNVPSEEVVKKMKNYWRQLLNAKLITQRKFDNLTKAERGGLSELDKAGFIKRQLVETRQITKHVAQILDSRMNTKYDENDKLIREVKVITLKSKLVSDFRKDFQFYKVREINNYHHAHDAYLNAVVGTALIKKYPKLESEFVYGDYKVYDVRKMIAKSEQEIGKATAKYFFYSNIMNFFKTEITLANGEIRKRPLIETNGETGEIVWDKGRDFATVRKVLSMPQVNIVKKTEVQTGGFSKESILPKRNSDKLIARKKDWDPKKYGGFDSPTVAYSVLVVAKVEKGKSKKLKSVKELLGITIMERSSFEKNPIDFLEAKGYKEVKKDLIIKLPKYSLFELENGRKRMLASAGELQKGNELALPSKYVNFLYLASHYEKLKGSPEDNEQKQLFVEQHKHYLDEIIEQISEFSKRVILADANLDKVLSAYNKHRDKPIREQAENIIHLFTLTNLGAPAAFKYFDTTIDRKRYTSTKEVLDATLIHQSITGLYETRIDLSQLGGDGGGGGGSGGGGSGGTLQLEEEYRLFEPESTQKQEMDIWLKNFPQAWAETGGMGTAHCQAPVLIQLKATATPISIRQYPMPHEAYQGIKPHIRRMLDQGILKPCQSPWNTPLLPVKKPGTEDYRPVQDLREVNKRVEDIHPTVPNPYNLLSTLPPSHPWYTVLDLKDAFFCLRLHSESQLLFAFEWRDPEIGLSGQLTWTRLPQGFKNSPTLFNEALHSDLADFRVRYPALVLLQYVDDLLLAAATRTECLEGTKALLETLGNKGYRASAKKAQICLQEVTYLGYSLKDGQRWLTKARKEAILSIPVPKNSRQVREFLGKAGYCRLFIPGFAELAAPLYPLTRPGTLFQWGTEQQLAFEDIKKALLSSPALGLPDITKPFELFIDENSGFAKGVLVQKLGPWKRPVAYLSKKLDTVASGWPPCLRMVAAIAILVKDAGKLTLGQPLTILTSHPVEALVRQPPNKWLSNARMTHYQAMLLDAERVHFGPTVSLNPATLLPLPSGGNHHDCLQILAETHGTRPDLTDQPLPDADLTWYTDGSSFIRNGEREAGAAVTTESEVIWAAPLPPGTSAQRAELIALTQALKMAEGKKLTVYTDSRYAFATTHVHGEIYRRRGWLTSEGKEIKNKNEILALLEALFLPKRLSIIHCPGHQKGDSPQAKGNRLADDTAKKAATETHSSLTVLPAGKRTADGSEFEKRTADGSEFESPKKKAKVE

SEQ ID NO: 1234 - protein, 2095 aa, synthetic construct
MPAAKRVKLDGGDKKYSIGLDIGTNSVGWAVITDEYKVPSKKFKVLGNTDRHSIKKNLIGALLFDSGETAEATRLKRTARRRYTRRKNRICYLQEIFSNEMAKVDDSFFHRLEESFLVEEDKKHERHPIFGNIVDEVAYHEKYPTIYHLRKKLVDSTDKADLRLIYLALAHMIKFRGHFLIEGDLNPDNSDVDKLFIQLVQTYNQLFEENPINASGVDAKAILSARLSKSRRLENLIAQLPGEKKNGLFGNLIALSLGLTPNFKSNFDLAEDAKLQLSKDTYDDDLDNLLAQIGDQYADLFLAAKNLSDAILLSDILRVNTEITKAPLSASMIKRYDEHHQDLTLLKALVRQQLPEKYKEIFFDQSKNGYAGYIDGGASQEEFYKFIKPILEKMDGTEELLVKLNREDLLRKQRTFDNGSIPHQIHLGELHAILRRQEDFYPFLKDNREKIEKILTFRIPYYVGPLARGNSRFAWMTRKSEETITPWNFEEVVDKGASAQSFIERMTNFDKNLPNEKVLPKHSLLYEYFTVYNELTKVKYVTEGMRKPAFLSGEQKKAIVDLLFKTNRKVTVKQLKEDYFKKIECFDSVEISGVEDRFNASLGTYHDLLKIIKDKDFLDNEENEDILEDIVLTLTLFEDREMIEERLKTYAHLFDDKVMKQLKRRRYTGWGRLSRKLINGIRDKQSGKTILDFLKSDGFANRNFMQLIHDDSLTFKEDIQKAQVSGQGDSLHEHIANLAGSPAIKKGILQTVKVVDELVKVMGRHKPENIVIEMARENQTTQKGQKNSRERMKRIEEGIKELGSQILKEHPVENTQLQNEKLYLYYLQNGRDMYVDQELDINRLSDYDVDHIVPQSFLKDDSIDNKVLTRSDKARGKSDNVPSEEVVKKMKNYWRQLLNAKLITQRKFDNLTKAERGGLSELDKAGFIKRQLVETRQITKHVAQILDSRMNTKYDENDKLIREVKVITLKSKLVSDFRKDFQFYKVREINNYHHAHDAYLNAVVGTALIKKYPKLESEFVYGDYKVYDVRKMIAKSEQEIGKATAKYFFYSNIMNFFKTEITLANGEIRKRPLIETNGETGEIVWDKGRDFATVRKVLSMPQVNIVKKTEVQTGGFSKESILPKRNSDKLIARKKDWDPKKYGGFDSPTVAYSVLVVAKVEKGKSKKLKSVKELLGITIMERSSFEKNPIDFLEAKGYKEVKKDLIIKLPKYSLFELENGRKRMLASAGELQKGNELALPSKYVNFLYLASHYEKLKGSPEDNEQKQLFVEQHKHYLDEIIEQISEFSKRVILADANLDKVLSAYNKHRDKPIREQAENIIHLFTLTNLGAPAAFKYFDTTIDRKRYTSTKEVLDATLIHQSITGLYETRIDLSQLGGDGGEAAAKGSSGGSGGTLQLEEEYRLFEPESTQKQEMDIWLKNFPQAWAETGGMGTAHCQAPVLIQLKATATPISIRQYPMPHEAYQGIKPHIRRMLDQGILKPCQSPWNTPLLPVKKPGTEDYRPVQDLREVNKRVEDIHPTVPNPYNLLSTLPPSHPWYTVLDLKDAFFCLRLHSESQLLFAFEWRDPEIGLSGQLTWTRLPQGFKNSPTLFNEALHSDLADFRVRYPALVLLQYVDDLLLAAATRTECLEGTKALLETLGNKGYRASAKKAQICLQEVTYLGYSLKDGQRWLTKARKEAILSIPVPKNSRQVREFLGKAGYCRLFIPGFAELAAPLYPLTRPGTLFQWGTEQQLAFEDIKKALLSSPALGLPDITKPFELFIDENSGFAKGVLVQKLGPWKRPVAYLSKKLDTVASGWPPCLRMVAAIAILVKDAGKLTLGQPLTILTSHPVEALVRQPPNKWLSNARMTHYQAMLLDAERVHFGPTVSLNPATLLPLPSGGNHHDCLQILAETHGTRPDLTDQPLPDADLTWYTDGSSFIRNGEREAGAAVTTESEVIWAAPLPPGTSAQRAELIALTQALKMAEGKKLTVYTDSRYAFATTHVHGEIYRRRGWLTSEGKEIKNKNEILALLEALFLPKRLSIIHCPGHQKGDSPQAKGNRLADDTAKKAATETHSSLTVLPAGKRTADGSEFEKRTADGSEFESPKKKAKVE

SEQ ID NO: 1235 - protein, 2095 aa, synthetic construct
MPAAKRVKLDGGDKKYSIGLDIGTNSVGWAVITDEYKVPSKKFKVLGNTDRHSIKKNLIGALLFDSGETAEATRLKRTARRRYTRRKNRICYLQEIFSNEMAKVDDSFFHRLEESFLVEEDKKHERHPIFGNIVDEVAYHEKYPTIYHLRKKLVDSTDKADLRLIYLALAHMIKFRGHFLIEGDLNPDNSDVDKLFIQLVQTYNQLFEENPINASGVDAKAILSARLSKSRRLENLIAQLPGEKKNGLFGNLIALSLGLTPNFKSNFDLAEDAKLQLSKDTYDDDLDNLLAQIGDQYADLFLAAKNLSDAILLSDILRVNTEITKAPLSASMIKRYDEHHQDLTLLKALVRQQLPEKYKEIFFDQSKNGYAGYIDGGASQEEFYKFIKPILEKMDGTEELLVKLNREDLLRKQRTFDNGSIPHQIHLGELHAILRRQEDFYPFLKDNREKIEKILTFRIPYYVGPLARGNSRFAWMTRKSEETITPWNFEEVVDKGASAQSFIERMTNFDKNLPNEKVLPKHSLLYEYFTVYNELTKVKYVTEGMRKPAFLSGEQKKAIVDLLFKTNRKVTVKQLKEDYFKKIECFDSVEISGVEDRFNASLGTYHDLLKIIKDKDFLDNEENEDILEDIVLTLTLFEDREMIEERLKTYAHLFDDKVMKQLKRRRYTGWGRLSRKLINGIRDKQSGKTILDFLKSDGFANRNFMQLIHDDSLTFKEDIQKAQVSGQGDSLHEHIANLAGSPAIKKGILQTVKVVDELVKVMGRHKPENIVIEMARENQTTQKGQKNSRERMKRIEEGIKELGSQILKEHPVENTQLQNEKLYLYYLQNGRDMYVDQELDINRLSDYDVDHIVPQSFLKDDSIDNKVLTRSDKARGKSDNVPSEEVVKKMKNYWRQLLNAKLITQRKFDNLTKAERGGLSELDKAGFIKRQLVETRQITKHVAQILDSRMNTKYDENDKLIREVKVITLKSKLVSDFRKDFQFYKVREINNYHHAHDAYLNAVVGTALIKKYPKLESEFVYGDYKVYDVRKMIAKSEQEIGKATAKYFFYSNIMNFFKTEITLANGEIRKRPLIETNGETGEIVWDKGRDFATVRKVLSMPQVNIVKKTEVQTGGFSKESILPKRNSDKLIARKKDWDPKKYGGFDSPTVAYSVLVVAKVEKGKSKKLKSVKELLGITIMERSSFEKNPIDFLEAKGYKEVKKDLIIKLPKYSLFELENGRKRMLASAGELQKGNELALPSKYVNFLYLASHYEKLKGSPEDNEQKQLFVEQHKHYLDEIIEQISEFSKRVILADANLDKVLSAYNKHRDKPIREQAENIIHLFTLTNLGAPAAFKYFDTTIDRKRYTSTKEVLDATLIHQSITGLYETRIDLSQLGGDGGEAAAKGGGGGSGGTLQLEEEYRLFEPESTQKQEMDIWLKNFPQAWAETGGMGTAHCQAPVLIQLKATATPISIRQYPMPHEAYQGIKPHIRRMLDQGILKPCQSPWNTPLLPVKKPGTEDYRPVQDLREVNKRVEDIHPTVPNPYNLLSTLPPSHPWYTVLDLKDAFFCLRLHSESQLLFAFEWRDPEIGLSGQLTWTRLPQGFKNSPTLFNEALHSDLADFRVRYPALVLLQYVDDLLLAAATRTECLEGTKALLETLGNKGYRASAKKAQICLQEVTYLGYSLKDGQRWLTKARKEAILSIPVPKNSRQVREFLGKAGYCRLFIPGFAELAAPLYPLTRPGTLFQWGTEQQLAFEDIKKALLSSPALGLPDITKPFELFIDENSGFAKGVLVQKLGPWKRPVAYLSKKLDTVASGWPPCLRMVAAIAILVKDAGKLTLGQPLTILTSHPVEALVRQPPNKWLSNARMTHYQAMLLDAERVHFGPTVSLNPATLLPLPSGGNHHDCLQILAETHGTRPDLTDQPLPDADLTWYTDGSSFIRNGEREAGAAVTTESEVIWAAPLPPGTSAQRAELIALTQALKMAEGKKLTVYTDSRYAFATTHVHGEIYRRRGWLTSEGKEIKNKNEILALLEALFLPKRLSIIHCPGHQKGDSPQAKGNRLADDTAKKAATETHSSLTVLPAGKRTADGSEFEKRTADGSEFESPKKKAKVE

SEQ ID NO: 1236 - protein, 2092 aa, synthetic construct
MPAAKRVKLDGGDKKYSIGLDIGTNSVGWAVITDEYKVPSKKFKVLGNTDRHSIKKNLIGALLFDSGETAEATRLKRTARRRYTRRKNRICYLQEIFSNEMAKVDDSFFHRLEESFLVEEDKKHERHPIFGNIVDEVAYHEKYPTIYHLRKKLVDSTDKADLRLIYLALAHMIKFRGHFLIEGDLNPDNSDVDKLFIQLVQTYNQLFEENPINASGVDAKAILSARLSKSRRLENLIAQLPGEKKNGLFGNLIALSLGLTPNFKSNFDLAEDAKLQLSKDTYDDDLDNLLAQIGDQYADLFLAAKNLSDAILLSDILRVNTEITKAPLSASMIKRYDEHHQDLTLLKALVRQQLPEKYKEIFFDQSKNGYAGYIDGGASQEEFYKFIKPILEKMDGTEELLVKLNREDLLRKQRTFDNGSIPHQIHLGELHAILRRQEDFYPFLKDNREKIEKILTFRIPYYVGPLARGNSRFAWMTRKSEETITPWNFEEVVDKGASAQSFIERMTNFDKNLPNEKVLPKHSLLYEYFTVYNELTKVKYVTEGMRKPAFLSGEQKKAIVDLLFKTNRKVTVKQLKEDYFKKIECFDSVEISGVEDRFNASLGTYHDLLKIIKDKDFLDNEENEDILEDIVLTLTLFEDREMIEERLKTYAHLFDDKVMKQLKRRRYTGWGRLSRKLINGIRDKQSGKTILDFLKSDGFANRNFMQLIHDDSLTFKEDIQKAQVSGQGDSLHEHIANLAGSPAIKKGILQTVKVVDELVKVMGRHKPENIVIEMARENQTTQKGQKNSRERMKRIEEGIKELGSQILKEHPVENTQLQNEKLYLYYLQNGRDMYVDQELDINRLSDYDVDHIVPQSFLKDDSIDNKVLTRSDKARGKSDNVPSEEVVKKMKNYWRQLLNAKLITQRKFDNLTKAERGGLSELDKAGFIKRQLVETRQITKHVAQILDSRMNTKYDENDKLIREVKVITLKSKLVSDFRKDFQFYKVREINNYHHAHDAYLNAVVGTALIKKYPKLESEFVYGDYKVYDVRKMIAKSEQEIGKATAKYFFYSNIMNFFKTEITLANGEIRKRPLIETNGETGEIVWDKGRDFATVRKVLSMPQVNIVKKTEVQTGGFSKESILPKRNSDKLIARKKDWDPKKYGGFDSPTVAYSVLVVAKVEKGKSKKLKSVKELLGITIMERSSFEKNPIDFLEAKGYKEVKKDLIIKLPKYSLFELENGRKRMLASAGELQKGNELALPSKYVNFLYLASHYEKLKGSPEDNEQKQLFVEQHKHYLDEIIEQISEFSKRVILADANLDKVLSAYNKHRDKPIREQAENIIHLFTLTNLGAPAAFKYFDTTIDRKRYTSTKEVLDATLIHQSITGLYETRIDLSQLGGDGGGSSEAAAKGGTLQLEEEYRLFEPESTQKQEMDIWLKNFPQAWAETGGMGTAHCQAPVLIQLKATATPISIRQYPMPHEAYQGIKPHIRRMLDQGILKPCQSPWNTPLLPVKKPGTEDYRPVQDLREVNKRVEDIHPTVPNPYNLLSTLPPSHPWYTVLDLKDAFFCLRLHSESQLLFAFEWRDPEIGLSGQLTWTRLPQGFKNSPTLFNEALHSDLADFRVRYPALVLLQYVDDLLLAAATRTECLEGTKALLETLGNKGYRASAKKAQICLQEVTYLGYSLKDGQRWLTKARKEAILSIPVPKNSRQVREFLGKAGYCRLFIPGFAELAAPLYPLTRPGTLFQWGTEQQLAFEDIKKALLSSPALGLPDITKPFELFIDENSGFAKGVLVQKLGPWKRPVAYLSKKLDTVASGWPPCLRMVAAIAILVKDAGKLTLGQPLTILTSHPVEALVRQPPNKWLSNARMTHYQAMLLDAERVHFGPTVSLNPATLLPLPSGGNHHDCLQILAETHGTRPDLTDQPLPDADLTWYTDGSSFIRNGEREAGAAVTTESEVIWAAPLPPGTSAQRAELIALTQALKMAEGKKLTVYTDSRYAFATTHVHGEIYRRRGWLTSEGKEIKNKNEILALLEALFLPKRLSIIHCPGHQKGDSPQAKGNRLADDTAKKAATETHSSLTVLPAGKRTADGSEFEKRTADGSEFESPKKKAKVE

SEQ ID NO: 1237 - protein, 2095 aa, synthetic construct
MPAAKRVKLDGGDKKYSIGLDIGTNSVGWAVITDEYKVPSKKFKVLGNTDRHSIKKNLIGALLFDSGETAEATRLKRTARRRYTRRKNRICYLQEIFSNEMAKVDDSFFHRLEESFLVEEDKKHERHPIFGNIVDEVAYHEKYPTIYHLRKKLVDSTDKADLRLIYLALAHMIKFRGHFLIEGDLNPDNSDVDKLFIQLVQTYNQLFEENPINASGVDAKAILSARLSKSRRLENLIAQLPGEKKNGLFGNLIALSLGLTPNFKSNFDLAEDAKLQLSKDTYDDDLDNLLAQIGDQYADLFLAAKNLSDAILLSDILRVNTEITKAPLSASMIKRYDEHHQDLTLLKALVRQQLPEKYKEIFFDQSKNGYAGYIDGGASQEEFYKFIKPILEKMDGTEELLVKLNREDLLRKQRTFDNGSIPHQIHLGELHAILRRQEDFYPFLKDNREKIEKILTFRIPYYVGPLARGNSRFAWMTRKSEETITPWNFEEVVDKGASAQSFIERMTNFDKNLPNEKVLPKHSLLYEYFTVYNELTKVKYVTEGMRKPAFLSGEQKKAIVDLLFKTNRKVTVKQLKEDYFKKIECFDSVEISGVEDRFNASLGTYHDLLKIIKDKDFLDNEENEDILEDIVLTLTLFEDREMIEERLKTYAHLFDDKVMKQLKRRRYTGWGRLSRKLINGIRDKQSGKTILDFLKSDGFANRNFMQLIHDDSLTFKEDIQKAQVSGQGDSLHEHIANLAGSPAIKKGILQTVKVVDELVKVMGRHKPENIVIEMARENQTTQKGQKNSRERMKRIEEGIKELGSQILKEHPVENTQLQNEKLYLYYLQNGRDMYVDQELDINRLSDYDVDHIVPQSFLKDDSIDNKVLTRSDKARGKSDNVPSEEVVKKMKNYWRQLLNAKLITQRKFDNLTKAERGGLSELDKAGFIKRQLVETRQITKHVAQILDSRMNTKYDENDKLIREVKVITLKSKLVSDFRKDFQFYKVREINNYHHAHDAYLNAVVGTALIKKYPKLESEFVYGDYKVYDVRKMIAKSEQEIGKATAKYFFYSNIMNFFKTEITLANGEIRKRPLIETNGETGEIVWDKGRDFATVRKVLSMPQVNIVKKTEVQTGGFSKESILPKRNSDKLIARKKDWDPKKYGGFDSPTVAYSVLVVAKVEKGKSKKLKSVKELLGITIMERSSFEKNPIDFLEAKGYKEVKKDLIIKLPKYSLFELENGRKRMLASAGELQKGNELALPSKYVNFLYLASHYEKLKGSPEDNEQKQLFVEQHKHYLDEIIEQISEFSKRVILADANLDKVLSAYNKHRDKPIREQAENIIHLFTLTNLGAPAAFKYFDTTIDRKRYTSTKEVLDATLIHQSITGLYETRIDLSQLGGDGGGGSEAAAKGGGGGTLQLEEEYRLFEPESTQKQEMDIWLKNFPQAWAETGGMGTAHCQAPVLIQLKATATPISIRQYPMPHEAYQGIKPHIRRMLDQGILKPCQSPWNTPLLPVKKPGTEDYRPVQDLREVNKRVEDIHPTVPNPYNLLSTLPPSHPWYTVLDLKDAFFCLRLHSESQLLFAFEWRDPEIGLSGQLTWTRLPQGFKNSPTLFNEALHSDLADFRVRYPALVLLQYVDDLLLAAATRTECLEGTKALLETLGNKGYRASAKKAQICLQEVTYLGYSLKDGQRWLTKARKEAILSIPVPKNSRQVREFLGKAGYCRLFIPGFAELAAPLYPLTRPGTLFQWGTEQQLAFEDIKKALLSSPALGLPDITKPFELFIDENSGFAKGVLVQKLGPWKRPVAYLSKKLDTVASGWPPCLRMVAAIAILVKDAGKLTLGQPLTILTSHPVEALVRQPPNKWLSNARMTHYQAMLLDAERVHFGPTVSLNPATLLPLPSGGNHHDCLQILAETHGTRPDLTDQPLPDADLTWYTDGSSFIRNGEREAGAAVTTESEVIWAAPLPPGTSAQRAELIALTQALKMAEGKKLTVYTDSRYAFATTHVHGEIYRRRGWLTSEGKEIKNKNEILALLEALFLPKRLSIIHCPGHQKGDSPQAKGNRLADDTAKKAATETHSSLTVLPAGKRTADGSEFEKRTADGSEFESPKKKAKVE

SEQ ID NO: 1238 - protein, 2093 aa, synthetic construct
MPAAKRVKLDGGDKKYSIGLDIGTNSVGWAVITDEYKVPSKKFKVLGNTDRHSIKKNLIGALLFDSGETAEATRLKRTARRRYTRRKNRICYLQEIFSNEMAKVDDSFFHRLEESFLVEEDKKHERHPIFGNIVDEVAYHEKYPTIYHLRKKLVDSTDKADLRLIYLALAHMIKFRGHFLIEGDLNPDNSDVDKLFIQLVQTYNQLFEENPINASGVDAKAILSARLSKSRRLENLIAQLPGEKKNGLFGNLIALSLGLTPNFKSNFDLAEDAKLQLSKDTYDDDLDNLLAQIGDQYADLFLAAKNLSDAILLSDILRVNTEITKAPLSASMIKRYDEHHQDLTLLKALVRQQLPEKYKEIFFDQSKNGYAGYIDGGASQEEFYKFIKPILEKMDGTEELLVKLNREDLLRKQRTFDNGSIPHQIHLGELHAILRRQEDFYPFLKDNREKIEKILTFRIPYYVGPLARGNSRFAWMTRKSEETITPWNFEEVVDKGASAQSFIERMTNFDKNLPNEKVLPKHSLLYEYFTVYNELTKVKYVTEGMRKPAFLSGEQKKAIVDLLFKTNRKVTVKQLKEDYFKKIECFDSVEISGVEDRFNASLGTYHDLLKIIKDKDFLDNEENEDILEDIVLTLTLFEDREMIEERLKTYAHLFDDKVMKQLKRRRYTGWGRLSRKLINGIRDKQSGKTILDFLKSDGFANRNFMQLIHDDSLTFKEDIQKAQVSGQGDSLHEHIANLAGSPAIKKGILQTVKVVDELVKVMGRHKPENIVIEMARENQTTQKGQKNSRERMKRIEEGIKELGSQILKEHPVENTQLQNEKLYLYYLQNGRDMYVDQELDINRLSDYDVDHIVPQSFLKDDSIDNKVLTRSDKARGKSDNVPSEEVVKKMKNYWRQLLNAKLITQRKFDNLTKAERGGLSELDKAGFIKRQLVETRQITKHVAQILDSRMNTKYDENDKLIREVKVITLKSKLVSDFRKDFQFYKVREINNYHHAHDAYLNAVVGTALIKKYPKLESEFVYGDYKVYDVRKMIAKSEQEIGKATAKYFFYSNIMNFFKTEITLANGEIRKRPLIETNGETGEIVWDKGRDFATVRKVLSMPQVNIVKKTEVQTGGFSKESILPKRNSDKLIARKKDWDPKKYGGFDSPTVAYSVLVVAKVEKGKSKKLKSVKELLGITIMERSSFEKNPIDFLEAKGYKEVKKDLIIKLPKYSLFELENGRKRMLASAGELQKGNELALPSKYVNFLYLASHYEKLKGSPEDNEQKQLFVEQHKHYLDEIIEQISEFSKRVILADANLDKVLSAYNKHRDKPIREQAENIIHLFTLTNLGAPAAFKYFDTTIDRKRYTSTKEVLDATLIHQSITGLYETRIDLSQLGGDGGPAPGSSGGGGGTLQLEEEYRLFEPESTQKQEMDIWLKNFPQAWAETGGMGTAHCQAPVLIQLKATATPISIRQYPMPHEAYQGIKPHIRRMLDQGILKPCQSPWNTPLLPVKKPGTEDYRPVQDLREVNKRVEDIHPTVPNPYNLLSTLPPSHPWYTVLDLKDAFFCLRLHSESQLLFAFEWRDPEIGLSGQLTWTRLPQGFKNSPTLFNEALHSDLADFRVRYPALVLLQYVDDLLLAAATRTECLEGTKALLETLGNKGYRASAKKAQICLQEVTYLGYSLKDGQRWLTKARKEAILSIPVPKNSRQVREFLGKAGYCRLFIPGFAELAAPLYPLTRPGTLFQWGTEQQLAFEDIKKALLSSPALGLPDITKPFELFIDENSGFAKGVLVQKLGPWKRPVAYLSKKLDTVASGWPPCLRMVAAIAILVKDAGKLTLGQPLTILTSHPVEALVRQPPNKWLSNARMTHYQAMLLDAERVHFGPTVSLNPATLLPLPSGGNHHDCLQILAETHGTRPDLTDQPLPDADLTWYTDGSSFIRNGEREAGAAVTTESEVIWAAPLPPGTSAQRAELIALTQALKMAEGKKLTVYTDSRYAFATTHVHGEIYRRRGWLTSEGKEIKNKNEILALLEALFLPKRLSIIHCPGHQKGDSPQAKGNRLADDTAKKAATETHSSLTVLPAGKRTADGSEFEKRTADGSEFESPKKKAKVE

SEQ ID NO: 1239 - protein, 2095 aa, synthetic construct
MPAAKRVKLDGGDKKYSIGLDIGTNSVGWAVITDEYKVPSKKFKVLGNTDRHSIKKNLIGALLFDSGETAEATRLKRTARRRYTRRKNRICYLQEIFSNEMAKVDDSFFHRLEESFLVEEDKKHERHPIFGNIVDEVAYHEKYPTIYHLRKKLVDSTDKADLRLIYLALAHMIKFRGHFLIEGDLNPDNSDVDKLFIQLVQTYNQLFEENPINASGVDAKAILSARLSKSRRLENLIAQLPGEKKNGLFGNLIALSLGLTPNFKSNFDLAEDAKLQLSKDTYDDDLDNLLAQIGDQYADLFLAAKNLSDAILLSDILRVNTEITKAPLSASMIKRYDEHHQDLTLLKALVRQQLPEKYKEIFFDQSKNGYAGYIDGGASQEEFYKFIKPILEKMDGTEELLVKLNREDLLRKQRTFDNGSIPHQIHLGELHAILRRQEDFYPFLKDNREKIEKILTFRIPYYVGPLARGNSRFAWMTRKSEETITPWNFEEVVDKGASAQSFIERMTNFDKNLPNEKVLPKHSLLYEYFTVYNELTKVKYVTEGMRKPAFLSGEQKKAIVDLLFKTNRKVTVKQLKEDYFKKIECFDSVEISGVEDRFNASLGTYHDLLKIIKDKDFLDNEENEDILEDIVLTLTLFEDREMIEERLKTYAHLFDDKVMKQLKRRRYTGWGRLSRKLINGIRDKQSGKTILDFLKSDGFANRNFMQLIHDDSLTFKEDIQKAQVSGQGDSLHEHIANLAGSPAIKKGILQTVKVVDELVKVMGRHKPENIVIEMARENQTTQKGQKNSRERMKRIEEGIKELGSQILKEHPVENTQLQNEKLYLYYLQNGRDMYVDQELDINRLSDYDVDHIVPQSFLKDDSIDNKVLTRSDKARGKSDNVPSEEVVKKMKNYWRQLLNAKLITQRKFDNLTKAERGGLSELDKAGFIKRQLVETRQITKHVAQILDSRMNTKYDENDKLIREVKVITLKSKLVSDFRKDFQFYKVREINNYHHAHDAYLNAVVGTALIKKYPKLESEFVYGDYKVYDVRKMIAKSEQEIGKATAKYFFYSNIMNFFKTEITLANGEIRKRPLIETNGETGEIVWDKGRDFATVRKVLSMPQVNIVKKTEVQTGGFSKESILPKRNSDKLIARKKDWDPKKYGGFDSPTVAYSVLVVAKVEKGKSKKLKSVKELLGITIMERSSFEKNPIDFLEAKGYKEVKKDLIIKLPKYSLFELENGRKRMLASAGELQKGNELALPSKYVNFLYLASHYEKLKGSPEDNEQKQLFVEQHKHYLDEIIEQISEFSKRVILADANLDKVLSAYNKHRDKPIREQAENIIHLFTLTNLGAPAAFKYFDTTIDRKRYTSTKEVLDATLIHQSITGLYETRIDLSQLGGDGGPAPGGSEAAAKGGTLQLEEEYRLFEPESTQKQEMDIWLKNFPQAWAETGGMGTAHCQAPVLIQLKATATPISIRQYPMPHEAYQGIKPHIRRMLDQGILKPCQSPWNTPLLPVKKPGTEDYRPVQDLREVNKRVEDIHPTVPNPYNLLSTLPPSHPWYTVLDLKDAFFCLRLHSESQLLFAFEWRDPEIGLSGQLTWTRLPQGFKNSPTLFNEALHSDLADFRVRYPALVLLQYVDDLLLAAATRTECLEGTKALLETLGNKGYRASAKKAQICLQEVTYLGYSLKDGQRWLTKARKEAILSIPVPKNSRQVREFLGKAGYCRLFIPGFAELAAPLYPLTRPGTLFQWGTEQQLAFEDIKKALLSSPALGLPDITKPFELFIDENSGFAKGVLVQKLGPWKRPVAYLSKKLDTVASGWPPCLRMVAAIAILVKDAGKLTLGQPLTILTSHPVEALVRQPPNKWLSNARMTHYQAMLLDAERVHFGPTVSLNPATLLPLPSGGNHHDCLQILAETHGTRPDLTDQPLPDADLTWYTDGSSFIRNGEREAGAAVTTESEVIWAAPLPPGTSAQRAELIALTQALKMAEGKKLTVYTDSRYAFATTHVHGEIYRRRGWLTSEGKEIKNKNEILALLEALFLPKRLSIIHCPGHQKGDSPQAKGNRLADDTAKKAATETHSSLTVLPAGKRTADGSEFEKRTADGSEFESPKKKAKVE

SEQ ID NO: 1240 - protein, 2093 aa, synthetic construct
MPAAKRVKLDGGDKKYSIGLDIGTNSVGWAVITDEYKVPSKKFKVLGNTDRHSIKKNLIGALLFDSGETAEATRLKRTARRRYTRRKNRICYLQEIFSNEMAKVDDSFFHRLEESFLVEEDKKHERHPIFGNIVDEVAYHEKYPTIYHLRKKLVDSTDKADLRLIYLALAHMIKFRGHFLIEGDLNPDNSDVDKLFIQLVQTYNQLFEENPINASGVDAKAILSARLSKSRRLENLIAQLPGEKKNGLFGNLIALSLGLTPNFKSNFDLAEDAKLQLSKDTYDDDLDNLLAQIGDQYADLFLAAKNLSDAILLSDILRVNTEITKAPLSASMIKRYDEHHQDLTLLKALVRQQLPEKYKEIFFDQSKNGYAGYIDGGASQEEFYKFIKPILEKMDGTEELLVKLNREDLLRKQRTFDNGSIPHQIHLGELHAILRRQEDFYPFLKDNREKIEKILTFRIPYYVGPLARGNSRFAWMTRKSEETITPWNFEEVVDKGASAQSFIERMTNFDKNLPNEKVLPKHSLLYEYFTVYNELTKVKYVTEGMRKPAFLSGEQKKAIVDLLFKTNRKVTVKQLKEDYFKKIECFDSVEISGVEDRFNASLGTYHDLLKIIKDKDFLDNEENEDILEDIVLTLTLFEDREMIEERLKTYAHLFDDKVMKQLKRRRYTGWGRLSRKLINGIRDKQSGKTILDFLKSDGFANRNFMQLIHDDSLTFKEDIQKAQVSGQGDSLHEHIANLAGSPAIKKGILQTVKVVDELVKVMGRHKPENIVIEMARENQTTQKGQKNSRERMKRIEEGIKELGSQILKEHPVENTQLQNEKLYLYYLQNGRDMYVDQELDINRLSDYDVDHIVPQSFLKDDSIDNKVLTRSDKARGKSDNVPSEEVVKKMKNYWRQLLNAKLITQRKFDNLTKAERGGLSELDKAGFIKRQLVETRQITKHVAQILDSRMNTKYDENDKLIREVKVITLKSKLVSDFRKDFQFYKVREINNYHHAHDAYLNAVVGTALIKKYPKLESEFVYGDYKVYDVRKMIAKSEQEIGKATAKYFFYSNIMNFFKTEITLANGEIRKRPLIETNGETGEIVWDKGRDFATVRKVLSMPQVNIVKKTEVQTGGFSKESILPKRNSDKLIARKKDWDPKKYGGFDSPTVAYSVLVVAKVEKGKSKKLKSVKELLGITIMERSSFEKNPIDFLEAKGYKEVKKDLIIKLPKYSLFELENGRKRMLASAGELQKGNELALPSKYVNFLYLASHYEKLKGSPEDNEQKQLFVEQHKHYLDEIIEQISEFSKRVILADANLDKVLSAYNKHRDKPIREQAENIIHLFTLTNLGAPAAFKYFDTTIDRKRYTSTKEVLDATLIHQSITGLYETRIDLSQLGGDGGGSSGGGPAPGGTLQLEEEYRLFEPESTQKQEMDIWLKNFPQAWAETGGMGTAHCQAPVLIQLKATATPISIRQYPMPHEAYQGIKPHIRRMLDQGILKPCQSPWNTPLLPVKKPGTEDYRPVQDLREVNKRVEDIHPTVPNPYNLLSTLPPSHPWYTVLDLKDAFFCLRLHSESQLLFAFEWRDPEIGLSGQLTWTRLPQGFKNSPTLFNEALHSDLADFRVRYPALVLLQYVDDLLLAAATRTECLEGTKALLETLGNKGYRASAKKAQICLQEVTYLGYSLKDGQRWLTKARKEAILSIPVPKNSRQVREFLGKAGYCRLFIPGFAELAAPLYPLTRPGTLFQWGTEQQLAFEDIKKALLSSPALGLPDITKPFELFIDENSGFAKGVLVQKLGPWKRPVAYLSKKLDTVASGWPPCLRMVAAIAILVKDAGKLTLGQPLTILTSHPVEALVRQPPNKWLSNARMTHYQAMLLDAERVHFGPTVSLNPATLLPLPSGGNHHDCLQILAETHGTRPDLTDQPLPDADLTWYTDGSSFIRNGEREAGAAVTTESEVIWAAPLPPGTSAQRAELIALTQALKMAEGKKLTVYTDSRYAFATTHVHGEIYRRRGWLTSEGKEIKNKNEILALLEALFLPKRLSIIHCPGHQKGDSPQAKGNRLADDTAKKAATETHSSLTVLPAGKRTADGSEFEKRTADGSEFESPKKKAKVE

SEQ ID NO: 1241 - protein, 2095 aa, synthetic construct
MPAAKRVKLDGGDKKYSIGLDIGTNSVGWAVITDEYKVPSKKFKVLGNTDRHSIKKNLIGALLFDSGETAEATRLKRTARRRYTRRKNRICYLQEIFSNEMAKVDDSFFHRLEESFLVEEDKKHERHPIFGNIVDEVAYHEKYPTIYHLRKKLVDSTDKADLRLIYLALAHMIKFRGHFLIEGDLNPDNSDVDKLFIQLVQTYNQLFEENPINASGVDAKAILSARLSKSRRLENLIAQLPGEKKNGLFGNLIALSLGLTPNFKSNFDLAEDAKLQLSKDTYDDDLDNLLAQIGDQYADLFLAAKNLSDAILLSDILRVNTEITKAPLSASMIKRYDEHHQDLTLLKALVRQQLPEKYKEIFFDQSKNGYAGYIDGGASQEEFYKFIKPILEKMDGTEELLVKLNREDLLRKQRTFDNGSIPHQIHLGELHAILRRQEDFYPFLKDNREKIEKILTFRIPYYVGPLARGNSRFAWMTRKSEETITPWNFEEVVDKGASAQSFIERMTNFDKNLPNEKVLPKHSLLYEYFTVYNELTKVKYVTEGMRKPAFLSGEQKKAIVDLLFKTNRKVTVKQLKEDYFKKIECFDSVEISGVEDRFNASLGTYHDLLKIIKDKDFLDNEENEDILEDIVLTLTLFEDREMIEERLKTYAHLFDDKVMKQLKRRRYTGWGRLSRKLINGIRDKQSGKTILDFLKSDGFANRNFMQLIHDDSLTFKEDIQKAQVSGQGDSLHEHIANLAGSPAIKKGILQTVKVVDELVKVMGRHKPENIVIEMARENQTTQKGQKNSRERMKRIEEGIKELGSQILKEHPVENTQLQNEKLYLYYLQNGRDMYVDQELDINRLSDYDVDHIVPQSFLKDDSIDNKVLTRSDKARGKSDNVPSEEVVKKMKNYWRQLLNAKLITQRKFDNLTKAERGGLSELDKAGFIKRQLVETRQITKHVAQILDSRMNTKYDENDKLIREVKVITLKSKLVSDFRKDFQFYKVREINNYHHAHDAYLNAVVGTALIKKYPKLESEFVYGDYKVYDVRKMIAKSEQEIGKATAKYFFYSNIMNFFKTEITLANGEIRKRPLIETNGETGEIVWDKGRDFATVRKVLSMPQVNIVKKTEVQTGGFSKESILPKRNSDKLIARKKDWDPKKYGGFDSPTVAYSVLVVAKVEKGKSKKLKSVKELLGITIMERSSFEKNPIDFLEAKGYKEVKKDLIIKLPKYSLFELENGRKRMLASAGELQKGNELALPSKYVNFLYLASHYEKLKGSPEDNEQKQLFVEQHKHYLDEIIEQISEFSKRVILADANLDKVLSAYNKHRDKPIREQAENIIHLFTLTNLGAPAAFKYFDTTIDRKRYTSTKEVLDATLIHQSITGLYETRIDLSQLGGDGGEAAAKGGSGSSGGTLQLEEEYRLFEPESTQKQEMDIWLKNFPQAWAETGGMGTAHCQAPVLIQLKATATPISIRQYPMPHEAYQGIKPHIRRMLDQGILKPCQSPWNTPLLPVKKPGTEDYRPVQDLREVNKRVEDIHPTVPNPYNLLSTLPPSHPWYTVLDLKDAFFCLRLHSESQLLFAFEWRDPEIGLSGQLTWTRLPQGFKNSPTLFNEALHSDLADFRVRYPALVLLQYVDDLLLAAATRTECLEGTKALLETLGNKGYRASAKKAQICLQEVTYLGYSLKDGQRWLTKARKEAILSIPVPKNSRQVREFLGKAGYCRLFIPGFAELAAPLYPLTRPGTLFQWGTEQQLAFEDIKKALLSSPALGLPDITKPFELFIDENSGFAKGVLVQKLGPWKRPVAYLSKKLDTVASGWPPCLRMVAAIAILVKDAGKLTLGQPLTILTSHPVEALVRQPPNKWLSNARMTHYQAMLLDAERVHFGPTVSLNPATLLPLPSGGNHHDCLQILAETHGTRPDLTDQPLPDADLTWYTDGSSFIRNGEREAGAAVTTESEVIWAAPLPPGTSAQRAELIALTQALKMAEGKKLTVYTDSRYAFATTHVHGEIYRRRGWLTSEGKEIKNKNEILALLEALFLPKRLSIIHCPGHQKGDSPQAKGNRLADDTAKKAATETHSSLTVLPAGKRTADGSEFEKRTADGSEFESPKKKAKVE

SEQ ID NO: 1242 - protein, 2095 aa, synthetic construct
MPAAKRVKLDGGDKKYSIGLDIGTNSVGWAVITDEYKVPSKKFKVLGNTDRHSIKKNLIGALLFDSGETAEATRLKRTARRRYTRRKNRICYLQEIFSNEMAKVDDSFFHRLEESFLVEEDKKHERHPIFGNIVDEVAYHEKYPTIYHLRKKLVDSTDKADLRLIYLALAHMIKFRGHFLIEGDLNPDNSDVDKLFIQLVQTYNQLFEENPINASGVDAKAILSARLSKSRRLENLIAQLPGEKKNGLFGNLIALSLGLTPNFKSNFDLAEDAKLQLSKDTYDDDLDNLLAQIGDQYADLFLAAKNLSDAILLSDILRVNTEITKAPLSASMIKRYDEHHQDLTLLKALVRQQLPEKYKEIFFDQSKNGYAGYIDGGASQEEFYKFIKPILEKMDGTEELLVKLNREDLLRKQRTFDNGSIPHQIHLGELHAILRRQEDFYPFLKDNREKIEKILTFRIPYYVGPLARGNSRFAWMTRKSEETITPWNFEEVVDKGASAQSFIERMTNFDKNLPNEKVLPKHSLLYEYFTVYNELTKVKYVTEGMRKPAFLSGEQKKAIVDLLFKTNRKVTVKQLKEDYFKKIECFDSVEISGVEDRFNASLGTYHDLLKIIKDKDFLDNEENEDILEDIVLTLTLFEDREMIEERLKTYAHLFDDKVMKQLKRRRYTGWGRLSRKLINGIRDKQSGKTILDFLKSDGFANRNFMQLIHDDSLTFKEDIQKAQVSGQGDSLHEHIANLAGSPAIKKGILQTVKVVDELVKVMGRHKPENIVIEMARENQTTQKGQKNSRERMKRIEEGIKELGSQILKEHPVENTQLQNEKLYLYYLQNGRDMYVDQELDINRLSDYDVDHIVPQSFLKDDSIDNKVLTRSDKARGKSDNVPSEEVVKKMKNYWRQLLNAKLITQRKFDNLTKAERGGLSELDKAGFIKRQLVETRQITKHVAQILDSRMNTKYDENDKLIREVKVITLKSKLVSDFRKDFQFYKVREINNYHHAHDAYLNAVVGTALIKKYPKLESEFVYGDYKVYDVRKMIAKSEQEIGKATAKYFFYSNIMNFFKTEITLANGEIRKRPLIETNGETGEIVWDKGRDFATVRKVLSMPQVNIVKKTEVQTGGFSKESILPKRNSDKLIARKKDWDPKKYGGFDSPTVAYSVLVVAKVEKGKSKKLKSVKELLGITIMERSSFEKNPIDFLEAKGYKEVKKDLIIKLPKYSLFELENGRKRMLASAGELQKGNELALPSKYVNFLYLASHYEKLKGSPEDNEQKQLFVEQHKHYLDEIIEQISEFSKRVILADANLDKVLSAYNKHRDKPIREQAENIIHLFTLTNLGAPAAFKYFDTTIDRKRYTSTKEVLDATLIHQSITGLYETRIDLSQLGGDGGGSSGGSEAAAKGGTLQLEEEYRLFEPESTQKQEMDIWLKNFPQAWAETGGMGTAHCQAPVLIQLKATATPISIRQYPMPHEAYQGIKPHIRRMLDQGILKPCQSPWNTPLLPVKKPGTEDYRPVQDLREVNKRVEDIHPTVPNPYNLLSTLPPSHPWYTVLDLKDAFFCLRLHSESQLLFAFEWRDPEIGLSGQLTWTRLPQGFKNSPTLFNEALHSDLADFRVRYPALVLLQYVDDLLLAAATRTECLEGTKALLETLGNKGYRASAKKAQICLQEVTYLGYSLKDGQRWLTKARKEAILSIPVPKNSRQVREFLGKAGYCRLFIPGFAELAAPLYPLTRPGTLFQWGTEQQLAFEDIKKALLSSPALGLPDITKPFELFIDENSGFAKGVLVQKLGPWKRPVAYLSKKLDTVASGWPPCLRMVAAIAILVKDAGKLTLGQPLTILTSHPVEALVRQPPNKWLSNARMTHYQAMLLDAERVHFGPTVSLNPATLLPLPSGGNHHDCLQILAETHGTRPDLTDQPLPDADLTWYTDGSSFIRNGEREAGAAVTTESEVIWAAPLPPGTSAQRAELIALTQALKMAEGKKLTVYTDSRYAFATTHVHGEIYRRRGWLTSEGKEIKNKNEILALLEALFLPKRLSIIHCPGHQKGDSPQAKGNRLADDTAKKAATETHSSLTVLPAGKRTADGSEFEKRTADGSEFESPKKKAKVE

SEQ ID NO: 1243 - protein, 2099 aa, synthetic construct
MPAAKRVKLDGGDKKYSIGLDIGTNSVGWAVITDEYKVPSKKFKVLGNTDRHSIKKNLIGALLFDSGETAEATRLKRTARRRYTRRKNRICYLQEIFSNEMAKVDDSFFHRLEESFLVEEDKKHERHPIFGNIVDEVAYHEKYPTIYHLRKKLVDSTDKADLRLIYLALAHMIKFRGHFLIEGDLNPDNSDVDKLFIQLVQTYNQLFEENPINASGVDAKAILSARLSKSRRLENLIAQLPGEKKNGLFGNLIALSLGLTPNFKSNFDLAEDAKLQLSKDTYDDDLDNLLAQIGDQYADLFLAAKNLSDAILLSDILRVNTEITKAPLSASMIKRYDEHHQDLTLLKALVRQQLPEKYKEIFFDQSKNGYAGYIDGGASQEEFYKFIKPILEKMDGTEELLVKLNREDLLRKQRTFDNGSIPHQIHLGELHAILRRQEDFYPFLKDNREKIEKILTFRIPYYVGPLARGNSRFAWMTRKSEETITPWNFEEVVDKGASAQSFIERMTNFDKNLPNEKVLPKHSLLYEYFTVYNELTKVKYVTEGMRKPAFLSGEQKKAIVDLLFKTNRKVTVKQLKEDYFKKIECFDSVEISGVEDRFNASLGTYHDLLKIIKDKDFLDNEENEDILEDIVLTLTLFEDREMIEERLKTYAHLFDDKVMKQLKRRRYTGWGRLSRKLINGIRDKQSGKTILDFLKSDGFANRNFMQLIHDDSLTFKEDIQKAQVSGQGDSLHEHIANLAGSPAIKKGILQTVKVVDELVKVMGRHKPENIVIEMARENQTTQKGQKNSRERMKRIEEGIKELGSQILKEHPVENTQLQNEKLYLYYLQNGRDMYVDQELDINRLSDYDVDHIVPQSFLKDDSIDNKVLTRSDKARGKSDNVPSEEVVKKMKNYWRQLLNAKLITQRKFDNLTKAERGGLSELDKAGFIKRQLVETRQITKHVAQILDSRMNTKYDENDKLIREVKVITLKSKLVSDFRKDFQFYKVREINNYHHAHDAYLNAVVGTALIKKYPKLESEFVYGDYKVYDVRKMIAKSEQEIGKATAKYFFYSNIMNFFKTEITLANGEIRKRPLIETNGETGEIVWDKGRDFATVRKVLSMPQVNIVKKTEVQTGGFSKESILPKRNSDKLIARKKDWDPKKYGGFDSPTVAYSVLVVAKVEKGKSKKLKSVKELLGITIMERSSFEKNPIDFLEAKGYKEVKKDLIIKLPKYSLFELENGRKRMLASAGELQKGNELALPSKYVNFLYLASHYEKLKGSPEDNEQKQLFVEQHKHYLDEIIEQISEFSKRVILADANLDKVLSAYNKHRDKPIREQAENIIHLFTLTNLGAPAAFKYFDTTIDRKRYTSTKEVLDATLIHQSITGLYETRIDLSQLGGDGGEAAAKGGGGSEAAAKGGTLQLEEEYRLFEPESTQKQEMDIWLKNFPQAWAETGGMGTAHCQAPVLIQLKATATPISIRQYPMPHEAYQGIKPHIRRMLDQGILKPCQSPWNTPLLPVKKPGTEDYRPVQDLREVNKRVEDIHPTVPNPYNLLSTLPPSHPWYTVLDLKDAFFCLRLHSESQLLFAFEWRDPEIGLSGQLTWTRLPQGFKNSPTLFNEALHSDLADFRVRYPALVLLQYVDDLLLAAATRTECLEGTKALLETLGNKGYRASAKKAQICLQEVTYLGYSLKDGQRWLTKARKEAILSIPVPKNSRQVREFLGKAGYCRLFIPGFAELAAPLYPLTRPGTLFQWGTEQQLAFEDIKKALLSSPALGLPDITKPFELFIDENSGFAKGVLVQKLGPWKRPVAYLSKKLDTVASGWPPCLRMVAAIAILVKDAGKLTLGQPLTILTSHPVEALVRQPPNKWLSNARMTHYQAMLLDAERVHFGPTVSLNPATLLPLPSGGNHHDCLQILAETHGTRPDLTDQPLPDADLTWYTDGSSFIRNGEREAGAAVTTESEVIWAAPLPPGTSAQRAELIALTQALKMAEGKKLTVYTDSRYAFATTHVHGEIYRRRGWLTSEGKEIKNKNEILALLEALFLPKRLSIIHCPGHQKGDSPQAKGNRLADDTAKKAATETHSSLTVLPAGKRTADGSEFEKRTADGSEFESPKKKAKVE

SEQ ID NO: 1244 - protein, 2093 aa, synthetic construct
MPAAKRVKLDGGDKKYSIGLDIGTNSVGWAVITDEYKVPSKKFKVLGNTDRHSIKKNLIGALLFDSGETAEATRLKRTARRRYTRRKNRICYLQEIFSNEMAKVDDSFFHRLEESFLVEEDKKHERHPIFGNIVDEVAYHEKYPTIYHLRKKLVDSTDKADLRLIYLALAHMIKFRGHFLIEGDLNPDNSDVDKLFIQLVQTYNQLFEENPINASGVDAKAILSARLSKSRRLENLIAQLPGEKKNGLFGNLIALSLGLTPNFKSNFDLAEDAKLQLSKDTYDDDLDNLLAQIGDQYADLFLAAKNLSDAILLSDILRVNTEITKAPLSASMIKRYDEHHQDLTLLKALVRQQLPEKYKEIFFDQSKNGYAGYIDGGASQEEFYKFIKPILEKMDGTEELLVKLNREDLLRKQRTFDNGSIPHQIHLGELHAILRRQEDFYPFLKDNREKIEKILTFRIPYYVGPLARGNSRFAWMTRKSEETITPWNFEEVVDKGASAQSFIERMTNFDKNLPNEKVLPKHSLLYEYFTVYNELTKVKYVTEGMRKPAFLSGEQKKAIVDLLFKTNRKVTVKQLKEDYFKKIECFDSVEISGVEDRFNASLGTYHDLLKIIKDKDFLDNEENEDILEDIVLTLTLFEDREMIEERLKTYAHLFDDKVMKQLKRRRYTGWGRLSRKLINGIRDKQSGKTILDFLKSDGFANRNFMQLIHDDSLTFKEDIQKAQVSGQGDSLHEHIANLAGSPAIKKGILQTVKVVDELVKVMGRHKPENIVIEMARENQTTQKGQKNSRERMKRIEEGIKELGSQILKEHPVENTQLQNEKLYLYYLQNGRDMYVDQELDINRLSDYDVDHIVPQSFLKDDSIDNKVLTRSDKARGKSDNVPSEEVVKKMKNYWRQLLNAKLITQRKFDNLTKAERGGLSELDKAGFIKRQLVETRQITKHVAQILDSRMNTKYDENDKLIREVKVITLKSKLVSDFRKDFQFYKVREINNYHHAHDAYLNAVVGTALIKKYPKLESEFVYGDYKVYDVRKMIAKSEQEIGKATAKYFFYSNIMNFFKTEITLANGEIRKRPLIETNGETGEIVWDKGRDFATVRKVLSMPQVNIVKKTEVQTGGFSKESILPKRNSDKLIARKKDWDPKKYGGFDSPTVAYSVLVVAKVEKGKSKKLKSVKELLGITIMERSSFEKNPIDFLEAKGYKEVKKDLIIKLPKYSLFELENGRKRMLASAGELQKGNELALPSKYVNFLYLASHYEKLKGSPEDNEQKQLFVEQHKHYLDEIIEQISEFSKRVILADANLDKVLSAYNKHRDKPIREQAENIIHLFTLTNLGAPAAFKYFDTTIDRKRYTSTKEVLDATLIHQSITGLYETRIDLSQLGGDGGGGSGSSPAPGGTLQLEEEYRLFEPESTQKQEMDIWLKNFPQAWAETGGMGTAHCQAPVLIQLKATATPISIRQYPMPHEAYQGIKPHIRRMLDQGILKPCQSPWNTPLLPVKKPGTEDYRPVQDLREVNKRVEDIHPTVPNPYNLLSTLPPSHPWYTVLDLKDAFFCLRLHSESQLLFAFEWRDPEIGLSGQLTWTRLPQGFKNSPTLFNEALHSDLADFRVRYPALVLLQYVDDLLLAAATRTECLEGTKALLETLGNKGYRASAKKAQICLQEVTYLGYSLKDGQRWLTKARKEAILSIPVPKNSRQVREFLGKAGYCRLFIPGFAELAAPLYPLTRPGTLFQWGTEQQLAFEDIKKALLSSPALGLPDITKPFELFIDENSGFAKGVLVQKLGPWKRPVAYLSKKLDTVASGWPPCLRMVAAIAILVKDAGKLTLGQPLTILTSHPVEALVRQPPNKWLSNARMTHYQAMLLDAERVHFGPTVSLNPATLLPLPSGGNHHDCLQILAETHGTRPDLTDQPLPDADLTWYTDGSSFIRNGEREAGAAVTTESEVIWAAPLPPGTSAQRAELIALTQALKMAEGKKLTVYTDSRYAFATTHVHGEIYRRRGWLTSEGKEIKNKNEILALLEALFLPKRLSIIHCPGHQKGDSPQAKGNRLADDTAKKAATETHSSLTVLPAGKRTADGSEFEKRTADGSEFESPKKKAKVE

SEQ ID NO: 1245 - protein, 2090 aa, synthetic construct
MPAAKRVKLDGGDKKYSIGLDIGTNSVGWAVITDEYKVPSKKFKVLGNTDRHSIKKNLIGALLFDSGETAEATRLKRTARRRYTRRKNRICYLQEIFSNEMAKVDDSFFHRLEESFLVEEDKKHERHPIFGNIVDEVAYHEKYPTIYHLRKKLVDSTDKADLRLIYLALAHMIKFRGHFLIEGDLNPDNSDVDKLFIQLVQTYNQLFEENPINASGVDAKAILSARLSKSRRLENLIAQLPGEKKNGLFGNLIALSLGLTPNFKSNFDLAEDAKLQLSKDTYDDDLDNLLAQIGDQYADLFLAAKNLSDAILLSDILRVNTEITKAPLSASMIKRYDEHHQDLTLLKALVRQQLPEKYKEIFFDQSKNGYAGYIDGGASQEEFYKFIKPILEKMDGTEELLVKLNREDLLRKQRTFDNGSIPHQIHLGELHAILRRQEDFYPFLKDNREKIEKILTFRIPYYVGPLARGNSRFAWMTRKSEETITPWNFEEVVDKGASAQSFIERMTNFDKNLPNEKVLPKHSLLYEYFTVYNELTKVKYVTEGMRKPAFLSGEQKKAIVDLLFKTNRKVTVKQLKEDYFKKIECFDSVEISGVEDRFNASLGTYHDLLKIIKDKDFLDNEENEDILEDIVLTLTLFEDREMIEERLKTYAHLFDDKVMKQLKRRRYTGWGRLSRKLINGIRDKQSGKTILDFLKSDGFANRNFMQLIHDDSLTFKEDIQKAQVSGQGDSLHEHIANLAGSPAIKKGILQTVKVVDELVKVMGRHKPENIVIEMARENQTTQKGQKNSRERMKRIEEGIKELGSQILKEHPVENTQLQNEKLYLYYLQNGRDMYVDQELDINRLSDYDVDHIVPQSFLKDDSIDNKVLTRSDKARGKSDNVPSEEVVKKMKNYWRQLLNAKLITQRKFDNLTKAERGGLSELDKAGFIKRQLVETRQITKHVAQILDSRMNTKYDENDKLIREVKVITLKSKLVSDFRKDFQFYKVREINNYHHAHDAYLNAVVGTALIKKYPKLESEFVYGDYKVYDVRKMIAKSEQEIGKATAKYFFYSNIMNFFKTEITLANGEIRKRPLIETNGETGEIVWDKGRDFATVRKVLSMPQVNIVKKTEVQTGGFSKESILPKRNSDKLIARKKDWDPKKYGGFDSPTVAYSVLVVAKVEKGKSKKLKSVKELLGITIMERSSFEKNPIDFLEAKGYKEVKKDLIIKLPKYSLFELENGRKRMLASAGELQKGNELALPSKYVNFLYLASHYEKLKGSPEDNEQKQLFVEQHKHYLDEIIEQISEFSKRVILADANLDKVLSAYNKHRDKPIREQAENIIHLFTLTNLGAPAAFKYFDTTIDRKRYTSTKEVLDATLIHQSITGLYETRIDLSQLGGDGGGSSPAPGGTLQLEEEYRLFEPESTQKQEMDIWLKNFPQAWAETGGMGTAHCQAPVLIQLKATATPISIRQYPMPHEAYQGIKPHIRRMLDQGILKPCQSPWNTPLLPVKKPGTEDYRPVQDLREVNKRVEDIHPTVPNPYNLLSTLPPSHPWYTVLDLKDAFFCLRLHSESQLLFAFEWRDPEIGLSGQLTWTRLPQGFKNSPTLFNEALHSDLADFRVRYPALVLLQYVDDLLLAAATRTECLEGTKALLETLGNKGYRASAKKAQICLQEVTYLGYSLKDGQRWLTKARKEAILSIPVPKNSRQVREFLGKAGYCRLFIPGFAELAAPLYPLTRPGTLFQWGTEQQLAFEDIKKALLSSPALGLPDITKPFELFIDENSGFAKGVLVQKLGPWKRPVAYLSKKLDTVASGWPPCLRMVAAIAILVKDAGKLTLGQPLTILTSHPVEALVRQPPNKWLSNARMTHYQAMLLDAERVHFGPTVSLNPATLLPLPSGGNHHDCLQILAETHGTRPDLTDQPLPDADLTWYTDGSSFIRNGEREAGAAVTTESEVIWAAPLPPGTSAQRAELIALTQALKMAEGKKLTVYTDSRYAFATTHVHGEIYRRRGWLTSEGKEIKNKNEILALLEALFLPKRLSIIHCPGHQKGDSPQAKGNRLADDTAKKAATETHSSLTVLPAGKRTADGSEFEKRTADGSEFESPKKKAKVE

SEQ ID NO: 1246 - protein, 2089 aa, synthetic construct
MPAAKRVKLDGGDKKYSIGLDIGTNSVGWAVITDEYKVPSKKFKVLGNTDRHSIKKNLIGALLFDSGETAEATRLKRTARRRYTRRKNRICYLQEIFSNEMAKVDDSFFHRLEESFLVEEDKKHERHPIFGNIVDEVAYHEKYPTIYHLRKKLVDSTDKADLRLIYLALAHMIKFRGHFLIEGDLNPDNSDVDKLFIQLVQTYNQLFEENPINASGVDAKAILSARLSKSRRLENLIAQLPGEKKNGLFGNLIALSLGLTPNFKSNFDLAEDAKLQLSKDTYDDDLDNLLAQIGDQYADLFLAAKNLSDAILLSDILRVNTEITKAPLSASMIKRYDEHHQDLTLLKALVRQQLPEKYKEIFFDQSKNGYAGYIDGGASQEEFYKFIKPILEKMDGTEELLVKLNREDLLRKQRTFDNGSIPHQIHLGELHAILRRQEDFYPFLKDNREKIEKILTFRIPYYVGPLARGNSRFAWMTRKSEETITPWNFEEVVDKGASAQSFIERMTNFDKNLPNEKVLPKHSLLYEYFTVYNELTKVKYVTEGMRKPAFLSGEQKKAIVDLLFKTNRKVTVKQLKEDYFKKIECFDSVEISGVEDRFNASLGTYHDLLKIIKDKDFLDNEENEDILEDIVLTLTLFEDREMIEERLKTYAHLFDDKVMKQLKRRRYTGWGRLSRKLINGIRDKQSGKTILDFLKSDGFANRNFMQLIHDDSLTFKEDIQKAQVSGQGDSLHEHIANLAGSPAIKKGILQTVKVVDELVKVMGRHKPENIVIEMARENQTTQKGQKNSRERMKRIEEGIKELGSQILKEHPVENTQLQNEKLYLYYLQNGRDMYVDQELDINRLSDYDVDHIVPQSFLKDDSIDNKVLTRSDKARGKSDNVPSEEVVKKMKNYWRQLLNAKLITQRKFDNLTKAERGGLSELDKAGFIKRQLVETRQITKHVAQILDSRMNTKYDENDKLIREVKVITLKSKLVSDFRKDFQFYKVREINNYHHAHDAYLNAVVGTALIKKYPKLESEFVYGDYKVYDVRKMIAKSEQEIGKATAKYFFYSNIMNFFKTEITLANGEIRKRPLIETNGETGEIVWDKGRDFATVRKVLSMPQVNIVKKTEVQTGGFSKESILPKRNSDKLIARKKDWDPKKYGGFDSPTVAYSVLVVAKVEKGKSKKLKSVKELLGITIMERSSFEKNPIDFLEAKGYKEVKKDLIIKLPKYSLFELENGRKRMLASAGELQKGNELALPSKYVNFLYLASHYEKLKGSPEDNEQKQLFVEQHKHYLDEIIEQISEFSKRVILADANLDKVLSAYNKHRDKPIREQAENIIHLFTLTNLGAPAAFKYFDTTIDRKRYTSTKEVLDATLIHQSITGLYETRIDLSQLGGDGGPAPAPGGTLQLEEEYRLFEPESTQKQEMDIWLKNFPQAWAETGGMGTAHCQAPVLIQLKATATPISIRQYPMPHEAYQGIKPHIRRMLDQGILKPCQSPWNTPLLPVKKPGTEDYRPVQDLREVNKRVEDIHPTVPNPYNLLSTLPPSHPWYTVLDLKDAFFCLRLHSESQLLFAFEWRDPEIGLSGQLTWTRLPQGFKNSPTLFNEALHSDLADFRVRYPALVLLQYVDDLLLAAATRTECLEGTKALLETLGNKGYRASAKKAQICLQEVTYLGYSLKDGQRWLTKARKEAILSIPVPKNSRQVREFLGKAGYCRLFIPGFAELAAPLYPLTRPGTLFQWGTEQQLAFEDIKKALLSSPALGLPDITKPFELFIDENSGFAKGVLVQKLGPWKRPVAYLSKKLDTVASGWPPCLRMVAAIAILVKDAGKLTLGQPLTILTSHPVEALVRQPPNKWLSNARMTHYQAMLLDAERVHFGPTVSLNPATLLPLPSGGNHHDCLQILAETHGTRPDLTDQPLPDADLTWYTDGSSFIRNGEREAGAAVTTESEVIWAAPLPPGTSAQRAELIALTQALKMAEGKKLTVYTDSRYAFATTHVHGEIYRRRGWLTSEGKEIKNKNEILALLEALFLPKRLSIIHCPGHQKGDSPQAKGNRLADDTAKKAATETHSSLTVLPAGKRTADGSEFEKRTADGSEFESPKKKAKVE

SEQ ID NO: 1247 - protein, 2093 aa, synthetic construct
MPAAKRVKLDGGDKKYSIGLDIGTNSVGWAVITDEYKVPSKKFKVLGNTDRHSIKKNLIGALLFDSGETAEATRLKRTARRRYTRRKNRICYLQEIFSNEMAKVDDSFFHRLEESFLVEEDKKHERHPIFGNIVDEVAYHEKYPTIYHLRKKLVDSTDKADLRLIYLALAHMIKFRGHFLIEGDLNPDNSDVDKLFIQLVQTYNQLFEENPINASGVDAKAILSARLSKSRRLENLIAQLPGEKKNGLFGNLIALSLGLTPNFKSNFDLAEDAKLQLSKDTYDDDLDNLLAQIGDQYADLFLAAKNLSDAILLSDILRVNTEITKAPLSASMIKRYDEHHQDLTLLKALVRQQLPEKYKEIFFDQSKNGYAGYIDGGASQEEFYKFIKPILEKMDGTEELLVKLNREDLLRKQRTFDNGSIPHQIHLGELHAILRRQEDFYPFLKDNREKIEKILTFRIPYYVGPLARGNSRFAWMTRKSEETITPWNFEEVVDKGASAQSFIERMTNFDKNLPNEKVLPKHSLLYEYFTVYNELTKVKYVTEGMRKPAFLSGEQKKAIVDLLFKTNRKVTVKQLKEDYFKKIECFDSVEISGVEDRFNASLGTYHDLLKIIKDKDFLDNEENEDILEDIVLTLTLFEDREMIEERLKTYAHLFDDKVMKQLKRRRYTGWGRLSRKLINGIRDKQSGKTILDFLKSDGFANRNFMQLIHDDSLTFKEDIQKAQVSGQGDSLHEHIANLAGSPAIKKGILQTVKVVDELVKVMGRHKPENIVIEMARENQTTQKGQKNSRERMKRIEEGIKELGSQILKEHPVENTQLQNEKLYLYYLQNGRDMYVDQELDINRLSDYDVDHIVPQSFLKDDSIDNKVLTRSDKARGKSDNVPSEEVVKKMKNYWRQLLNAKLITQRKFDNLTKAERGGLSELDKAGFIKRQLVETRQITKHVAQILDSRMNTKYDENDKLIREVKVITLKSKLVSDFRKDFQFYKVREINNYHHAHDAYLNAVVGTALIKKYPKLESEFVYGDYKVYDVRKMIAKSEQEIGKATAKYFFYSNIMNFFKTEITLANGEIRKRPLIETNGETGEIVWDKGRDFATVRKVLSMPQVNIVKKTEVQTGGFSKESILPKRNSDKLIARKKDWDPKKYGGFDSPTVAYSVLVVAKVEKGKSKKLKSVKELLGITIMERSSFEKNPIDFLEAKGYKEVKKDLIIKLPKYSLFELENGRKRMLASAGELQKGNELALPSKYVNFLYLASHYEKLKGSPEDNEQKQLFVEQHKHYLDEIIEQISEFSKRVILADANLDKVLSAYNKHRDKPIREQAENIIHLFTLTNLGAPAAFKYFDTTIDRKRYTSTKEVLDATLIHQSITGLYETRIDLSQLGGDGGGGGGSSGGSGGTLQLEEEYRLFEPESTQKQEMDIWLKNFPQAWAETGGMGTAHCQAPVLIQLKATATPISIRQYPMPHEAYQGIKPHIRRMLDQGILKPCQSPWNTPLLPVKKPGTEDYRPVQDLREVNKRVEDIHPTVPNPYNLLSTLPPSHPWYTVLDLKDAFFCLRLHSESQLLFAFEWRDPEIGLSGQLTWTRLPQGFKNSPTLFNEALHSDLADFRVRYPALVLLQYVDDLLLAAATRTECLEGTKALLETLGNKGYRASAKKAQICLQEVTYLGYSLKDGQRWLTKARKEAILSIPVPKNSRQVREFLGKAGYCRLFIPGFAELAAPLYPLTRPGTLFQWGTEQQLAFEDIKKALLSSPALGLPDITKPFELFIDENSGFAKGVLVQKLGPWKRPVAYLSKKLDTVASGWPPCLRMVAAIAILVKDAGKLTLGQPLTILTSHPVEALVRQPPNKWLSNARMTHYQAMLLDAERVHFGPTVSLNPATLLPLPSGGNHHDCLQILAETHGTRPDLTDQPLPDADLTWYTDGSSFIRNGEREAGAAVTTESEVIWAAPLPPGTSAQRAELIALTQALKMAEGKKLTVYTDSRYAFATTHVHGEIYRRRGWLTSEGKEIKNKNEILALLEALFLPKRLSIIHCPGHQKGDSPQAKGNRLADDTAKKAATETHSSLTVLPAGKRTADGSEFEKRTADGSEFESPKKKAKVE

SEQ ID NO: 1248 - protein, 2090 aa, synthetic construct
MPAAKRVKLDGGDKKYSIGLDIGTNSVGWAVITDEYKVPSKKFKVLGNTDRHSIKKNLIGALLFDSGETAEATRLKRTARRRYTRRKNRICYLQEIFSNEMAKVDDSFFHRLEESFLVEEDKKHERHPIFGNIVDEVAYHEKYPTIYHLRKKLVDSTDKADLRLIYLALAHMIKFRGHFLIEGDLNPDNSDVDKLFIQLVQTYNQLFEENPINASGVDAKAILSARLSKSRRLENLIAQLPGEKKNGLFGNLIALSLGLTPNFKSNFDLAEDAKLQLSKDTYDDDLDNLLAQIGDQYADLFLAAKNLSDAILLSDILRVNTEITKAPLSASMIKRYDEHHQDLTLLKALVRQQLPEKYKEIFFDQSKNGYAGYIDGGASQEEFYKFIKPILEKMDGTEELLVKLNREDLLRKQRTFDNGSIPHQIHLGELHAILRRQEDFYPFLKDNREKIEKILTFRIPYYVGPLARGNSRFAWMTRKSEETITPWNFEEVVDKGASAQSFIERMTNFDKNLPNEKVLPKHSLLYEYFTVYNELTKVKYVTEGMRKPAFLSGEQKKAIVDLLFKTNRKVTVKQLKEDYFKKIECFDSVEISGVEDRFNASLGTYHDLLKIIKDKDFLDNEENEDILEDIVLTLTLFEDREMIEERLKTYAHLFDDKVMKQLKRRRYTGWGRLSRKLINGIRDKQSGKTILDFLKSDGFANRNFMQLIHDDSLTFKEDIQKAQVSGQGDSLHEHIANLAGSPAIKKGILQTVKVVDELVKVMGRHKPENIVIEMARENQTTQKGQKNSRERMKRIEEGIKELGSQILKEHPVENTQLQNEKLYLYYLQNGRDMYVDQELDINRLSDYDVDHIVPQSFLKDDSIDNKVLTRSDKARGKSDNVPSEEVVKKMKNYWRQLLNAKLITQRKFDNLTKAERGGLSELDKAGFIKRQLVETRQITKHVAQILDSRMNTKYDENDKLIREVKVITLKSKLVSDFRKDFQFYKVREINNYHHAHDAYLNAVVGTALIKKYPKLESEFVYGDYKVYDVRKMIAKSEQEIGKATAKYFFYSNIMNFFKTEITLANGEIRKRPLIETNGETGEIVWDKGRDFATVRKVLSMPQVNIVKKTEVQTGGFSKESILPKRNSDKLIARKKDWDPKKYGGFDSPTVAYSVLVVAKVEKGKSKKLKSVKELLGITIMERSSFEKNPIDFLEAKGYKEVKKDLIIKLPKYSLFELENGRKRMLASAGELQKGNELALPSKYVNFLYLASHYEKLKGSPEDNEQKQLFVEQHKHYLDEIIEQISEFSKRVILADANLDKVLSAYNKHRDKPIREQAENIIHLFTLTNLGAPAAFKYFDTTIDRKRYTSTKEVLDATLIHQSITGLYETRIDLSQLGGDGGPAPGGGGGTLQLEEEYRLFEPESTQKQEMDIWLKNFPQAWAETGGMGTAHCQAPVLIQLKATATPISIRQYPMPHEAYQGIKPHIRRMLDQGILKPCQSPWNTPLLPVKKPGTEDYRPVQDLREVNKRVEDIHPTVPNPYNLLSTLPPSHPWYTVLDLKDAFFCLRLHSESQLLFAFEWRDPEIGLSGQLTWTRLPQGFKNSPTLFNEALHSDLADFRVRYPALVLLQYVDDLLLAAATRTECLEGTKALLETLGNKGYRASAKKAQICLQEVTYLGYSLKDGQRWLTKARKEAILSIPVPKNSRQVREFLGKAGYCRLFIPGFAELAAPLYPLTRPGTLFQWGTEQQLAFEDIKKALLSSPALGLPDITKPFELFIDENSGFAKGVLVQKLGPWKRPVAYLSKKLDTVASGWPPCLRMVAAIAILVKDAGKLTLGQPLTILTSHPVEALVRQPPNKWLSNARMTHYQAMLLDAERVHFGPTVSLNPATLLPLPSGGNHHDCLQILAETHGTRPDLTDQPLPDADLTWYTDGSSFIRNGEREAGAAVTTESEVIWAAPLPPGTSAQRAELIALTQALKMAEGKKLTVYTDSRYAFATTHVHGEIYRRRGWLTSEGKEIKNKNEILALLEALFLPKRLSIIHCPGHQKGDSPQAKGNRLADDTAKKAATETHSSLTVLPAGKRTADGSEFEKRTADGSEFESPKKKAKVE

SEQ ID NO: 1249 - protein, 2090 aa, synthetic construct
MPAAKRVKLDGGDKKYSIGLDIGTNSVGWAVITDEYKVPSKKFKVLGNTDRHSIKKNLIGALLFDSGETAEATRLKRTARRRYTRRKNRICYLQEIFSNEMAKVDDSFFHRLEESFLVEEDKKHERHPIFGNIVDEVAYHEKYPTIYHLRKKLVDSTDKADLRLIYLALAHMIKFRGHFLIEGDLNPDNSDVDKLFIQLVQTYNQLFEENPINASGVDAKAILSARLSKSRRLENLIAQLPGEKKNGLFGNLIALSLGLTPNFKSNFDLAEDAKLQLSKDTYDDDLDNLLAQIGDQYADLFLAAKNLSDAILLSDILRVNTEITKAPLSASMIKRYDEHHQDLTLLKALVRQQLPEKYKEIFFDQSKNGYAGYIDGGASQEEFYKFIKPILEKMDGTEELLVKLNREDLLRKQRTFDNGSIPHQIHLGELHAILRRQEDFYPFLKDNREKIEKILTFRIPYYVGPLARGNSRFAWMTRKSEETITPWNFEEVVDKGASAQSFIERMTNFDKNLPNEKVLPKHSLLYEYFTVYNELTKVKYVTEGMRKPAFLSGEQKKAIVDLLFKTNRKVTVKQLKEDYFKKIECFDSVEISGVEDRFNASLGTYHDLLKIIKDKDFLDNEENEDILEDIVLTLTLFEDREMIEERLKTYAHLFDDKVMKQLKRRRYTGWGRLSRKLINGIRDKQSGKTILDFLKSDGFANRNFMQLIHDDSLTFKEDIQKAQVSGQGDSLHEHIANLAGSPAIKKGILQTVKVVDELVKVMGRHKPENIVIEMARENQTTQKGQKNSRERMKRIEEGIKELGSQILKEHPVENTQLQNEKLYLYYLQNGRDMYVDQELDINRLSDYDVDHIVPQSFLKDDSIDNKVLTRSDKARGKSDNVPSEEVVKKMKNYWRQLLNAKLITQRKFDNLTKAERGGLSELDKAGFIKRQLVETRQITKHVAQILDSRMNTKYDENDKLIREVKVITLKSKLVSDFRKDFQFYKVREINNYHHAHDAYLNAVVGTALIKKYPKLESEFVYGDYKVYDVRKMIAKSEQEIGKATAKYFFYSNIMNFFKTEITLANGEIRKRPLIETNGETGEIVWDKGRDFATVRKVLSMPQVNIVKKTEVQTGGFSKESILPKRNSDKLIARKKDWDPKKYGGFDSPTVAYSVLVVAKVEKGKSKKLKSVKELLGITIMERSSFEKNPIDFLEAKGYKEVKKDLIIKLPKYSLFELENGRKRMLASAGELQKGNELALPSKYVNFLYLASHYEKLKGSPEDNEQKQLFVEQHKHYLDEIIEQISEFSKRVILADANLDKVLSAYNKHRDKPIREQAENIIHLFTLTNLGAPAAFKYFDTTIDRKRYTSTKEVLDATLIHQSITGLYETRIDLSQLGGDGGGSSGGGGGTLQLEEEYRLFEPESTQKQEMDIWLKNFPQAWAETGGMGTAHCQAPVLIQLKATATPISIRQYPMPHEAYQGIKPHIRRMLDQGILKPCQSPWNTPLLPVKKPGTEDYRPVQDLREVNKRVEDIHPTVPNPYNLLSTLPPSHPWYTVLDLKDAFFCLRLHSESQLLFAFEWRDPEIGLSGQLTWTRLPQGFKNSPTLFNEALHSDLADFRVRYPALVLLQYVDDLLLAAATRTECLEGTKALLETLGNKGYRASAKKAQICLQEVTYLGYSLKDGQRWLTKARKEAILSIPVPKNSRQVREFLGKAGYCRLFIPGFAELAAPLYPLTRPGTLFQWGTEQQLAFEDIKKALLSSPALGLPDITKPFELFIDENSGFAKGVLVQKLGPWKRPVAYLSKKLDTVASGWPPCLRMVAAIAILVKDAGKLTLGQPLTILTSHPVEALVRQPPNKWLSNARMTHYQAMLLDAERVHFGPTVSLNPATLLPLPSGGNHHDCLQILAETHGTRPDLTDQPLPDADLTWYTDGSSFIRNGEREAGAAVTTESEVIWAAPLPPGTSAQRAELIALTQALKMAEGKKLTVYTDSRYAFATTHVHGEIYRRRGWLTSEGKEIKNKNEILALLEALFLPKRLSIIHCPGHQKGDSPQAKGNRLADDTAKKAATETHSSLTVLPAGKRTADGSEFEKRTADGSEFESPKKKAKVE

SEQ ID NO: 1250 - protein, 2090 aa, synthetic construct
MPAAKRVKLDGGDKKYSIGLDIGTNSVGWAVITDEYKVPSKKFKVLGNTDRHSIKKNLIGALLFDSGETAEATRLKRTARRRYTRRKNRICYLQEIFSNEMAKVDDSFFHRLEESFLVEEDKKHERHPIFGNIVDEVAYHEKYPTIYHLRKKLVDSTDKADLRLIYLALAHMIKFRGHFLIEGDLNPDNSDVDKLFIQLVQTYNQLFEENPINASGVDAKAILSARLSKSRRLENLIAQLPGEKKNGLFGNLIALSLGLTPNFKSNFDLAEDAKLQLSKDTYDDDLDNLLAQIGDQYADLFLAAKNLSDAILLSDILRVNTEITKAPLSASMIKRYDEHHQDLTLLKALVRQQLPEKYKEIFFDQSKNGYAGYIDGGASQEEFYKFIKPILEKMDGTEELLVKLNREDLLRKQRTFDNGSIPHQIHLGELHAILRRQEDFYPFLKDNREKIEKILTFRIPYYVGPLARGNSRFAWMTRKSEETITPWNFEEVVDKGASAQSFIERMTNFDKNLPNEKVLPKHSLLYEYFTVYNELTKVKYVTEGMRKPAFLSGEQKKAIVDLLFKTNRKVTVKQLKEDYFKKIECFDSVEISGVEDRFNASLGTYHDLLKIIKDKDFLDNEENEDILEDIVLTLTLFEDREMIEERLKTYAHLFDDKVMKQLKRRRYTGWGRLSRKLINGIRDKQSGKTILDFLKSDGFANRNFMQLIHDDSLTFKEDIQKAQVSGQGDSLHEHIANLAGSPAIKKGILQTVKVVDELVKVMGRHKPENIVIEMARENQTTQKGQKNSRERMKRIEEGIKELGSQILKEHPVENTQLQNEKLYLYYLQNGRDMYVDQELDINRLSDYDVDHIVPQSFLKDDSIDNKVLTRSDKARGKSDNVPSEEVVKKMKNYWRQLLNAKLITQRKFDNLTKAERGGLSELDKAGFIKRQLVETRQITKHVAQILDSRMNTKYDENDKLIREVKVITLKSKLVSDFRKDFQFYKVREINNYHHAHDAYLNAVVGTALIKKYPKLESEFVYGDYKVYDVRKMIAKSEQEIGKATAKYFFYSNIMNFFKTEITLANGEIRKRPLIETNGETGEIVWDKGRDFATVRKVLSMPQVNIVKKTEVQTGGFSKESILPKRNSDKLIARKKDWDPKKYGGFDSPTVAYSVLVVAKVEKGKSKKLKSVKELLGITIMERSSFEKNPIDFLEAKGYKEVKKDLIIKLPKYSLFELENGRKRMLASAGELQKGNELALPSKYVNFLYLASHYEKLKGSPEDNEQKQLFVEQHKHYLDEIIEQISEFSKRVILADANLDKVLSAYNKHRDKPIREQAENIIHLFTLTNLGAPAAFKYFDTTIDRKRYTSTKEVLDATLIHQSITGLYETRIDLSQLGGDGGGSSGSSGGTLQLEEEYRLFEPESTQKQEMDIWLKNFPQAWAETGGMGTAHCQAPVLIQLKATATPISIRQYPMPHEAYQGIKPHIRRMLDQGILKPCQSPWNTPLLPVKKPGTEDYRPVQDLREVNKRVEDIHPTVPNPYNLLSTLPPSHPWYTVLDLKDAFFCLRLHSESQLLFAFEWRDPEIGLSGQLTWTRLPQGFKNSPTLFNEALHSDLADFRVRYPALVLLQYVDDLLLAAATRTECLEGTKALLETLGNKGYRASAKKAQICLQEVTYLGYSLKDGQRWLTKARKEAILSIPVPKNSRQVREFLGKAGYCRLFIPGFAELAAPLYPLTRPGTLFQWGTEQQLAFEDIKKALLSSPALGLPDITKPFELFIDENSGFAKGVLVQKLGPWKRPVAYLSKKLDTVASGWPPCLRMVAAIAILVKDAGKLTLGQPLTILTSHPVEALVRQPPNKWLSNARMTHYQAMLLDAERVHFGPTVSLNPATLLPLPSGGNHHDCLQILAETHGTRPDLTDQPLPDADLTWYTDGSSFIRNGEREAGAAVTTESEVIWAAPLPPGTSAQRAELIALTQALKMAEGKKLTVYTDSRYAFATTHVHGEIYRRRGWLTSEGKEIKNKNEILALLEALFLPKRLSIIHCPGHQKGDSPQAKGNRLADDTAKKAATETHSSLTVLPAGKRTADGSEFEKRTADGSEFESPKKKAKVE

SEQ ID NO: 1251 - protein, 2088 aa, synthetic construct
MPAAKRVKLDGGDKKYSIGLDIGTNSVGWAVITDEYKVPSKKFKVLGNTDRHSIKKNLIGALLFDSGETAEATRLKRTARRRYTRRKNRICYLQEIFSNEMAKVDDSFFHRLEESFLVEEDKKHERHPIFGNIVDEVAYHEKYPTIYHLRKKLVDSTDKADLRLIYLALAHMIKFRGHFLIEGDLNPDNSDVDKLFIQLVQTYNQLFEENPINASGVDAKAILSARLSKSRRLENLIAQLPGEKKNGLFGNLIALSLGLTPNFKSNFDLAEDAKLQLSKDTYDDDLDNLLAQIGDQYADLFLAAKNLSDAILLSDILRVNTEITKAPLSASMIKRYDEHHQDLTLLKALVRQQLPEKYKEIFFDQSKNGYAGYIDGGASQEEFYKFIKPILEKMDGTEELLVKLNREDLLRKQRTFDNGSIPHQIHLGELHAILRRQEDFYPFLKDNREKIEKILTFRIPYYVGPLARGNSRFAWMTRKSEETITPWNFEEVVDKGASAQSFIERMTNFDKNLPNEKVLPKHSLLYEYFTVYNELTKVKYVTEGMRKPAFLSGEQKKAIVDLLFKTNRKVTVKQLKEDYFKKIECFDSVEISGVEDRFNASLGTYHDLLKIIKDKDFLDNEENEDILEDIVLTLTLFEDREMIEERLKTYAHLFDDKVMKQLKRRRYTGWGRLSRKLINGIRDKQSGKTILDFLKSDGFANRNFMQLIHDDSLTFKEDIQKAQVSGQGDSLHEHIANLAGSPAIKKGILQTVKVVDELVKVMGRHKPENIVIEMARENQTTQKGQKNSRERMKRIEEGIKELGSQILKEHPVENTQLQNEKLYLYYLQNGRDMYVDQELDINRLSDYDVDHIVPQSFLKDDSIDNKVLTRSDKARGKSDNVPSEEVVKKMKNYWRQLLNAKLITQRKFDNLTKAERGGLSELDKAGFIKRQLVETRQITKHVAQILDSRMNTKYDENDKLIREVKVITLKSKLVSDFRKDFQFYKVREINNYHHAHDAYLNAVVGTALIKKYPKLESEFVYGDYKVYDVRKMIAKSEQEIGKATAKYFFYSNIMNFFKTEITLANGEIRKRPLIETNGETGEIVWDKGRDFATVRKVLSMPQVNIVKKTEVQTGGFSKESILPKRNSDKLIARKKDWDPKKYGGFDSPTVAYSVLVVAKVEKGKSKKLKSVKELLGITIMERSSFEKNPIDFLEAKGYKEVKKDLIIKLPKYSLFELENGRKRMLASAGELQKGNELALPSKYVNFLYLASHYEKLKGSPEDNEQKQLFVEQHKHYLDEIIEQISEFSKRVILADANLDKVLSAYNKHRDKPIREQAENIIHLFTLTNLGAPAAFKYFDTTIDRKRYTSTKEVLDATLIHQSITGLYETRIDLSQLGGDGGGGGGGGTLQLEEEYRLFEPESTQKQEMDIWLKNFPQAWAETGGMGTAHCQAPVLIQLKATATPISIRQYPMPHEAYQGIKPHIRRMLDQGILKPCQSPWNTPLLPVKKPGTEDYRPVQDLREVNKRVEDIHPTVPNPYNLLSTLPPSHPWYTVLDLKDAFFCLRLHSESQLLFAFEWRDPEIGLSGQLTWTRLPQGFKNSPTLFNEALHSDLADFRVRYPALVLLQYVDDLLLAAATRTECLEGTKALLETLGNKGYRASAKKAQICLQEVTYLGYSLKDGQRWLTKARKEAILSIPVPKNSRQVREFLGKAGYCRLFIPGFAELAAPLYPLTRPGTLFQWGTEQQLAFEDIKKALLSSPALGLPDITKPFELFIDENSGFAKGVLVQKLGPWKRPVAYLSKKLDTVASGWPPCLRMVAAIAILVKDAGKLTLGQPLTILTSHPVEALVRQPPNKWLSNARMTHYQAMLLDAERVHFGPTVSLNPATLLPLPSGGNHHDCLQILAETHGTRPDLTDQPLPDADLTWYTDGSSFIRNGEREAGAAVTTESEVIWAAPLPPGTSAQRAELIALTQALKMAEGKKLTVYTDSRYAFATTHVHGEIYRRRGWLTSEGKEIKNKNEILALLEALFLPKRLSIIHCPGHQKGDSPQAKGNRLADDTAKKAATETHSSLTVLPAGKRTADGSEFEKRTADGSEFESPKKKAKVE

SEQ ID NO: 1252 - protein, 2090 aa, synthetic construct
MPAAKRVKLDGGDKKYSIGLDIGTNSVGWAVITDEYKVPSKKFKVLGNTDRHSIKKNLIGALLFDSGETAEATRLKRTARRRYTRRKNRICYLQEIFSNEMAKVDDSFFHRLEESFLVEEDKKHERHPIFGNIVDEVAYHEKYPTIYHLRKKLVDSTDKADLRLIYLALAHMIKFRGHFLIEGDLNPDNSDVDKLFIQLVQTYNQLFEENPINASGVDAKAILSARLSKSRRLENLIAQLPGEKKNGLFGNLIALSLGLTPNFKSNFDLAEDAKLQLSKDTYDDDLDNLLAQIGDQYADLFLAAKNLSDAILLSDILRVNTEITKAPLSASMIKRYDEHHQDLTLLKALVRQQLPEKYKEIFFDQSKNGYAGYIDGGASQEEFYKFIKPILEKMDGTEELLVKLNREDLLRKQRTFDNGSIPHQIHLGELHAILRRQEDFYPFLKDNREKIEKILTFRIPYYVGPLARGNSRFAWMTRKSEETITPWNFEEVVDKGASAQSFIERMTNFDKNLPNEKVLPKHSLLYEYFTVYNELTKVKYVTEGMRKPAFLSGEQKKAIVDLLFKTNRKVTVKQLKEDYFKKIECFDSVEISGVEDRFNASLGTYHDLLKIIKDKDFLDNEENEDILEDIVLTLTLFEDREMIEERLKTYAHLFDDKVMKQLKRRRYTGWGRLSRKLINGIRDKQSGKTILDFLKSDGFANRNFMQLIHDDSLTFKEDIQKAQVSGQGDSLHEHIANLAGSPAIKKGILQTVKVVDELVKVMGRHKPENIVIEMARENQTTQKGQKNSRERMKRIEEGIKELGSQILKEHPVENTQLQNEKLYLYYLQNGRDMYVDQELDINRLSDYDVDHIVPQSFLKDDSIDNKVLTRSDKARGKSDNVPSEEVVKKMKNYWRQLLNAKLITQRKFDNLTKAERGGLSELDKAGFIKRQLVETRQITKHVAQILDSRMNTKYDENDKLIREVKVITLKSKLVSDFRKDFQFYKVREINNYHHAHDAYLNAVVGTALIKKYPKLESEFVYGDYKVYDVRKMIAKSEQEIGKATAKYFFYSNIMNFFKTEITLANGEIRKRPLIETNGETGEIVWDKGRDFATVRKVLSMPQVNIVKKTEVQTGGFSKESILPKRNSDKLIARKKDWDPKKYGGFDSPTVAYSVLVVAKVEKGKSKKLKSVKELLGITIMERSSFEKNPIDFLEAKGYKEVKKDLIIKLPKYSLFELENGRKRMLASAGELQKGNELALPSKYVNFLYLASHYEKLKGSPEDNEQKQLFVEQHKHYLDEIIEQISEFSKRVILADANLDKVLSAYNKHRDKPIREQAENIIHLFTLTNLGAPAAFKYFDTTIDRKRYTSTKEVLDATLIHQSITGLYETRIDLSQLGGDGGPAPGSSGGTLQLEEEYRLFEPESTQKQEMDIWLKNFPQAWAETGGMGTAHCQAPVLIQLKATATPISIRQYPMPHEAYQGIKPHIRRMLDQGILKPCQSPWNTPLLPVKKPGTEDYRPVQDLREVNKRVEDIHPTVPNPYNLLSTLPPSHPWYTVLDLKDAFFCLRLHSESQLLFAFEWRDPEIGLSGQLTWTRLPQGFKNSPTLFNEALHSDLADFRVRYPALVLLQYVDDLLLAAATRTECLEGTKALLETLGNKGYRASAKKAQICLQEVTYLGYSLKDGQRWLTKARKEAILSIPVPKNSRQVREFLGKAGYCRLFIPGFAELAAPLYPLTRPGTLFQWGTEQQLAFEDIKKALLSSPALGLPDITKPFELFIDENSGFAKGVLVQKLGPWKRPVAYLSKKLDTVASGWPPCLRMVAAIAILVKDAGKLTLGQPLTILTSHPVEALVRQPPNKWLSNARMTHYQAMLLDAERVHFGPTVSLNPATLLPLPSGGNHHDCLQILAETHGTRPDLTDQPLPDADLTWYTDGSSFIRNGEREAGAAVTTESEVIWAAPLPPGTSAQRAELIALTQALKMAEGKKLTVYTDSRYAFATTHVHGEIYRRRGWLTSEGKEIKNKNEILALLEALFLPKRLSIIHCPGHQKGDSPQAKGNRLADDTAKKAATETHSSLTVLPAGKRTADGSEFEKRTADGSEFESPKKKAKVE

SEQ ID NO: 1253 - protein, 2095 aa, synthetic construct
MPAAKRVKLDGGDKKYSIGLDIGTNSVGWAVITDEYKVPSKKFKVLGNTDRHSIKKNLIGALLFDSGETAEATRLKRTARRRYTRRKNRICYLQEIFSNEMAKVDDSFFHRLEESFLVEEDKKHERHPIFGNIVDEVAYHEKYPTIYHLRKKLVDSTDKADLRLIYLALAHMIKFRGHFLIEGDLNPDNSDVDKLFIQLVQTYNQLFEENPINASGVDAKAILSARLSKSRRLENLIAQLPGEKKNGLFGNLIALSLGLTPNFKSNFDLAEDAKLQLSKDTYDDDLDNLLAQIGDQYADLFLAAKNLSDAILLSDILRVNTEITKAPLSASMIKRYDEHHQDLTLLKALVRQQLPEKYKEIFFDQSKNGYAGYIDGGASQEEFYKFIKPILEKMDGTEELLVKLNREDLLRKQRTFDNGSIPHQIHLGELHAILRRQEDFYPFLKDNREKIEKILTFRIPYYVGPLARGNSRFAWMTRKSEETITPWNFEEVVDKGASAQSFIERMTNFDKNLPNEKVLPKHSLLYEYFTVYNELTKVKYVTEGMRKPAFLSGEQKKAIVDLLFKTNRKVTVKQLKEDYFKKIECFDSVEISGVEDRFNASLGTYHDLLKIIKDKDFLDNEENEDILEDIVLTLTLFEDREMIEERLKTYAHLFDDKVMKQLKRRRYTGWGRLSRKLINGIRDKQSGKTILDFLKSDGFANRNFMQLIHDDSLTFKEDIQKAQVSGQGDSLHEHIANLAGSPAIKKGILQTVKVVDELVKVMGRHKPENIVIEMARENQTTQKGQKNSRERMKRIEEGIKELGSQILKEHPVENTQLQNEKLYLYYLQNGRDMYVDQELDINRLSDYDVDHIVPQSFLKDDSIDNKVLTRSDKARGKSDNVPSEEVVKKMKNYWRQLLNAKLITQRKFDNLTKAERGGLSELDKAGFIKRQLVETRQITKHVAQILDSRMNTKYDENDKLIREVKVITLKSKLVSDFRKDFQFYKVREINNYHHAHDAYLNAVVGTALIKKYPKLESEFVYGDYKVYDVRKMIAKSEQEIGKATAKYFFYSNIMNFFKTEITLANGEIRKRPLIETNGETGEIVWDKGRDFATVRKVLSMPQVNIVKKTEVQTGGFSKESILPKRNSDKLIARKKDWDPKKYGGFDSPTVAYSVLVVAKVEKGKSKKLKSVKELLGITIMERSSFEKNPIDFLEAKGYKEVKKDLIIKLPKYSLFELENGRKRMLASAGELQKGNELALPSKYVNFLYLASHYEKLKGSPEDNEQKQLFVEQHKHYLDEIIEQISEFSKRVILADANLDKVLSAYNKHRDKPIREQAENIIHLFTLTNLGAPAAFKYFDTTIDRKRYTSTKEVLDATLIHQSITGLYETRIDLSQLGGDGGEAAAKGGGPAPGGTLQLEEEYRLFEPESTQKQEMDIWLKNFPQAWAETGGMGTAHCQAPVLIQLKATATPISIRQYPMPHEAYQGIKPHIRRMLDQGILKPCQSPWNTPLLPVKKPGTEDYRPVQDLREVNKRVEDIHPTVPNPYNLLSTLPPSHPWYTVLDLKDAFFCLRLHSESQLLFAFEWRDPEIGLSGQLTWTRLPQGFKNSPTLFNEALHSDLADFRVRYPALVLLQYVDDLLLAAATRTECLEGTKALLETLGNKGYRASAKKAQICLQEVTYLGYSLKDGQRWLTKARKEAILSIPVPKNSRQVREFLGKAGYCRLFIPGFAELAAPLYPLTRPGTLFQWGTEQQLAFEDIKKALLSSPALGLPDITKPFELFIDENSGFAKGVLVQKLGPWKRPVAYLSKKLDTVASGWPPCLRMVAAIAILVKDAGKLTLGQPLTILTSHPVEALVRQPPNKWLSNARMTHYQAMLLDAERVHFGPTVSLNPATLLPLPSGGNHHDCLQILAETHGTRPDLTDQPLPDADLTWYTDGSSFIRNGEREAGAAVTTESEVIWAAPLPPGTSAQRAELIALTQALKMAEGKKLTVYTDSRYAFATTHVHGEIYRRRGWLTSEGKEIKNKNEILALLEALFLPKRLSIIHCPGHQKGDSPQAKGNRLADDTAKKAATETHSSLTVLPAGKRTADGSEFEKRTADGSEFESPKKKAKVE

SEQ ID NO: 1254 - protein, 2095 aa, synthetic construct
MPAAKRVKLDGGDKKYSIGLDIGTNSVGWAVITDEYKVPSKKFKVLGNTDRHSIKKNLIGALLFDSGETAEATRLKRTARRRYTRRKNRICYLQEIFSNEMAKVDDSFFHRLEESFLVEEDKKHERHPIFGNIVDEVAYHEKYPTIYHLRKKLVDSTDKADLRLIYLALAHMIKFRGHFLIEGDLNPDNSDVDKLFIQLVQTYNQLFEENPINASGVDAKAILSARLSKSRRLENLIAQLPGEKKNGLFGNLIALSLGLTPNFKSNFDLAEDAKLQLSKDTYDDDLDNLLAQIGDQYADLFLAAKNLSDAILLSDILRVNTEITKAPLSASMIKRYDEHHQDLTLLKALVRQQLPEKYKEIFFDQSKNGYAGYIDGGASQEEFYKFIKPILEKMDGTEELLVKLNREDLLRKQRTFDNGSIPHQIHLGELHAILRRQEDFYPFLKDNREKIEKILTFRIPYYVGPLARGNSRFAWMTRKSEETITPWNFEEVVDKGASAQSFIERMTNFDKNLPNEKVLPKHSLLYEYFTVYNELTKVKYVTEGMRKPAFLSGEQKKAIVDLLFKTNRKVTVKQLKEDYFKKIECFDSVEISGVEDRFNASLGTYHDLLKIIKDKDFLDNEENEDILEDIVLTLTLFEDREMIEERLKTYAHLFDDKVMKQLKRRRYTGWGRLSRKLINGIRDKQSGKTILDFLKSDGFANRNFMQLIHDDSLTFKEDIQKAQVSGQGDSLHEHIANLAGSPAIKKGILQTVKVVDELVKVMGRHKPENIVIEMARENQTTQKGQKNSRERMKRIEEGIKELGSQILKEHPVENTQLQNEKLYLYYLQNGRDMYVDQELDINRLSDYDVDHIVPQSFLKDDSIDNKVLTRSDKARGKSDNVPSEEVVKKMKNYWRQLLNAKLITQRKFDNLTKAERGGLSELDKAGFIKRQLVETRQITKHVAQILDSRMNTKYDENDKLIREVKVITLKSKLVSDFRKDFQFYKVREINNYHHAHDAYLNAVVGTALIKKYPKLESEFVYGDYKVYDVRKMIAKSEQEIGKATAKYFFYSNIMNFFKTEITLANGEIRKRPLIETNGETGEIVWDKGRDFATVRKVLSMPQVNIVKKTEVQTGGFSKESILPKRNSDKLIARKKDWDPKKYGGFDSPTVAYSVLVVAKVEKGKSKKLKSVKELLGITIMERSSFEKNPIDFLEAKGYKEVKKDLIIKLPKYSLFELENGRKRMLASAGELQKGNELALPSKYVNFLYLASHYEKLKGSPEDNEQKQLFVEQHKHYLDEIIEQISEFSKRVILADANLDKVLSAYNKHRDKPIREQAENIIHLFTLTNLGAPAAFKYFDTTIDRKRYTSTKEVLDATLIHQSITGLYETRIDLSQLGGDGGEAAAKPAPGGSGGTLQLEEEYRLFEPESTQKQEMDIWLKNFPQAWAETGGMGTAHCQAPVLIQLKATATPISIRQYPMPHEAYQGIKPHIRRMLDQGILKPCQSPWNTPLLPVKKPGTEDYRPVQDLREVNKRVEDIHPTVPNPYNLLSTLPPSHPWYTVLDLKDAFFCLRLHSESQLLFAFEWRDPEIGLSGQLTWTRLPQGFKNSPTLFNEALHSDLADFRVRYPALVLLQYVDDLLLAAATRTECLEGTKALLETLGNKGYRASAKKAQICLQEVTYLGYSLKDGQRWLTKARKEAILSIPVPKNSRQVREFLGKAGYCRLFIPGFAELAAPLYPLTRPGTLFQWGTEQQLAFEDIKKALLSSPALGLPDITKPFELFIDENSGFAKGVLVQKLGPWKRPVAYLSKKLDTVASGWPPCLRMVAAIAILVKDAGKLTLGQPLTILTSHPVEALVRQPPNKWLSNARMTHYQAMLLDAERVHFGPTVSLNPATLLPLPSGGNHHDCLQILAETHGTRPDLTDQPLPDADLTWYTDGSSFIRNGEREAGAAVTTESEVIWAAPLPPGTSAQRAELIALTQALKMAEGKKLTVYTDSRYAFATTHVHGEIYRRRGWLTSEGKEIKNKNEILALLEALFLPKRLSIIHCPGHQKGDSPQAKGNRLADDTAKKAATETHSSLTVLPAGKRTADGSEFEKRTADGSEFESPKKKAKVE

SEQ ID NO: 1255 - protein, 2093 aa, synthetic construct
MPAAKRVKLDGGDKKYSIGLDIGTNSVGWAVITDEYKVPSKKFKVLGNTDRHSIKKNLIGALLFDSGETAEATRLKRTARRRYTRRKNRICYLQEIFSNEMAKVDDSFFHRLEESFLVEEDKKHERHPIFGNIVDEVAYHEKYPTIYHLRKKLVDSTDKADLRLIYLALAHMIKFRGHFLIEGDLNPDNSDVDKLFIQLVQTYNQLFEENPINASGVDAKAILSARLSKSRRLENLIAQLPGEKKNGLFGNLIALSLGLTPNFKSNFDLAEDAKLQLSKDTYDDDLDNLLAQIGDQYADLFLAAKNLSDAILLSDILRVNTEITKAPLSASMIKRYDEHHQDLTLLKALVRQQLPEKYKEIFFDQSKNGYAGYIDGGASQEEFYKFIKPILEKMDGTEELLVKLNREDLLRKQRTFDNGSIPHQIHLGELHAILRRQEDFYPFLKDNREKIEKILTFRIPYYVGPLARGNSRFAWMTRKSEETITPWNFEEVVDKGASAQSFIERMTNFDKNLPNEKVLPKHSLLYEYFTVYNELTKVKYVTEGMRKPAFLSGEQKKAIVDLLFKTNRKVTVKQLKEDYFKKIECFDSVEISGVEDRFNASLGTYHDLLKIIKDKDFLDNEENEDILEDIVLTLTLFEDREMIEERLKTYAHLFDDKVMKQLKRRRYTGWGRLSRKLINGIRDKQSGKTILDFLKSDGFANRNFMQLIHDDSLTFKEDIQKAQVSGQGDSLHEHIANLAGSPAIKKGILQTVKVVDELVKVMGRHKPENIVIEMARENQTTQKGQKNSRERMKRIEEGIKELGSQILKEHPVENTQLQNEKLYLYYLQNGRDMYVDQELDINRLSDYDVDHIVPQSFLKDDSIDNKVLTRSDKARGKSDNVPSEEVVKKMKNYWRQLLNAKLITQRKFDNLTKAERGGLSELDKAGFIKRQLVETRQITKHVAQILDSRMNTKYDENDKLIREVKVITLKSKLVSDFRKDFQFYKVREINNYHHAHDAYLNAVVGTALIKKYPKLESEFVYGDYKVYDVRKMIAKSEQEIGKATAKYFFYSNIMNFFKTEITLANGEIRKRPLIETNGETGEIVWDKGRDFATVRKVLSMPQVNIVKKTEVQTGGFSKESILPKRNSDKLIARKKDWDPKKYGGFDSPTVAYSVLVVAKVEKGKSKKLKSVKELLGITIMERSSFEKNPIDFLEAKGYKEVKKDLIIKLPKYSLFELENGRKRMLASAGELQKGNELALPSKYVNFLYLASHYEKLKGSPEDNEQKQLFVEQHKHYLDEIIEQISEFSKRVILADANLDKVLSAYNKHRDKPIREQAENIIHLFTLTNLGAPAAFKYFDTTIDRKRYTSTKEVLDATLIHQSITGLYETRIDLSQLGGDGGGSSGSSGSSGGTLQLEEEYRLFEPESTQKQEMDIWLKNFPQAWAETGGMGTAHCQAPVLIQLKATATPISIRQYPMPHEAYQGIKPHIRRMLDQGILKPCQSPWNTPLLPVKKPGTEDYRPVQDLREVNKRVEDIHPTVPNPYNLLSTLPPSHPWYTVLDLKDAFFCLRLHSESQLLFAFEWRDPEIGLSGQLTWTRLPQGFKNSPTLFNEALHSDLADFRVRYPALVLLQYVDDLLLAAATRTECLEGTKALLETLGNKGYRASAKKAQICLQEVTYLGYSLKDGQRWLTKARKEAILSIPVPKNSRQVREFLGKAGYCRLFIPGFAELAAPLYPLTRPGTLFQWGTEQQLAFEDIKKALLSSPALGLPDITKPFELFIDENSGFAKGVLVQKLGPWKRPVAYLSKKLDTVASGWPPCLRMVAAIAILVKDAGKLTLGQPLTILTSHPVEALVRQPPNKWLSNARMTHYQAMLLDAERVHFGPTVSLNPATLLPLPSGGNHHDCLQILAETHGTRPDLTDQPLPDADLTWYTDGSSFIRNGEREAGAAVTTESEVIWAAPLPPGTSAQRAELIALTQALKMAEGKKLTVYTDSRYAFATTHVHGEIYRRRGWLTSEGKEIKNKNEILALLEALFLPKRLSIIHCPGHQKGDSPQAKGNRLADDTAKKAATETHSSLTVLPAGKRTADGSEFEKRTADGSEFESPKKKAKVE

SEQ ID NO: 1256 - protein, 2093 aa, synthetic construct
MPAAKRVKLDGGDKKYSIGLDIGTNSVGWAVITDEYKVPSKKFKVLGNTDRHSIKKNLIGALLFDSGETAEATRLKRTARRRYTRRKNRICYLQEIFSNEMAKVDDSFFHRLEESFLVEEDKKHERHPIFGNIVDEVAYHEKYPTIYHLRKKLVDSTDKADLRLIYLALAHMIKFRGHFLIEGDLNPDNSDVDKLFIQLVQTYNQLFEENPINASGVDAKAILSARLSKSRRLENLIAQLPGEKKNGLFGNLIALSLGLTPNFKSNFDLAEDAKLQLSKDTYDDDLDNLLAQIGDQYADLFLAAKNLSDAILLSDILRVNTEITKAPLSASMIKRYDEHHQDLTLLKALVRQQLPEKYKEIFFDQSKNGYAGYIDGGASQEEFYKFIKPILEKMDGTEELLVKLNREDLLRKQRTFDNGSIPHQIHLGELHAILRRQEDFYPFLKDNREKIEKILTFRIPYYVGPLARGNSRFAWMTRKSEETITPWNFEEVVDKGASAQSFIERMTNFDKNLPNEKVLPKHSLLYEYFTVYNELTKVKYVTEGMRKPAFLSGEQKKAIVDLLFKTNRKVTVKQLKEDYFKKIECFDSVEISGVEDRFNASLGTYHDLLKIIKDKDFLDNEENEDILEDIVLTLTLFEDREMIEERLKTYAHLFDDKVMKQLKRRRYTGWGRLSRKLINGIRDKQSGKTILDFLKSDGFANRNFMQLIHDDSLTFKEDIQKAQVSGQGDSLHEHIANLAGSPAIKKGILQTVKVVDELVKVMGRHKPENIVIEMARENQTTQKGQKNSRERMKRIEEGIKELGSQILKEHPVENTQLQNEKLYLYYLQNGRDMYVDQELDINRLSDYDVDHIVPQSFLKDDSIDNKVLTRSDKARGKSDNVPSEEVVKKMKNYWRQLLNAKLITQRKFDNLTKAERGGLSELDKAGFIKRQLVETRQITKHVAQILDSRMNTKYDENDKLIREVKVITLKSKLVSDFRKDFQFYKVREINNYHHAHDAYLNAVVGTALIKKYPKLESEFVYGDYKVYDVRKMIAKSEQEIGKATAKYFFYSNIMNFFKTEITLANGEIRKRPLIETNGETGEIVWDKGRDFATVRKVLSMPQVNIVKKTEVQTGGFSKESILPKRNSDKLIARKKDWDPKKYGGFDSPTVAYSVLVVAKVEKGKSKKLKSVKELLGITIMERSSFEKNPIDFLEAKGYKEVKKDLIIKLPKYSLFELENGRKRMLASAGELQKGNELALPSKYVNFLYLASHYEKLKGSPEDNEQKQLFVEQHKHYLDEIIEQISEFSKRVILADANLDKVLSAYNKHRDKPIREQAENIIHLFTLTNLGAPAAFKYFDTTIDRKRYTSTKEVLDATLIHQSITGLYETRIDLSQLGGDGGPAPGGSGGGGGTLQLEEEYRLFEPESTQKQEMDIWLKNFPQAWAETGGMGTAHCQAPVLIQLKATATPISIRQYPMPHEAYQGIKPHIRRMLDQGILKPCQSPWNTPLLPVKKPGTEDYRPVQDLREVNKRVEDIHPTVPNPYNLLSTLPPSHPWYTVLDLKDAFFCLRLHSESQLLFAFEWRDPEIGLSGQLTWTRLPQGFKNSPTLFNEALHSDLADFRVRYPALVLLQYVDDLLLAAATRTECLEGTKALLETLGNKGYRASAKKAQICLQEVTYLGYSLKDGQRWLTKARKEAILSIPVPKNSRQVREFLGKAGYCRLFIPGFAELAAPLYPLTRPGTLFQWGTEQQLAFEDIKKALLSSPALGLPDITKPFELFIDENSGFAKGVLVQKLGPWKRPVAYLSKKLDTVASGWPPCLRMVAAIAILVKDAGKLTLGQPLTILTSHPVEALVRQPPNKWLSNARMTHYQAMLLDAERVHFGPTVSLNPATLLPLPSGGNHHDCLQILAETHGTRPDLTDQPLPDADLTWYTDGSSFIRNGEREAGAAVTTESEVIWAAPLPPGTSAQRAELIALTQALKMAEGKKLTVYTDSRYAFATTHVHGEIYRRRGWLTSEGKEIKNKNEILALLEALFLPKRLSIIHCPGHQKGDSPQAKGNRLADDTAKKAATETHSSLTVLPAGKRTADGSEFEKRTADGSEFESPKKKAKVE

SEQ ID NO: 1257 - protein, 2093 aa, synthetic construct
MPAAKRVKLDGGDKKYSIGLDIGTNSVGWAVITDEYKVPSKKFKVLGNTDRHSIKKNLIGALLFDSGETAEATRLKRTARRRYTRRKNRICYLQEIFSNEMAKVDDSFFHRLEESFLVEEDKKHERHPIFGNIVDEVAYHEKYPTIYHLRKKLVDSTDKADLRLIYLALAHMIKFRGHFLIEGDLNPDNSDVDKLFIQLVQTYNQLFEENPINASGVDAKAILSARLSKSRRLENLIAQLPGEKKNGLFGNLIALSLGLTPNFKSNFDLAEDAKLQLSKDTYDDDLDNLLAQIGDQYADLFLAAKNLSDAILLSDILRVNTEITKAPLSASMIKRYDEHHQDLTLLKALVRQQLPEKYKEIFFDQSKNGYAGYIDGGASQEEFYKFIKPILEKMDGTEELLVKLNREDLLRKQRTFDNGSIPHQIHLGELHAILRRQEDFYPFLKDNREKIEKILTFRIPYYVGPLARGNSRFAWMTRKSEETITPWNFEEVVDKGASAQSFIERMTNFDKNLPNEKVLPKHSLLYEYFTVYNELTKVKYVTEGMRKPAFLSGEQKKAIVDLLFKTNRKVTVKQLKEDYFKKIECFDSVEISGVEDRFNASLGTYHDLLKIIKDKDFLDNEENEDILEDIVLTLTLFEDREMIEERLKTYAHLFDDKVMKQLKRRRYTGWGRLSRKLINGIRDKQSGKTILDFLKSDGFANRNFMQLIHDDSLTFKEDIQKAQVSGQGDSLHEHIANLAGSPAIKKGILQTVKVVDELVKVMGRHKPENIVIEMARENQTTQKGQKNSRERMKRIEEGIKELGSQILKEHPVENTQLQNEKLYLYYLQNGRDMYVDQELDINRLSDYDVDHIVPQSFLKDDSIDNKVLTRSDKARGKSDNVPSEEVVKKMKNYWRQLLNAKLITQRKFDNLTKAERGGLSELDKAGFIKRQLVETRQITKHVAQILDSRMNTKYDENDKLIREVKVITLKSKLVSDFRKDFQFYKVREINNYHHAHDAYLNAVVGTALIKKYPKLESEFVYGDYKVYDVRKMIAKSEQEIGKATAKYFFYSNIMNFFKTEITLANGEIRKRPLIETNGETGEIVWDKGRDFATVRKVLSMPQVNIVKKTEVQTGGFSKESILPKRNSDKLIARKKDWDPKKYGGFDSPTVAYSVLVVAKVEKGKSKKLKSVKELLGITIMERSSFEKNPIDFLEAKGYKEVKKDLIIKLPKYSLFELENGRKRMLASAGELQKGNELALPSKYVNFLYLASHYEKLKGSPEDNEQKQLFVEQHKHYLDEIIEQISEFSKRVILADANLDKVLSAYNKHRDKPIREQAENIIHLFTLTNLGAPAAFKYFDTTIDRKRYTSTKEVLDATLIHQSITGLYETRIDLSQLGGDGGGGSPAPGGGGGTLQLEEEYRLFEPESTQKQEMDIWLKNFPQAWAETGGMGTAHCQAPVLIQLKATATPISIRQYPMPHEAYQGIKPHIRRMLDQGILKPCQSPWNTPLLPVKKPGTEDYRPVQDLREVNKRVEDIHPTVPNPYNLLSTLPPSHPWYTVLDLKDAFFCLRLHSESQLLFAFEWRDPEIGLSGQLTWTRLPQGFKNSPTLFNEALHSDLADFRVRYPALVLLQYVDDLLLAAATRTECLEGTKALLETLGNKGYRASAKKAQICLQEVTYLGYSLKDGQRWLTKARKEAILSIPVPKNSRQVREFLGKAGYCRLFIPGFAELAAPLYPLTRPGTLFQWGTEQQLAFEDIKKALLSSPALGLPDITKPFELFIDENSGFAKGVLVQKLGPWKRPVAYLSKKLDTVASGWPPCLRMVAAIAILVKDAGKLTLGQPLTILTSHPVEALVRQPPNKWLSNARMTHYQAMLLDAERVHFGPTVSLNPATLLPLPSGGNHHDCLQILAETHGTRPDLTDQPLPDADLTWYTDGSSFIRNGEREAGAAVTTESEVIWAAPLPPGTSAQRAELIALTQALKMAEGKKLTVYTDSRYAFATTHVHGEIYRRRGWLTSEGKEIKNKNEILALLEALFLPKRLSIIHCPGHQKGDSPQAKGNRLADDTAKKAATETHSSLTVLPAGKRTADGSEFEKRTADGSEFESPKKKAKVE

SEQ ID NO: 1258 - protein, 2093 aa, synthetic construct
MPAAKRVKLDGGDKKYSIGLDIGTNSVGWAVITDEYKVPSKKFKVLGNTDRHSIKKNLIGALLFDSGETAEATRLKRTARRRYTRRKNRICYLQEIFSNEMAKVDDSFFHRLEESFLVEEDKKHERHPIFGNIVDEVAYHEKYPTIYHLRKKLVDSTDKADLRLIYLALAHMIKFRGHFLIEGDLNPDNSDVDKLFIQLVQTYNQLFEENPINASGVDAKAILSARLSKSRRLENLIAQLPGEKKNGLFGNLIALSLGLTPNFKSNFDLAEDAKLQLSKDTYDDDLDNLLAQIGDQYADLFLAAKNLSDAILLSDILRVNTEITKAPLSASMIKRYDEHHQDLTLLKALVRQQLPEKYKEIFFDQSKNGYAGYIDGGASQEEFYKFIKPILEKMDGTEELLVKLNREDLLRKQRTFDNGSIPHQIHLGELHAILRRQEDFYPFLKDNREKIEKILTFRIPYYVGPLARGNSRFAWMTRKSEETITPWNFEEVVDKGASAQSFIERMTNFDKNLPNEKVLPKHSLLYEYFTVYNELTKVKYVTEGMRKPAFLSGEQKKAIVDLLFKTNRKVTVKQLKEDYFKKIECFDSVEISGVEDRFNASLGTYHDLLKIIKDKDFLDNEENEDILEDIVLTLTLFEDREMIEERLKTYAHLFDDKVMKQLKRRRYTGWGRLSRKLINGIRDKQSGKTILDFLKSDGFANRNFMQLIHDDSLTFKEDIQKAQVSGQGDSLHEHIANLAGSPAIKKGILQTVKVVDELVKVMGRHKPENIVIEMARENQTTQKGQKNSRERMKRIEEGIKELGSQILKEHPVENTQLQNEKLYLYYLQNGRDMYVDQELDINRLSDYDVDHIVPQSFLKDDSIDNKVLTRSDKARGKSDNVPSEEVVKKMKNYWRQLLNAKLITQRKFDNLTKAERGGLSELDKAGFIKRQLVETRQITKHVAQILDSRMNTKYDENDKLIREVKVITLKSKLVSDFRKDFQFYKVREINNYHHAHDAYLNAVVGTALIKKYPKLESEFVYGDYKVYDVRKMIAKSEQEIGKATAKYFFYSNIMNFFKTEITLANGEIRKRPLIETNGETGEIVWDKGRDFATVRKVLSMPQVNIVKKTEVQTGGFSKESILPKRNSDKLIARKKDWDPKKYGGFDSPTVAYSVLVVAKVEKGKSKKLKSVKELLGITIMERSSFEKNPIDFLEAKGYKEVKKDLIIKLPKYSLFELENGRKRMLASAGELQKGNELALPSKYVNFLYLASHYEKLKGSPEDNEQKQLFVEQHKHYLDEIIEQISEFSKRVILADANLDKVLSAYNKHRDKPIREQAENIIHLFTLTNLGAPAAFKYFDTTIDRKRYTSTKEVLDATLIHQSITGLYETRIDLSQLGGDGGGSSGGGGGSGGTLQLEEEYRLFEPESTQKQEMDIWLKNFPQAWAETGGMGTAHCQAPVLIQLKATATPISIRQYPMPHEAYQGIKPHIRRMLDQGILKPCQSPWNTPLLPVKKPGTEDYRPVQDLREVNKRVEDIHPTVPNPYNLLSTLPPSHPWYTVLDLKDAFFCLRLHSESQLLFAFEWRDPEIGLSGQLTWTRLPQGFKNSPTLFNEALHSDLADFRVRYPALVLLQYVDDLLLAAATRTECLEGTKALLETLGNKGYRASAKKAQICLQEVTYLGYSLKDGQRWLTKARKEAILSIPVPKNSRQVREFLGKAGYCRLFIPGFAELAAPLYPLTRPGTLFQWGTEQQLAFEDIKKALLSSPALGLPDITKPFELFIDENSGFAKGVLVQKLGPWKRPVAYLSKKLDTVASGWPPCLRMVAAIAILVKDAGKLTLGQPLTILTSHPVEALVRQPPNKWLSNARMTHYQAMLLDAERVHFGPTVSLNPATLLPLPSGGNHHDCLQILAETHGTRPDLTDQPLPDADLTWYTDGSSFIRNGEREAGAAVTTESEVIWAAPLPPGTSAQRAELIALTQALKMAEGKKLTVYTDSRYAFATTHVHGEIYRRRGWLTSEGKEIKNKNEILALLEALFLPKRLSIIHCPGHQKGDSPQAKGNRLADDTAKKAATETHSSLTVLPAGKRTADGSEFEKRTADGSEFESPKKKAKVE

SEQ ID NO: 1259 - protein, 2095 aa, synthetic construct
MPAAKRVKLDGGDKKYSIGLDIGTNSVGWAVITDEYKVPSKKFKVLGNTDRHSIKKNLIGALLFDSGETAEATRLKRTARRRYTRRKNRICYLQEIFSNEMAKVDDSFFHRLEESFLVEEDKKHERHPIFGNIVDEVAYHEKYPTIYHLRKKLVDSTDKADLRLIYLALAHMIKFRGHFLIEGDLNPDNSDVDKLFIQLVQTYNQLFEENPINASGVDAKAILSARLSKSRRLENLIAQLPGEKKNGLFGNLIALSLGLTPNFKSNFDLAEDAKLQLSKDTYDDDLDNLLAQIGDQYADLFLAAKNLSDAILLSDILRVNTEITKAPLSASMIKRYDEHHQDLTLLKALVRQQLPEKYKEIFFDQSKNGYAGYIDGGASQEEFYKFIKPILEKMDGTEELLVKLNREDLLRKQRTFDNGSIPHQIHLGELHAILRRQEDFYPFLKDNREKIEKILTFRIPYYVGPLARGNSRFAWMTRKSEETITPWNFEEVVDKGASAQSFIERMTNFDKNLPNEKVLPKHSLLYEYFTVYNELTKVKYVTEGMRKPAFLSGEQKKAIVDLLFKTNRKVTVKQLKEDYFKKIECFDSVEISGVEDRFNASLGTYHDLLKIIKDKDFLDNEENEDILEDIVLTLTLFEDREMIEERLKTYAHLFDDKVMKQLKRRRYTGWGRLSRKLINGIRDKQSGKTILDFLKSDGFANRNFMQLIHDDSLTFKEDIQKAQVSGQGDSLHEHIANLAGSPAIKKGILQTVKVVDELVKVMGRHKPENIVIEMARENQTTQKGQKNSRERMKRIEEGIKELGSQILKEHPVENTQLQNEKLYLYYLQNGRDMYVDQELDINRLSDYDVDHIVPQSFLKDDSIDNKVLTRSDKARGKSDNVPSEEVVKKMKNYWRQLLNAKLITQRKFDNLTKAERGGLSELDKAGFIKRQLVETRQITKHVAQILDSRMNTKYDENDKLIREVKVITLKSKLVSDFRKDFQFYKVREINNYHHAHDAYLNAVVGTALIKKYPKLESEFVYGDYKVYDVRKMIAKSEQEIGKATAKYFFYSNIMNFFKTEITLANGEIRKRPLIETNGETGEIVWDKGRDFATVRKVLSMPQVNIVKKTEVQTGGFSKESILPKRNSDKLIARKKDWDPKKYGGFDSPTVAYSVLVVAKVEKGKSKKLKSVKELLGITIMERSSFEKNPIDFLEAKGYKEVKKDLIIKLPKYSLFELENGRKRMLASAGELQKGNELALPSKYVNFLYLASHYEKLKGSPEDNEQKQLFVEQHKHYLDEIIEQISEFSKRVILADANLDKVLSAYNKHRDKPIREQAENIIHLFTLTNLGAPAAFKYFDTTIDRKRYTSTKEVLDATLIHQSITGLYETRIDLSQLGGDGGGGGEAAAKGGSGGTLQLEEEYRLFEPESTQKQEMDIWLKNFPQAWAETGGMGTAHCQAPVLIQLKATATPISIRQYPMPHEAYQGIKPHIRRMLDQGILKPCQSPWNTPLLPVKKPGTEDYRPVQDLREVNKRVEDIHPTVPNPYNLLSTLPPSHPWYTVLDLKDAFFCLRLHSESQLLFAFEWRDPEIGLSGQLTWTRLPQGFKNSPTLFNEALHSDLADFRVRYPALVLLQYVDDLLLAAATRTECLEGTKALLETLGNKGYRASAKKAQICLQEVTYLGYSLKDGQRWLTKARKEAILSIPVPKNSRQVREFLGKAGYCRLFIPGFAELAAPLYPLTRPGTLFQWGTEQQLAFEDIKKALLSSPALGLPDITKPFELFIDENSGFAKGVLVQKLGPWKRPVAYLSKKLDTVASGWPPCLRMVAAIAILVKDAGKLTLGQPLTILTSHPVEALVRQPPNKWLSNARMTHYQAMLLDAERVHFGPTVSLNPATLLPLPSGGNHHDCLQILAETHGTRPDLTDQPLPDADLTWYTDGSSFIRNGEREAGAAVTTESEVIWAAPLPPGTSAQRAELIALTQALKMAEGKKLTVYTDSRYAFATTHVHGEIYRRRGWLTSEGKEIKNKNEILALLEALFLPKRLSIIHCPGHQKGDSPQAKGNRLADDTAKKAATETHSSLTVLPAGKRTADGSEFEKRTADGSEFESPKKKAKVE

SEQ ID NO: 1260 - protein, 2089 aa, synthetic construct
MPAAKRVKLDGGDKKYSIGLDIGTNSVGWAVITDEYKVPSKKFKVLGNTDRHSIKKNLIGALLFDSGETAEATRLKRTARRRYTRRKNRICYLQEIFSNEMAKVDDSFFHRLEESFLVEEDKKHERHPIFGNIVDEVAYHEKYPTIYHLRKKLVDSTDKADLRLIYLALAHMIKFRGHFLIEGDLNPDNSDVDKLFIQLVQTYNQLFEENPINASGVDAKAILSARLSKSRRLENLIAQLPGEKKNGLFGNLIALSLGLTPNFKSNFDLAEDAKLQLSKDTYDDDLDNLLAQIGDQYADLFLAAKNLSDAILLSDILRVNTEITKAPLSASMIKRYDEHHQDLTLLKALVRQQLPEKYKEIFFDQSKNGYAGYIDGGASQEEFYKFIKPILEKMDGTEELLVKLNREDLLRKQRTFDNGSIPHQIHLGELHAILRRQEDFYPFLKDNREKIEKILTFRIPYYVGPLARGNSRFAWMTRKSEETITPWNFEEVVDKGASAQSFIERMTNFDKNLPNEKVLPKHSLLYEYFTVYNELTKVKYVTEGMRKPAFLSGEQKKAIVDLLFKTNRKVTVKQLKEDYFKKIECFDSVEISGVEDRFNASLGTYHDLLKIIKDKDFLDNEENEDILEDIVLTLTLFEDREMIEERLKTYAHLFDDKVMKQLKRRRYTGWGRLSRKLINGIRDKQSGKTILDFLKSDGFANRNFMQLIHDDSLTFKEDIQKAQVSGQGDSLHEHIANLAGSPAIKKGILQTVKVVDELVKVMGRHKPENIVIEMARENQTTQKGQKNSRERMKRIEEGIKELGSQILKEHPVENTQLQNEKLYLYYLQNGRDMYVDQELDINRLSDYDVDHIVPQSFLKDDSIDNKVLTRSDKARGKSDNVPSEEVVKKMKNYWRQLLNAKLITQRKFDNLTKAERGGLSELDKAGFIKRQLVETRQITKHVAQILDSRMNTKYDENDKLIREVKVITLKSKLVSDFRKDFQFYKVREINNYHHAHDAYLNAVVGTALIKKYPKLESEFVYGDYKVYDVRKMIAKSEQEIGKATAKYFFYSNIMNFFKTEITLANGEIRKRPLIETNGETGEIVWDKGRDFATVRKVLSMPQVNIVKKTEVQTGGFSKESILPKRNSDKLIARKKDWDPKKYGGFDSPTVAYSVLVVAKVEKGKSKKLKSVKELLGITIMERSSFEKNPIDFLEAKGYKEVKKDLIIKLPKYSLFELENGRKRMLASAGELQKGNELALPSKYVNFLYLASHYEKLKGSPEDNEQKQLFVEQHKHYLDEIIEQISEFSKRVILADANLDKVLSAYNKHRDKPIREQAENIIHLFTLTNLGAPAAFKYFDTTIDRKRYTSTKEVLDATLIHQSITGLYETRIDLSQLGGDGGEAAAKGGTLQLEEEYRLFEPESTQKQEMDIWLKNFPQAWAETGGMGTAHCQAPVLIQLKATATPISIRQYPMPHEAYQGIKPHIRRMLDQGILKPCQSPWNTPLLPVKKPGTEDYRPVQDLREVNKRVEDIHPTVPNPYNLLSTLPPSHPWYTVLDLKDAFFCLRLHSESQLLFAFEWRDPEIGLSGQLTWTRLPQGFKNSPTLFNEALHSDLADFRVRYPALVLLQYVDDLLLAAATRTECLEGTKALLETLGNKGYRASAKKAQICLQEVTYLGYSLKDGQRWLTKARKEAILSIPVPKNSRQVREFLGKAGYCRLFIPGFAELAAPLYPLTRPGTLFQWGTEQQLAFEDIKKALLSSPALGLPDITKPFELFIDENSGFAKGVLVQKLGPWKRPVAYLSKKLDTVASGWPPCLRMVAAIAILVKDAGKLTLGQPLTILTSHPVEALVRQPPNKWLSNARMTHYQAMLLDAERVHFGPTVSLNPATLLPLPSGGNHHDCLQILAETHGTRPDLTDQPLPDADLTWYTDGSSFIRNGEREAGAAVTTESEVIWAAPLPPGTSAQRAELIALTQALKMAEGKKLTVYTDSRYAFATTHVHGEIYRRRGWLTSEGKEIKNKNEILALLEALFLPKRLSIIHCPGHQKGDSPQAKGNRLADDTAKKAATETHSSLTVLPAGKRTADGSEFEKRTADGSEFESPKKKAKVE

SEQ ID NO: 1261 - protein, 2095 aa, synthetic construct
MPAAKRVKLDGGDKKYSIGLDIGTNSVGWAVITDEYKVPSKKFKVLGNTDRHSIKKNLIGALLFDSGETAEATRLKRTARRRYTRRKNRICYLQEIFSNEMAKVDDSFFHRLEESFLVEEDKKHERHPIFGNIVDEVAYHEKYPTIYHLRKKLVDSTDKADLRLIYLALAHMIKFRGHFLIEGDLNPDNSDVDKLFIQLVQTYNQLFEENPINASGVDAKAILSARLSKSRRLENLIAQLPGEKKNGLFGNLIALSLGLTPNFKSNFDLAEDAKLQLSKDTYDDDLDNLLAQIGDQYADLFLAAKNLSDAILLSDILRVNTEITKAPLSASMIKRYDEHHQDLTLLKALVRQQLPEKYKEIFFDQSKNGYAGYIDGGASQEEFYKFIKPILEKMDGTEELLVKLNREDLLRKQRTFDNGSIPHQIHLGELHAILRRQEDFYPFLKDNREKIEKILTFRIPYYVGPLARGNSRFAWMTRKSEETITPWNFEEVVDKGASAQSFIERMTNFDKNLPNEKVLPKHSLLYEYFTVYNELTKVKYVTEGMRKPAFLSGEQKKAIVDLLFKTNRKVTVKQLKEDYFKKIECFDSVEISGVEDRFNASLGTYHDLLKIIKDKDFLDNEENEDILEDIVLTLTLFEDREMIEERLKTYAHLFDDKVMKQLKRRRYTGWGRLSRKLINGIRDKQSGKTILDFLKSDGFANRNFMQLIHDDSLTFKEDIQKAQVSGQGDSLHEHIANLAGSPAIKKGILQTVKVVDELVKVMGRHKPENIVIEMARENQTTQKGQKNSRERMKRIEEGIKELGSQILKEHPVENTQLQNEKLYLYYLQNGRDMYVDQELDINRLSDYDVDHIVPQSFLKDDSIDNKVLTRSDKARGKSDNVPSEEVVKKMKNYWRQLLNAKLITQRKFDNLTKAERGGLSELDKAGFIKRQLVETRQITKHVAQILDSRMNTKYDENDKLIREVKVITLKSKLVSDFRKDFQFYKVREINNYHHAHDAYLNAVVGTALIKKYPKLESEFVYGDYKVYDVRKMIAKSEQEIGKATAKYFFYSNIMNFFKTEITLANGEIRKRPLIETNGETGEIVWDKGRDFATVRKVLSMPQVNIVKKTEVQTGGFSKESILPKRNSDKLIARKKDWDPKKYGGFDSPTVAYSVLVVAKVEKGKSKKLKSVKELLGITIMERSSFEKNPIDFLEAKGYKEVKKDLIIKLPKYSLFELENGRKRMLASAGELQKGNELALPSKYVNFLYLASHYEKLKGSPEDNEQKQLFVEQHKHYLDEIIEQISEFSKRVILADANLDKVLSAYNKHRDKPIREQAENIIHLFTLTNLGAPAAFKYFDTTIDRKRYTSTKEVLDATLIHQSITGLYETRIDLSQLGGDGGGGGGSSEAAAKGGTLQLEEEYRLFEPESTQKQEMDIWLKNFPQAWAETGGMGTAHCQAPVLIQLKATATPISIRQYPMPHEAYQGIKPHIRRMLDQGILKPCQSPWNTPLLPVKKPGTEDYRPVQDLREVNKRVEDIHPTVPNPYNLLSTLPPSHPWYTVLDLKDAFFCLRLHSESQLLFAFEWRDPEIGLSGQLTWTRLPQGFKNSPTLFNEALHSDLADFRVRYPALVLLQYVDDLLLAAATRTECLEGTKALLETLGNKGYRASAKKAQICLQEVTYLGYSLKDGQRWLTKARKEAILSIPVPKNSRQVREFLGKAGYCRLFIPGFAELAAPLYPLTRPGTLFQWGTEQQLAFEDIKKALLSSPALGLPDITKPFELFIDENSGFAKGVLVQKLGPWKRPVAYLSKKLDTVASGWPPCLRMVAAIAILVKDAGKLTLGQPLTILTSHPVEALVRQPPNKWLSNARMTHYQAMLLDAERVHFGPTVSLNPATLLPLPSGGNHHDCLQILAETHGTRPDLTDQPLPDADLTWYTDGSSFIRNGEREAGAAVTTESEVIWAAPLPPGTSAQRAELIALTQALKMAEGKKLTVYTDSRYAFATTHVHGEIYRRRGWLTSEGKEIKNKNEILALLEALFLPKRLSIIHCPGHQKGDSPQAKGNRLADDTAKKAATETHSSLTVLPAGKRTADGSEFEKRTADGSEFESPKKKAKVE

SEQ ID NO: 1262 - protein, 2095 aa, synthetic construct
MPAAKRVKLDGGDKKYSIGLDIGTNSVGWAVITDEYKVPSKKFKVLGNTDRHSIKKNLIGALLFDSGETAEATRLKRTARRRYTRRKNRICYLQEIFSNEMAKVDDSFFHRLEESFLVEEDKKHERHPIFGNIVDEVAYHEKYPTIYHLRKKLVDSTDKADLRLIYLALAHMIKFRGHFLIEGDLNPDNSDVDKLFIQLVQTYNQLFEENPINASGVDAKAILSARLSKSRRLENLIAQLPGEKKNGLFGNLIALSLGLTPNFKSNFDLAEDAKLQLSKDTYDDDLDNLLAQIGDQYADLFLAAKNLSDAILLSDILRVNTEITKAPLSASMIKRYDEHHQDLTLLKALVRQQLPEKYKEIFFDQSKNGYAGYIDGGASQEEFYKFIKPILEKMDGTEELLVKLNREDLLRKQRTFDNGSIPHQIHLGELHAILRRQEDFYPFLKDNREKIEKILTFRIPYYVGPLARGNSRFAWMTRKSEETITPWNFEEVVDKGASAQSFIERMTNFDKNLPNEKVLPKHSLLYEYFTVYNELTKVKYVTEGMRKPAFLSGEQKKAIVDLLFKTNRKVTVKQLKEDYFKKIECFDSVEISGVEDRFNASLGTYHDLLKIIKDKDFLDNEENEDILEDIVLTLTLFEDREMIEERLKTYAHLFDDKVMKQLKRRRYTGWGRLSRKLINGIRDKQSGKTILDFLKSDGFANRNFMQLIHDDSLTFKEDIQKAQVSGQGDSLHEHIANLAGSPAIKKGILQTVKVVDELVKVMGRHKPENIVIEMARENQTTQKGQKNSRERMKRIEEGIKELGSQILKEHPVENTQLQNEKLYLYYLQNGRDMYVDQELDINRLSDYDVDHIVPQSFLKDDSIDNKVLTRSDKARGKSDNVPSEEVVKKMKNYWRQLLNAKLITQRKFDNLTKAERGGLSELDKAGFIKRQLVETRQITKHVAQILDSRMNTKYDENDKLIREVKVITLKSKLVSDFRKDFQFYKVREINNYHHAHDAYLNAVVGTALIKKYPKLESEFVYGDYKVYDVRKMIAKSEQEIGKATAKYFFYSNIMNFFKTEITLANGEIRKRPLIETNGETGEIVWDKGRDFATVRKVLSMPQVNIVKKTEVQTGGFSKESILPKRNSDKLIARKKDWDPKKYGGFDSPTVAYSVLVVAKVEKGKSKKLKSVKELLGITIMERSSFEKNPIDFLEAKGYKEVKKDLIIKLPKYSLFELENGRKRMLASAGELQKGNELALPSKYVNFLYLASHYEKLKGSPEDNEQKQLFVEQHKHYLDEIIEQISEFSKRVILADANLDKVLSAYNKHRDKPIREQAENIIHLFTLTNLGAPAAFKYFDTTIDRKRYTSTKEVLDATLIHQSITGLYETRIDLSQLGGDGGGGGEAAAKPAPGGTLQLEEEYRLFEPESTQKQEMDIWLKNFPQAWAETGGMGTAHCQAPVLIQLKATATPISIRQYPMPHEAYQGIKPHIRRMLDQGILKPCQSPWNTPLLPVKKPGTEDYRPVQDLREVNKRVEDIHPTVPNPYNLLSTLPPSHPWYTVLDLKDAFFCLRLHSESQLLFAFEWRDPEIGLSGQLTWTRLPQGFKNSPTLFNEALHSDLADFRVRYPALVLLQYVDDLLLAAATRTECLEGTKALLETLGNKGYRASAKKAQICLQEVTYLGYSLKDGQRWLTKARKEAILSIPVPKNSRQVREFLGKAGYCRLFIPGFAELAAPLYPLTRPGTLFQWGTEQQLAFEDIKKALLSSPALGLPDITKPFELFIDENSGFAKGVLVQKLGPWKRPVAYLSKKLDTVASGWPPCLRMVAAIAILVKDAGKLTLGQPLTILTSHPVEALVRQPPNKWLSNARMTHYQAMLLDAERVHFGPTVSLNPATLLPLPSGGNHHDCLQILAETHGTRPDLTDQPLPDADLTWYTDGSSFIRNGEREAGAAVTTESEVIWAAPLPPGTSAQRAELIALTQALKMAEGKKLTVYTDSRYAFATTHVHGEIYRRRGWLTSEGKEIKNKNEILALLEALFLPKRLSIIHCPGHQKGDSPQAKGNRLADDTAKKAATETHSSLTVLPAGKRTADGSEFEKRTADGSEFESPKKKAKVE

SEQ ID NO: 1263 - protein, 2093 aa, synthetic construct
MPAAKRVKLDGGDKKYSIGLDIGTNSVGWAVITDEYKVPSKKFKVLGNTDRHSIKKNLIGALLFDSGETAEATRLKRTARRRYTRRKNRICYLQEIFSNEMAKVDDSFFHRLEESFLVEEDKKHERHPIFGNIVDEVAYHEKYPTIYHLRKKLVDSTDKADLRLIYLALAHMIKFRGHFLIEGDLNPDNSDVDKLFIQLVQTYNQLFEENPINASGVDAKAILSARLSKSRRLENLIAQLPGEKKNGLFGNLIALSLGLTPNFKSNFDLAEDAKLQLSKDTYDDDLDNLLAQIGDQYADLFLAAKNLSDAILLSDILRVNTEITKAPLSASMIKRYDEHHQDLTLLKALVRQQLPEKYKEIFFDQSKNGYAGYIDGGASQEEFYKFIKPILEKMDGTEELLVKLNREDLLRKQRTFDNGSIPHQIHLGELHAILRRQEDFYPFLKDNREKIEKILTFRIPYYVGPLARGNSRFAWMTRKSEETITPWNFEEVVDKGASAQSFIERMTNFDKNLPNEKVLPKHSLLYEYFTVYNELTKVKYVTEGMRKPAFLSGEQKKAIVDLLFKTNRKVTVKQLKEDYFKKIECFDSVEISGVEDRFNASLGTYHDLLKIIKDKDFLDNEENEDILEDIVLTLTLFEDREMIEERLKTYAHLFDDKVMKQLKRRRYTGWGRLSRKLINGIRDKQSGKTILDFLKSDGFANRNFMQLIHDDSLTFKEDIQKAQVSGQGDSLHEHIANLAGSPAIKKGILQTVKVVDELVKVMGRHKPENIVIEMARENQTTQKGQKNSRERMKRIEEGIKELGSQILKEHPVENTQLQNEKLYLYYLQNGRDMYVDQELDINRLSDYDVDHIVPQSFLKDDSIDNKVLTRSDKARGKSDNVPSEEVVKKMKNYWRQLLNAKLITQRKFDNLTKAERGGLSELDKAGFIKRQLVETRQITKHVAQILDSRMNTKYDENDKLIREVKVITLKSKLVSDFRKDFQFYKVREINNYHHAHDAYLNAVVGTALIKKYPKLESEFVYGDYKVYDVRKMIAKSEQEIGKATAKYFFYSNIMNFFKTEITLANGEIRKRPLIETNGETGEIVWDKGRDFATVRKVLSMPQVNIVKKTEVQTGGFSKESILPKRNSDKLIARKKDWDPKKYGGFDSPTVAYSVLVVAKVEKGKSKKLKSVKELLGITIMERSSFEKNPIDFLEAKGYKEVKKDLIIKLPKYSLFELENGRKRMLASAGELQKGNELALPSKYVNFLYLASHYEKLKGSPEDNEQKQLFVEQHKHYLDEIIEQISEFSKRVILADANLDKVLSAYNKHRDKPIREQAENIIHLFTLTNLGAPAAFKYFDTTIDRKRYTSTKEVLDATLIHQSITGLYETRIDLSQLGGDGGGGSPAPGSSGGTLQLEEEYRLFEPESTQKQEMDIWLKNFPQAWAETGGMGTAHCQAPVLIQLKATATPISIRQYPMPHEAYQGIKPHIRRMLDQGILKPCQSPWNTPLLPVKKPGTEDYRPVQDLREVNKRVEDIHPTVPNPYNLLSTLPPSHPWYTVLDLKDAFFCLRLHSESQLLFAFEWRDPEIGLSGQLTWTRLPQGFKNSPTLFNEALHSDLADFRVRYPALVLLQYVDDLLLAAATRTECLEGTKALLETLGNKGYRASAKKAQICLQEVTYLGYSLKDGQRWLTKARKEAILSIPVPKNSRQVREFLGKAGYCRLFIPGFAELAAPLYPLTRPGTLFQWGTEQQLAFEDIKKALLSSPALGLPDITKPFELFIDENSGFAKGVLVQKLGPWKRPVAYLSKKLDTVASGWPPCLRMVAAIAILVKDAGKLTLGQPLTILTSHPVEALVRQPPNKWLSNARMTHYQAMLLDAERVHFGPTVSLNPATLLPLPSGGNHHDCLQILAETHGTRPDLTDQPLPDADLTWYTDGSSFIRNGEREAGAAVTTESEVIWAAPLPPGTSAQRAELIALTQALKMAEGKKLTVYTDSRYAFATTHVHGEIYRRRGWLTSEGKEIKNKNEILALLEALFLPKRLSIIHCPGHQKGDSPQAKGNRLADDTAKKAATETHSSLTVLPAGKRTADGSEFEKRTADGSEFESPKKKAKVE

SEQ ID NO: 1264 - protein, 2095 aa, synthetic construct
MPAAKRVKLDGGDKKYSIGLDIGTNSVGWAVITDEYKVPSKKFKVLGNTDRHSIKKNLIGALLFDSGETAEATRLKRTARRRYTRRKNRICYLQEIFSNEMAKVDDSFFHRLEESFLVEEDKKHERHPIFGNIVDEVAYHEKYPTIYHLRKKLVDSTDKADLRLIYLALAHMIKFRGHFLIEGDLNPDNSDVDKLFIQLVQTYNQLFEENPINASGVDAKAILSARLSKSRRLENLIAQLPGEKKNGLFGNLIALSLGLTPNFKSNFDLAEDAKLQLSKDTYDDDLDNLLAQIGDQYADLFLAAKNLSDAILLSDILRVNTEITKAPLSASMIKRYDEHHQDLTLLKALVRQQLPEKYKEIFFDQSKNGYAGYIDGGASQEEFYKFIKPILEKMDGTEELLVKLNREDLLRKQRTFDNGSIPHQIHLGELHAILRRQEDFYPFLKDNREKIEKILTFRIPYYVGPLARGNSRFAWMTRKSEETITPWNFEEVVDKGASAQSFIERMTNFDKNLPNEKVLPKHSLLYEYFTVYNELTKVKYVTEGMRKPAFLSGEQKKAIVDLLFKTNRKVTVKQLKEDYFKKIECFDSVEISGVEDRFNASLGTYHDLLKIIKDKDFLDNEENEDILEDIVLTLTLFEDREMIEERLKTYAHLFDDKVMKQLKRRRYTGWGRLSRKLINGIRDKQSGKTILDFLKSDGFANRNFMQLIHDDSLTFKEDIQKAQVSGQGDSLHEHIANLAGSPAIKKGILQTVKVVDELVKVMGRHKPENIVIEMARENQTTQKGQKNSRERMKRIEEGIKELGSQILKEHPVENTQLQNEKLYLYYLQNGRDMYVDQELDINRLSDYDVDHIVPQSFLKDDSIDNKVLTRSDKARGKSDNVPSEEVVKKMKNYWRQLLNAKLITQRKFDNLTKAERGGLSELDKAGFIKRQLVETRQITKHVAQILDSRMNTKYDENDKLIREVKVITLKSKLVSDFRKDFQFYKVREINNYHHAHDAYLNAVVGTALIKKYPKLESEFVYGDYKVYDVRKMIAKSEQEIGKATAKYFFYSNIMNFFKTEITLANGEIRKRPLIETNGETGEIVWDKGRDFATVRKVLSMPQVNIVKKTEVQTGGFSKESILPKRNSDKLIARKKDWDPKKYGGFDSPTVAYSVLVVAKVEKGKSKKLKSVKELLGITIMERSSFEKNPIDFLEAKGYKEVKKDLIIKLPKYSLFELENGRKRMLASAGELQKGNELALPSKYVNFLYLASHYEKLKGSPEDNEQKQLFVEQHKHYLDEIIEQISEFSKRVILADANLDKVLSAYNKHRDKPIREQAENIIHLFTLTNLGAPAAFKYFDTTIDRKRYTSTKEVLDATLIHQSITGLYETRIDLSQLGGDGGPAPEAAAKGGSGGTLQLEEEYRLFEPESTQKQEMDIWLKNFPQAWAETGGMGTAHCQAPVLIQLKATATPISIRQYPMPHEAYQGIKPHIRRMLDQGILKPCQSPWNTPLLPVKKPGTEDYRPVQDLREVNKRVEDIHPTVPNPYNLLSTLPPSHPWYTVLDLKDAFFCLRLHSESQLLFAFEWRDPEIGLSGQLTWTRLPQGFKNSPTLFNEALHSDLADFRVRYPALVLLQYVDDLLLAAATRTECLEGTKALLETLGNKGYRASAKKAQICLQEVTYLGYSLKDGQRWLTKARKEAILSIPVPKNSRQVREFLGKAGYCRLFIPGFAELAAPLYPLTRPGTLFQWGTEQQLAFEDIKKALLSSPALGLPDITKPFELFIDENSGFAKGVLVQKLGPWKRPVAYLSKKLDTVASGWPPCLRMVAAIAILVKDAGKLTLGQPLTILTSHPVEALVRQPPNKWLSNARMTHYQAMLLDAERVHFGPTVSLNPATLLPLPSGGNHHDCLQILAETHGTRPDLTDQPLPDADLTWYTDGSSFIRNGEREAGAAVTTESEVIWAAPLPPGTSAQRAELIALTQALKMAEGKKLTVYTDSRYAFATTHVHGEIYRRRGWLTSEGKEIKNKNEILALLEALFLPKRLSIIHCPGHQKGDSPQAKGNRLADDTAKKAATETHSSLTVLPAGKRTADGSEFEKRTADGSEFESPKKKAKVE

SEQ ID NO: 1265 - protein, 2095 aa, synthetic construct
MPAAKRVKLDGGDKKYSIGLDIGTNSVGWAVITDEYKVPSKKFKVLGNTDRHSIKKNLIGALLFDSGETAEATRLKRTARRRYTRRKNRICYLQEIFSNEMAKVDDSFFHRLEESFLVEEDKKHERHPIFGNIVDEVAYHEKYPTIYHLRKKLVDSTDKADLRLIYLALAHMIKFRGHFLIEGDLNPDNSDVDKLFIQLVQTYNQLFEENPINASGVDAKAILSARLSKSRRLENLIAQLPGEKKNGLFGNLIALSLGLTPNFKSNFDLAEDAKLQLSKDTYDDDLDNLLAQIGDQYADLFLAAKNLSDAILLSDILRVNTEITKAPLSASMIKRYDEHHQDLTLLKALVRQQLPEKYKEIFFDQSKNGYAGYIDGGASQEEFYKFIKPILEKMDGTEELLVKLNREDLLRKQRTFDNGSIPHQIHLGELHAILRRQEDFYPFLKDNREKIEKILTFRIPYYVGPLARGNSRFAWMTRKSEETITPWNFEEVVDKGASAQSFIERMTNFDKNLPNEKVLPKHSLLYEYFTVYNELTKVKYVTEGMRKPAFLSGEQKKAIVDLLFKTNRKVTVKQLKEDYFKKIECFDSVEISGVEDRFNASLGTYHDLLKIIKDKDFLDNEENEDILEDIVLTLTLFEDREMIEERLKTYAHLFDDKVMKQLKRRRYTGWGRLSRKLINGIRDKQSGKTILDFLKSDGFANRNFMQLIHDDSLTFKEDIQKAQVSGQGDSLHEHIANLAGSPAIKKGILQTVKVVDELVKVMGRHKPENIVIEMARENQTTQKGQKNSRERMKRIEEGIKELGSQILKEHPVENTQLQNEKLYLYYLQNGRDMYVDQELDINRLSDYDVDHIVPQSFLKDDSIDNKVLTRSDKARGKSDNVPSEEVVKKMKNYWRQLLNAKLITQRKFDNLTKAERGGLSELDKAGFIKRQLVETRQITKHVAQILDSRMNTKYDENDKLIREVKVITLKSKLVSDFRKDFQFYKVREINNYHHAHDAYLNAVVGTALIKKYPKLESEFVYGDYKVYDVRKMIAKSEQEIGKATAKYFFYSNIMNFFKTEITLANGEIRKRPLIETNGETGEIVWDKGRDFATVRKVLSMPQVNIVKKTEVQTGGFSKESILPKRNSDKLIARKKDWDPKKYGGFDSPTVAYSVLVVAKVEKGKSKKLKSVKELLGITIMERSSFEKNPIDFLEAKGYKEVKKDLIIKLPKYSLFELENGRKRMLASAGELQKGNELALPSKYVNFLYLASHYEKLKGSPEDNEQKQLFVEQHKHYLDEIIEQISEFSKRVILADANLDKVLSAYNKHRDKPIREQAENIIHLFTLTNLGAPAAFKYFDTTIDRKRYTSTKEVLDATLIHQSITGLYETRIDLSQLGGDGGGSSEAAAKGGSGGTLQLEEEYRLFEPESTQKQEMDIWLKNFPQAWAETGGMGTAHCQAPVLIQLKATATPISIRQYPMPHEAYQGIKPHIRRMLDQGILKPCQSPWNTPLLPVKKPGTEDYRPVQDLREVNKRVEDIHPTVPNPYNLLSTLPPSHPWYTVLDLKDAFFCLRLHSESQLLFAFEWRDPEIGLSGQLTWTRLPQGFKNSPTLFNEALHSDLADFRVRYPALVLLQYVDDLLLAAATRTECLEGTKALLETLGNKGYRASAKKAQICLQEVTYLGYSLKDGQRWLTKARKEAILSIPVPKNSRQVREFLGKAGYCRLFIPGFAELAAPLYPLTRPGTLFQWGTEQQLAFEDIKKALLSSPALGLPDITKPFELFIDENSGFAKGVLVQKLGPWKRPVAYLSKKLDTVASGWPPCLRMVAAIAILVKDAGKLTLGQPLTILTSHPVEALVRQPPNKWLSNARMTHYQAMLLDAERVHFGPTVSLNPATLLPLPSGGNHHDCLQILAETHGTRPDLTDQPLPDADLTWYTDGSSFIRNGEREAGAAVTTESEVIWAAPLPPGTSAQRAELIALTQALKMAEGKKLTVYTDSRYAFATTHVHGEIYRRRGWLTSEGKEIKNKNEILALLEALFLPKRLSIIHCPGHQKGDSPQAKGNRLADDTAKKAATETHSSLTVLPAGKRTADGSEFEKRTADGSEFESPKKKAKVE

SEQ ID NO: 1266 - protein, 2095 aa, synthetic construct
MPAAKRVKLDGGDKKYSIGLDIGTNSVGWAVITDEYKVPSKKFKVLGNTDRHSIKKNLIGALLFDSGETAEATRLKRTARRRYTRRKNRICYLQEIFSNEMAKVDDSFFHRLEESFLVEEDKKHERHPIFGNIVDEVAYHEKYPTIYHLRKKLVDSTDKADLRLIYLALAHMIKFRGHFLIEGDLNPDNSDVDKLFIQLVQTYNQLFEENPINASGVDAKAILSARLSKSRRLENLIAQLPGEKKNGLFGNLIALSLGLTPNFKSNFDLAEDAKLQLSKDTYDDDLDNLLAQIGDQYADLFLAAKNLSDAILLSDILRVNTEITKAPLSASMIKRYDEHHQDLTLLKALVRQQLPEKYKEIFFDQSKNGYAGYIDGGASQEEFYKFIKPILEKMDGTEELLVKLNREDLLRKQRTFDNGSIPHQIHLGELHAILRRQEDFYPFLKDNREKIEKILTFRIPYYVGPLARGNSRFAWMTRKSEETITPWNFEEVVDKGASAQSFIERMTNFDKNLPNEKVLPKHSLLYEYFTVYNELTKVKYVTEGMRKPAFLSGEQKKAIVDLLFKTNRKVTVKQLKEDYFKKIECFDSVEISGVEDRFNASLGTYHDLLKIIKDKDFLDNEENEDILEDIVLTLTLFEDREMIEERLKTYAHLFDDKVMKQLKRRRYTGWGRLSRKLINGIRDKQSGKTILDFLKSDGFANRNFMQLIHDDSLTFKEDIQKAQVSGQGDSLHEHIANLAGSPAIKKGILQTVKVVDELVKVMGRHKPENIVIEMARENQTTQKGQKNSRERMKRIEEGIKELGSQILKEHPVENTQLQNEKLYLYYLQNGRDMYVDQELDINRLSDYDVDHIVPQSFLKDDSIDNKVLTRSDKARGKSDNVPSEEVVKKMKNYWRQLLNAKLITQRKFDNLTKAERGGLSELDKAGFIKRQLVETRQITKHVAQILDSRMNTKYDENDKLIREVKVITLKSKLVSDFRKDFQFYKVREINNYHHAHDAYLNAVVGTALIKKYPKLESEFVYGDYKVYDVRKMIAKSEQEIGKATAKYFFYSNIMNFFKTEITLANGEIRKRPLIETNGETGEIVWDKGRDFATVRKVLSMPQVNIVKKTEVQTGGFSKESILPKRNSDKLIARKKDWDPKKYGGFDSPTVAYSVLVVAKVEKGKSKKLKSVKELLGITIMERSSFEKNPIDFLEAKGYKEVKKDLIIKLPKYSLFELENGRKRMLASAGELQKGNELALPSKYVNFLYLASHYEKLKGSPEDNEQKQLFVEQHKHYLDEIIEQISEFSKRVILADANLDKVLSAYNKHRDKPIREQAENIIHLFTLTNLGAPAAFKYFDTTIDRKRYTSTKEVLDATLIHQSITGLYETRIDLSQLGGDGGGGSPAPEAAAKGGTLQLEEEYRLFEPESTQKQEMDIWLKNFPQAWAETGGMGTAHCQAPVLIQLKATATPISIRQYPMPHEAYQGIKPHIRRMLDQGILKPCQSPWNTPLLPVKKPGTEDYRPVQDLREVNKRVEDIHPTVPNPYNLLSTLPPSHPWYTVLDLKDAFFCLRLHSESQLLFAFEWRDPEIGLSGQLTWTRLPQGFKNSPTLFNEALHSDLADFRVRYPALVLLQYVDDLLLAAATRTECLEGTKALLETLGNKGYRASAKKAQICLQEVTYLGYSLKDGQRWLTKARKEAILSIPVPKNSRQVREFLGKAGYCRLFIPGFAELAAPLYPLTRPGTLFQWGTEQQLAFEDIKKALLSSPALGLPDITKPFELFIDENSGFAKGVLVQKLGPWKRPVAYLSKKLDTVASGWPPCLRMVAAIAILVKDAGKLTLGQPLTILTSHPVEALVRQPPNKWLSNARMTHYQAMLLDAERVHFGPTVSLNPATLLPLPSGGNHHDCLQILAETHGTRPDLTDQPLPDADLTWYTDGSSFIRNGEREAGAAVTTESEVIWAAPLPPGTSAQRAELIALTQALKMAEGKKLTVYTDSRYAFATTHVHGEIYRRRGWLTSEGKEIKNKNEILALLEALFLPKRLSIIHCPGHQKGDSPQAKGNRLADDTAKKAATETHSSLTVLPAGKRTADGSEFEKRTADGSEFESPKKKAKVE

SEQ ID NO: 1267 - protein, 2092 aa, synthetic construct
MPAAKRVKLDGGDKKYSIGLDIGTNSVGWAVITDEYKVPSKKFKVLGNTDRHSIKKNLIGALLFDSGETAEATRLKRTARRRYTRRKNRICYLQEIFSNEMAKVDDSFFHRLEESFLVEEDKKHERHPIFGNIVDEVAYHEKYPTIYHLRKKLVDSTDKADLRLIYLALAHMIKFRGHFLIEGDLNPDNSDVDKLFIQLVQTYNQLFEENPINASGVDAKAILSARLSKSRRLENLIAQLPGEKKNGLFGNLIALSLGLTPNFKSNFDLAEDAKLQLSKDTYDDDLDNLLAQIGDQYADLFLAAKNLSDAILLSDILRVNTEITKAPLSASMIKRYDEHHQDLTLLKALVRQQLPEKYKEIFFDQSKNGYAGYIDGGASQEEFYKFIKPILEKMDGTEELLVKLNREDLLRKQRTFDNGSIPHQIHLGELHAILRRQEDFYPFLKDNREKIEKILTFRIPYYVGPLARGNSRFAWMTRKSEETITPWNFEEVVDKGASAQSFIERMTNFDKNLPNEKVLPKHSLLYEYFTVYNELTKVKYVTEGMRKPAFLSGEQKKAIVDLLFKTNRKVTVKQLKEDYFKKIECFDSVEISGVEDRFNASLGTYHDLLKIIKDKDFLDNEENEDILEDIVLTLTLFEDREMIEERLKTYAHLFDDKVMKQLKRRRYTGWGRLSRKLINGIRDKQSGKTILDFLKSDGFANRNFMQLIHDDSLTFKEDIQKAQVSGQGDSLHEHIANLAGSPAIKKGILQTVKVVDELVKVMGRHKPENIVIEMARENQTTQKGQKNSRERMKRIEEGIKELGSQILKEHPVENTQLQNEKLYLYYLQNGRDMYVDQELDINRLSDYDVDHIVPQSFLKDDSIDNKVLTRSDKARGKSDNVPSEEVVKKMKNYWRQLLNAKLITQRKFDNLTKAERGGLSELDKAGFIKRQLVETRQITKHVAQILDSRMNTKYDENDKLIREVKVITLKSKLVSDFRKDFQFYKVREINNYHHAHDAYLNAVVGTALIKKYPKLESEFVYGDYKVYDVRKMIAKSEQEIGKATAKYFFYSNIMNFFKTEITLANGEIRKRPLIETNGETGEIVWDKGRDFATVRKVLSMPQVNIVKKTEVQTGGFSKESILPKRNSDKLIARKKDWDPKKYGGFDSPTVAYSVLVVAKVEKGKSKKLKSVKELLGITIMERSSFEKNPIDFLEAKGYKEVKKDLIIKLPKYSLFELENGRKRMLASAGELQKGNELALPSKYVNFLYLASHYEKLKGSPEDNEQKQLFVEQHKHYLDEIIEQISEFSKRVILADANLDKVLSAYNKHRDKPIREQAENIIHLFTLTNLGAPAAFKYFDTTIDRKRYTSTKEVLDATLIHQSITGLYETRIDLSQLGGDGGEAAAKPAPGGTLQLEEEYRLFEPESTQKQEMDIWLKNFPQAWAETGGMGTAHCQAPVLIQLKATATPISIRQYPMPHEAYQGIKPHIRRMLDQGILKPCQSPWNTPLLPVKKPGTEDYRPVQDLREVNKRVEDIHPTVPNPYNLLSTLPPSHPWYTVLDLKDAFFCLRLHSESQLLFAFEWRDPEIGLSGQLTWTRLPQGFKNSPTLFNEALHSDLADFRVRYPALVLLQYVDDLLLAAATRTECLEGTKALLETLGNKGYRASAKKAQICLQEVTYLGYSLKDGQRWLTKARKEAILSIPVPKNSRQVREFLGKAGYCRLFIPGFAELAAPLYPLTRPGTLFQWGTEQQLAFEDIKKALLSSPALGLPDITKPFELFIDENSGFAKGVLVQKLGPWKRPVAYLSKKLDTVASGWPPCLRMVAAIAILVKDAGKLTLGQPLTILTSHPVEALVRQPPNKWLSNARMTHYQAMLLDAERVHFGPTVSLNPATLLPLPSGGNHHDCLQILAETHGTRPDLTDQPLPDADLTWYTDGSSFIRNGEREAGAAVTTESEVIWAAPLPPGTSAQRAELIALTQALKMAEGKKLTVYTDSRYAFATTHVHGEIYRRRGWLTSEGKEIKNKNEILALLEALFLPKRLSIIHCPGHQKGDSPQAKGNRLADDTAKKAATETHSSLTVLPAGKRTADGSEFEKRTADGSEFESPKKKAKVE

SEQ ID NO: 1268 - protein, 2093 aa, synthetic construct
MPAAKRVKLDGGDKKYSIGLDIGTNSVGWAVITDEYKVPSKKFKVLGNTDRHSIKKNLIGALLFDSGETAEATRLKRTARRRYTRRKNRICYLQEIFSNEMAKVDDSFFHRLEESFLVEEDKKHERHPIFGNIVDEVAYHEKYPTIYHLRKKLVDSTDKADLRLIYLALAHMIKFRGHFLIEGDLNPDNSDVDKLFIQLVQTYNQLFEENPINASGVDAKAILSARLSKSRRLENLIAQLPGEKKNGLFGNLIALSLGLTPNFKSNFDLAEDAKLQLSKDTYDDDLDNLLAQIGDQYADLFLAAKNLSDAILLSDILRVNTEITKAPLSASMIKRYDEHHQDLTLLKALVRQQLPEKYKEIFFDQSKNGYAGYIDGGASQEEFYKFIKPILEKMDGTEELLVKLNREDLLRKQRTFDNGSIPHQIHLGELHAILRRQEDFYPFLKDNREKIEKILTFRIPYYVGPLARGNSRFAWMTRKSEETITPWNFEEVVDKGASAQSFIERMTNFDKNLPNEKVLPKHSLLYEYFTVYNELTKVKYVTEGMRKPAFLSGEQKKAIVDLLFKTNRKVTVKQLKEDYFKKIECFDSVEISGVEDRFNASLGTYHDLLKIIKDKDFLDNEENEDILEDIVLTLTLFEDREMIEERLKTYAHLFDDKVMKQLKRRRYTGWGRLSRKLINGIRDKQSGKTILDFLKSDGFANRNFMQLIHDDSLTFKEDIQKAQVSGQGDSLHEHIANLAGSPAIKKGILQTVKVVDELVKVMGRHKPENIVIEMARENQTTQKGQKNSRERMKRIEEGIKELGSQILKEHPVENTQLQNEKLYLYYLQNGRDMYVDQELDINRLSDYDVDHIVPQSFLKDDSIDNKVLTRSDKARGKSDNVPSEEVVKKMKNYWRQLLNAKLITQRKFDNLTKAERGGLSELDKAGFIKRQLVETRQITKHVAQILDSRMNTKYDENDKLIREVKVITLKSKLVSDFRKDFQFYKVREINNYHHAHDAYLNAVVGTALIKKYPKLESEFVYGDYKVYDVRKMIAKSEQEIGKATAKYFFYSNIMNFFKTEITLANGEIRKRPLIETNGETGEIVWDKGRDFATVRKVLSMPQVNIVKKTEVQTGGFSKESILPKRNSDKLIARKKDWDPKKYGGFDSPTVAYSVLVVAKVEKGKSKKLKSVKELLGITIMERSSFEKNPIDFLEAKGYKEVKKDLIIKLPKYSLFELENGRKRMLASAGELQKGNELALPSKYVNFLYLASHYEKLKGSPEDNEQKQLFVEQHKHYLDEIIEQISEFSKRVILADANLDKVLSAYNKHRDKPIREQAENIIHLFTLTNLGAPAAFKYFDTTIDRKRYTSTKEVLDATLIHQSITGLYETRIDLSQLGGDGGGGGPAPGGSGGTLQLEEEYRLFEPESTQKQEMDIWLKNFPQAWAETGGMGTAHCQAPVLIQLKATATPISIRQYPMPHEAYQGIKPHIRRMLDQGILKPCQSPWNTPLLPVKKPGTEDYRPVQDLREVNKRVEDIHPTVPNPYNLLSTLPPSHPWYTVLDLKDAFFCLRLHSESQLLFAFEWRDPEIGLSGQLTWTRLPQGFKNSPTLFNEALHSDLADFRVRYPALVLLQYVDDLLLAAATRTECLEGTKALLETLGNKGYRASAKKAQICLQEVTYLGYSLKDGQRWLTKARKEAILSIPVPKNSRQVREFLGKAGYCRLFIPGFAELAAPLYPLTRPGTLFQWGTEQQLAFEDIKKALLSSPALGLPDITKPFELFIDENSGFAKGVLVQKLGPWKRPVAYLSKKLDTVASGWPPCLRMVAAIAILVKDAGKLTLGQPLTILTSHPVEALVRQPPNKWLSNARMTHYQAMLLDAERVHFGPTVSLNPATLLPLPSGGNHHDCLQILAETHGTRPDLTDQPLPDADLTWYTDGSSFIRNGEREAGAAVTTESEVIWAAPLPPGTSAQRAELIALTQALKMAEGKKLTVYTDSRYAFATTHVHGEIYRRRGWLTSEGKEIKNKNEILALLEALFLPKRLSIIHCPGHQKGDSPQAKGNRLADDTAKKAATETHSSLTVLPAGKRTADGSEFEKRTADGSEFESPKKKAKVE

SEQ ID NO: 1269 - protein, 2095 aa, synthetic construct
MPAAKRVKLDGGDKKYSIGLDIGTNSVGWAVITDEYKVPSKKFKVLGNTDRHSIKKNLIGALLFDSGETAEATRLKRTARRRYTRRKNRICYLQEIFSNEMAKVDDSFFHRLEESFLVEEDKKHERHPIFGNIVDEVAYHEKYPTIYHLRKKLVDSTDKADLRLIYLALAHMIKFRGHFLIEGDLNPDNSDVDKLFIQLVQTYNQLFEENPINASGVDAKAILSARLSKSRRLENLIAQLPGEKKNGLFGNLIALSLGLTPNFKSNFDLAEDAKLQLSKDTYDDDLDNLLAQIGDQYADLFLAAKNLSDAILLSDILRVNTEITKAPLSASMIKRYDEHHQDLTLLKALVRQQLPEKYKEIFFDQSKNGYAGYIDGGASQEEFYKFIKPILEKMDGTEELLVKLNREDLLRKQRTFDNGSIPHQIHLGELHAILRRQEDFYPFLKDNREKIEKILTFRIPYYVGPLARGNSRFAWMTRKSEETITPWNFEEVVDKGASAQSFIERMTNFDKNLPNEKVLPKHSLLYEYFTVYNELTKVKYVTEGMRKPAFLSGEQKKAIVDLLFKTNRKVTVKQLKEDYFKKIECFDSVEISGVEDRFNASLGTYHDLLKIIKDKDFLDNEENEDILEDIVLTLTLFEDREMIEERLKTYAHLFDDKVMKQLKRRRYTGWGRLSRKLINGIRDKQSGKTILDFLKSDGFANRNFMQLIHDDSLTFKEDIQKAQVSGQGDSLHEHIANLAGSPAIKKGILQTVKVVDELVKVMGRHKPENIVIEMARENQTTQKGQKNSRERMKRIEEGIKELGSQILKEHPVENTQLQNEKLYLYYLQNGRDMYVDQELDINRLSDYDVDHIVPQSFLKDDSIDNKVLTRSDKARGKSDNVPSEEVVKKMKNYWRQLLNAKLITQRKFDNLTKAERGGLSELDKAGFIKRQLVETRQITKHVAQILDSRMNTKYDENDKLIREVKVITLKSKLVSDFRKDFQFYKVREINNYHHAHDAYLNAVVGTALIKKYPKLESEFVYGDYKVYDVRKMIAKSEQEIGKATAKYFFYSNIMNFFKTEITLANGEIRKRPLIETNGETGEIVWDKGRDFATVRKVLSMPQVNIVKKTEVQTGGFSKESILPKRNSDKLIARKKDWDPKKYGGFDSPTVAYSVLVVAKVEKGKSKKLKSVKELLGITIMERSSFEKNPIDFLEAKGYKEVKKDLIIKLPKYSLFELENGRKRMLASAGELQKGNELALPSKYVNFLYLASHYEKLKGSPEDNEQKQLFVEQHKHYLDEIIEQISEFSKRVILADANLDKVLSAYNKHRDKPIREQAENIIHLFTLTNLGAPAAFKYFDTTIDRKRYTSTKEVLDATLIHQSITGLYETRIDLSQLGGDGGGGSGGGEAAAKGGTLQLEEEYRLFEPESTQKQEMDIWLKNFPQAWAETGGMGTAHCQAPVLIQLKATATPISIRQYPMPHEAYQGIKPHIRRMLDQGILKPCQSPWNTPLLPVKKPGTEDYRPVQDLREVNKRVEDIHPTVPNPYNLLSTLPPSHPWYTVLDLKDAFFCLRLHSESQLLFAFEWRDPEIGLSGQLTWTRLPQGFKNSPTLFNEALHSDLADFRVRYPALVLLQYVDDLLLAAATRTECLEGTKALLETLGNKGYRASAKKAQICLQEVTYLGYSLKDGQRWLTKARKEAILSIPVPKNSRQVREFLGKAGYCRLFIPGFAELAAPLYPLTRPGTLFQWGTEQQLAFEDIKKALLSSPALGLPDITKPFELFIDENSGFAKGVLVQKLGPWKRPVAYLSKKLDTVASGWPPCLRMVAAIAILVKDAGKLTLGQPLTILTSHPVEALVRQPPNKWLSNARMTHYQAMLLDAERVHFGPTVSLNPATLLPLPSGGNHHDCLQILAETHGTRPDLTDQPLPDADLTWYTDGSSFIRNGEREAGAAVTTESEVIWAAPLPPGTSAQRAELIALTQALKMAEGKKLTVYTDSRYAFATTHVHGEIYRRRGWLTSEGKEIKNKNEILALLEALFLPKRLSIIHCPGHQKGDSPQAKGNRLADDTAKKAATETHSSLTVLPAGKRTADGSEFEKRTADGSEFESPKKKAKVE

SEQ ID NO: 1270 - protein, 2093 aa, synthetic construct
MPAAKRVKLDGGDKKYSIGLDIGTNSVGWAVITDEYKVPSKKFKVLGNTDRHSIKKNLIGALLFDSGETAEATRLKRTARRRYTRRKNRICYLQEIFSNEMAKVDDSFFHRLEESFLVEEDKKHERHPIFGNIVDEVAYHEKYPTIYHLRKKLVDSTDKADLRLIYLALAHMIKFRGHFLIEGDLNPDNSDVDKLFIQLVQTYNQLFEENPINASGVDAKAILSARLSKSRRLENLIAQLPGEKKNGLFGNLIALSLGLTPNFKSNFDLAEDAKLQLSKDTYDDDLDNLLAQIGDQYADLFLAAKNLSDAILLSDILRVNTEITKAPLSASMIKRYDEHHQDLTLLKALVRQQLPEKYKEIFFDQSKNGYAGYIDGGASQEEFYKFIKPILEKMDGTEELLVKLNREDLLRKQRTFDNGSIPHQIHLGELHAILRRQEDFYPFLKDNREKIEKILTFRIPYYVGPLARGNSRFAWMTRKSEETITPWNFEEVVDKGASAQSFIERMTNFDKNLPNEKVLPKHSLLYEYFTVYNELTKVKYVTEGMRKPAFLSGEQKKAIVDLLFKTNRKVTVKQLKEDYFKKIECFDSVEISGVEDRFNASLGTYHDLLKIIKDKDFLDNEENEDILEDIVLTLTLFEDREMIEERLKTYAHLFDDKVMKQLKRRRYTGWGRLSRKLINGIRDKQSGKTILDFLKSDGFANRNFMQLIHDDSLTFKEDIQKAQVSGQGDSLHEHIANLAGSPAIKKGILQTVKVVDELVKVMGRHKPENIVIEMARENQTTQKGQKNSRERMKRIEEGIKELGSQILKEHPVENTQLQNEKLYLYYLQNGRDMYVDQELDINRLSDYDVDHIVPQSFLKDDSIDNKVLTRSDKARGKSDNVPSEEVVKKMKNYWRQLLNAKLITQRKFDNLTKAERGGLSELDKAGFIKRQLVETRQITKHVAQILDSRMNTKYDENDKLIREVKVITLKSKLVSDFRKDFQFYKVREINNYHHAHDAYLNAVVGTALIKKYPKLESEFVYGDYKVYDVRKMIAKSEQEIGKATAKYFFYSNIMNFFKTEITLANGEIRKRPLIETNGETGEIVWDKGRDFATVRKVLSMPQVNIVKKTEVQTGGFSKESILPKRNSDKLIARKKDWDPKKYGGFDSPTVAYSVLVVAKVEKGKSKKLKSVKELLGITIMERSSFEKNPIDFLEAKGYKEVKKDLIIKLPKYSLFELENGRKRMLASAGELQKGNELALPSKYVNFLYLASHYEKLKGSPEDNEQKQLFVEQHKHYLDEIIEQISEFSKRVILADANLDKVLSAYNKHRDKPIREQAENIIHLFTLTNLGAPAAFKYFDTTIDRKRYTSTKEVLDATLIHQSITGLYETRIDLSQLGGDGGGGSGSSGGGGGTLQLEEEYRLFEPESTQKQEMDIWLKNFPQAWAETGGMGTAHCQAPVLIQLKATATPISIRQYPMPHEAYQGIKPHIRRMLDQGILKPCQSPWNTPLLPVKKPGTEDYRPVQDLREVNKRVEDIHPTVPNPYNLLSTLPPSHPWYTVLDLKDAFFCLRLHSESQLLFAFEWRDPEIGLSGQLTWTRLPQGFKNSPTLFNEALHSDLADFRVRYPALVLLQYVDDLLLAAATRTECLEGTKALLETLGNKGYRASAKKAQICLQEVTYLGYSLKDGQRWLTKARKEAILSIPVPKNSRQVREFLGKAGYCRLFIPGFAELAAPLYPLTRPGTLFQWGTEQQLAFEDIKKALLSSPALGLPDITKPFELFIDENSGFAKGVLVQKLGPWKRPVAYLSKKLDTVASGWPPCLRMVAAIAILVKDAGKLTLGQPLTILTSHPVEALVRQPPNKWLSNARMTHYQAMLLDAERVHFGPTVSLNPATLLPLPSGGNHHDCLQILAETHGTRPDLTDQPLPDADLTWYTDGSSFIRNGEREAGAAVTTESEVIWAAPLPPGTSAQRAELIALTQALKMAEGKKLTVYTDSRYAFATTHVHGEIYRRRGWLTSEGKEIKNKNEILALLEALFLPKRLSIIHCPGHQKGDSPQAKGNRLADDTAKKAATETHSSLTVLPAGKRTADGSEFEKRTADGSEFESPKKKAKVE

SEQ ID NO: 1271 - protein, 2092 aa, synthetic construct
MPAAKRVKLDGGDKKYSIGLDIGTNSVGWAVITDEYKVPSKKFKVLGNTDRHSIKKNLIGALLFDSGETAEATRLKRTARRRYTRRKNRICYLQEIFSNEMAKVDDSFFHRLEESFLVEEDKKHERHPIFGNIVDEVAYHEKYPTIYHLRKKLVDSTDKADLRLIYLALAHMIKFRGHFLIEGDLNPDNSDVDKLFIQLVQTYNQLFEENPINASGVDAKAILSARLSKSRRLENLIAQLPGEKKNGLFGNLIALSLGLTPNFKSNFDLAEDAKLQLSKDTYDDDLDNLLAQIGDQYADLFLAAKNLSDAILLSDILRVNTEITKAPLSASMIKRYDEHHQDLTLLKALVRQQLPEKYKEIFFDQSKNGYAGYIDGGASQEEFYKFIKPILEKMDGTEELLVKLNREDLLRKQRTFDNGSIPHQIHLGELHAILRRQEDFYPFLKDNREKIEKILTFRIPYYVGPLARGNSRFAWMTRKSEETITPWNFEEVVDKGASAQSFIERMTNFDKNLPNEKVLPKHSLLYEYFTVYNELTKVKYVTEGMRKPAFLSGEQKKAIVDLLFKTNRKVTVKQLKEDYFKKIECFDSVEISGVEDRFNASLGTYHDLLKIIKDKDFLDNEENEDILEDIVLTLTLFEDREMIEERLKTYAHLFDDKVMKQLKRRRYTGWGRLSRKLINGIRDKQSGKTILDFLKSDGFANRNFMQLIHDDSLTFKEDIQKAQVSGQGDSLHEHIANLAGSPAIKKGILQTVKVVDELVKVMGRHKPENIVIEMARENQTTQKGQKNSRERMKRIEEGIKELGSQILKEHPVENTQLQNEKLYLYYLQNGRDMYVDQELDINRLSDYDVDHIVPQSFLKDDSIDNKVLTRSDKARGKSDNVPSEEVVKKMKNYWRQLLNAKLITQRKFDNLTKAERGGLSELDKAGFIKRQLVETRQITKHVAQILDSRMNTKYDENDKLIREVKVITLKSKLVSDFRKDFQFYKVREINNYHHAHDAYLNAVVGTALIKKYPKLESEFVYGDYKVYDVRKMIAKSEQEIGKATAKYFFYSNIMNFFKTEITLANGEIRKRPLIETNGETGEIVWDKGRDFATVRKVLSMPQVNIVKKTEVQTGGFSKESILPKRNSDKLIARKKDWDPKKYGGFDSPTVAYSVLVVAKVEKGKSKKLKSVKELLGITIMERSSFEKNPIDFLEAKGYKEVKKDLIIKLPKYSLFELENGRKRMLASAGELQKGNELALPSKYVNFLYLASHYEKLKGSPEDNEQKQLFVEQHKHYLDEIIEQISEFSKRVILADANLDKVLSAYNKHRDKPIREQAENIIHLFTLTNLGAPAAFKYFDTTIDRKRYTSTKEVLDATLIHQSITGLYETRIDLSQLGGDGGEAAAKGGGGGTLQLEEEYRLFEPESTQKQEMDIWLKNFPQAWAETGGMGTAHCQAPVLIQLKATATPISIRQYPMPHEAYQGIKPHIRRMLDQGILKPCQSPWNTPLLPVKKPGTEDYRPVQDLREVNKRVEDIHPTVPNPYNLLSTLPPSHPWYTVLDLKDAFFCLRLHSESQLLFAFEWRDPEIGLSGQLTWTRLPQGFKNSPTLFNEALHSDLADFRVRYPALVLLQYVDDLLLAAATRTECLEGTKALLETLGNKGYRASAKKAQICLQEVTYLGYSLKDGQRWLTKARKEAILSIPVPKNSRQVREFLGKAGYCRLFIPGFAELAAPLYPLTRPGTLFQWGTEQQLAFEDIKKALLSSPALGLPDITKPFELFIDENSGFAKGVLVQKLGPWKRPVAYLSKKLDTVASGWPPCLRMVAAIAILVKDAGKLTLGQPLTILTSHPVEALVRQPPNKWLSNARMTHYQAMLLDAERVHFGPTVSLNPATLLPLPSGGNHHDCLQILAETHGTRPDLTDQPLPDADLTWYTDGSSFIRNGEREAGAAVTTESEVIWAAPLPPGTSAQRAELIALTQALKMAEGKKLTVYTDSRYAFATTHVHGEIYRRRGWLTSEGKEIKNKNEILALLEALFLPKRLSIIHCPGHQKGDSPQAKGNRLADDTAKKAATETHSSLTVLPAGKRTADGSEFEKRTADGSEFESPKKKAKVE

SEQ ID NO: 1272 - protein, 2090 aa, synthetic construct
MPAAKRVKLDGGDKKYSIGLDIGTNSVGWAVITDEYKVPSKKFKVLGNTDRHSIKKNLIGALLFDSGETAEATRLKRTARRRYTRRKNRICYLQEIFSNEMAKVDDSFFHRLEESFLVEEDKKHERHPIFGNIVDEVAYHEKYPTIYHLRKKLVDSTDKADLRLIYLALAHMIKFRGHFLIEGDLNPDNSDVDKLFIQLVQTYNQLFEENPINASGVDAKAILSARLSKSRRLENLIAQLPGEKKNGLFGNLIALSLGLTPNFKSNFDLAEDAKLQLSKDTYDDDLDNLLAQIGDQYADLFLAAKNLSDAILLSDILRVNTEITKAPLSASMIKRYDEHHQDLTLLKALVRQQLPEKYKEIFFDQSKNGYAGYIDGGASQEEFYKFIKPILEKMDGTEELLVKLNREDLLRKQRTFDNGSIPHQIHLGELHAILRRQEDFYPFLKDNREKIEKILTFRIPYYVGPLARGNSRFAWMTRKSEETITPWNFEEVVDKGASAQSFIERMTNFDKNLPNEKVLPKHSLLYEYFTVYNELTKVKYVTEGMRKPAFLSGEQKKAIVDLLFKTNRKVTVKQLKEDYFKKIECFDSVEISGVEDRFNASLGTYHDLLKIIKDKDFLDNEENEDILEDIVLTLTLFEDREMIEERLKTYAHLFDDKVMKQLKRRRYTGWGRLSRKLINGIRDKQSGKTILDFLKSDGFANRNFMQLIHDDSLTFKEDIQKAQVSGQGDSLHEHIANLAGSPAIKKGILQTVKVVDELVKVMGRHKPENIVIEMARENQTTQKGQKNSRERMKRIEEGIKELGSQILKEHPVENTQLQNEKLYLYYLQNGRDMYVDQELDINRLSDYDVDHIVPQSFLKDDSIDNKVLTRSDKARGKSDNVPSEEVVKKMKNYWRQLLNAKLITQRKFDNLTKAERGGLSELDKAGFIKRQLVETRQITKHVAQILDSRMNTKYDENDKLIREVKVITLKSKLVSDFRKDFQFYKVREINNYHHAHDAYLNAVVGTALIKKYPKLESEFVYGDYKVYDVRKMIAKSEQEIGKATAKYFFYSNIMNFFKTEITLANGEIRKRPLIETNGETGEIVWDKGRDFATVRKVLSMPQVNIVKKTEVQTGGFSKESILPKRNSDKLIARKKDWDPKKYGGFDSPTVAYSVLVVAKVEKGKSKKLKSVKELLGITIMERSSFEKNPIDFLEAKGYKEVKKDLIIKLPKYSLFELENGRKRMLASAGELQKGNELALPSKYVNFLYLASHYEKLKGSPEDNEQKQLFVEQHKHYLDEIIEQISEFSKRVILADANLDKVLSAYNKHRDKPIREQAENIIHLFTLTNLGAPAAFKYFDTTIDRKRYTSTKEVLDATLIHQSITGLYETRIDLSQLGGDGGGGGGSSGGTLQLEEEYRLFEPESTQKQEMDIWLKNFPQAWAETGGMGTAHCQAPVLIQLKATATPISIRQYPMPHEAYQGIKPHIRRMLDQGILKPCQSPWNTPLLPVKKPGTEDYRPVQDLREVNKRVEDIHPTVPNPYNLLSTLPPSHPWYTVLDLKDAFFCLRLHSESQLLFAFEWRDPEIGLSGQLTWTRLPQGFKNSPTLFNEALHSDLADFRVRYPALVLLQYVDDLLLAAATRTECLEGTKALLETLGNKGYRASAKKAQICLQEVTYLGYSLKDGQRWLTKARKEAILSIPVPKNSRQVREFLGKAGYCRLFIPGFAELAAPLYPLTRPGTLFQWGTEQQLAFEDIKKALLSSPALGLPDITKPFELFIDENSGFAKGVLVQKLGPWKRPVAYLSKKLDTVASGWPPCLRMVAAIAILVKDAGKLTLGQPLTILTSHPVEALVRQPPNKWLSNARMTHYQAMLLDAERVHFGPTVSLNPATLLPLPSGGNHHDCLQILAETHGTRPDLTDQPLPDADLTWYTDGSSFIRNGEREAGAAVTTESEVIWAAPLPPGTSAQRAELIALTQALKMAEGKKLTVYTDSRYAFATTHVHGEIYRRRGWLTSEGKEIKNKNEILALLEALFLPKRLSIIHCPGHQKGDSPQAKGNRLADDTAKKAATETHSSLTVLPAGKRTADGSEFEKRTADGSEFESPKKKAKVE

SEQ ID NO: 1273 - protein, 2089 aa, synthetic construct
MPAAKRVKLDGGDKKYSIGLDIGTNSVGWAVITDEYKVPSKKFKVLGNTDRHSIKKNLIGALLFDSGETAEATRLKRTARRRYTRRKNRICYLQEIFSNEMAKVDDSFFHRLEESFLVEEDKKHERHPIFGNIVDEVAYHEKYPTIYHLRKKLVDSTDKADLRLIYLALAHMIKFRGHFLIEGDLNPDNSDVDKLFIQLVQTYNQLFEENPINASGVDAKAILSARLSKSRRLENLIAQLPGEKKNGLFGNLIALSLGLTPNFKSNFDLAEDAKLQLSKDTYDDDLDNLLAQIGDQYADLFLAAKNLSDAILLSDILRVNTEITKAPLSASMIKRYDEHHQDLTLLKALVRQQLPEKYKEIFFDQSKNGYAGYIDGGASQEEFYKFIKPILEKMDGTEELLVKLNREDLLRKQRTFDNGSIPHQIHLGELHAILRRQEDFYPFLKDNREKIEKILTFRIPYYVGPLARGNSRFAWMTRKSEETITPWNFEEVVDKGASAQSFIERMTNFDKNLPNEKVLPKHSLLYEYFTVYNELTKVKYVTEGMRKPAFLSGEQKKAIVDLLFKTNRKVTVKQLKEDYFKKIECFDSVEISGVEDRFNASLGTYHDLLKIIKDKDFLDNEENEDILEDIVLTLTLFEDREMIEERLKTYAHLFDDKVMKQLKRRRYTGWGRLSRKLINGIRDKQSGKTILDFLKSDGFANRNFMQLIHDDSLTFKEDIQKAQVSGQGDSLHEHIANLAGSPAIKKGILQTVKVVDELVKVMGRHKPENIVIEMARENQTTQKGQKNSRERMKRIEEGIKELGSQILKEHPVENTQLQNEKLYLYYLQNGRDMYVDQELDINRLSDYDVDHIVPQSFLKDDSIDNKVLTRSDKARGKSDNVPSEEVVKKMKNYWRQLLNAKLITQRKFDNLTKAERGGLSELDKAGFIKRQLVETRQITKHVAQILDSRMNTKYDENDKLIREVKVITLKSKLVSDFRKDFQFYKVREINNYHHAHDAYLNAVVGTALIKKYPKLESEFVYGDYKVYDVRKMIAKSEQEIGKATAKYFFYSNIMNFFKTEITLANGEIRKRPLIETNGETGEIVWDKGRDFATVRKVLSMPQVNIVKKTEVQTGGFSKESILPKRNSDKLIARKKDWDPKKYGGFDSPTVAYSVLVVAKVEKGKSKKLKSVKELLGITIMERSSFEKNPIDFLEAKGYKEVKKDLIIKLPKYSLFELENGRKRMLASAGELQKGNELALPSKYVNFLYLASHYEKLKGSPEDNEQKQLFVEQHKHYLDEIIEQISEFSKRVILADANLDKVLSAYNKHRDKPIREQAENIIHLFTLTNLGAPAAFKYFDTTIDRKRYTSTKEVLDATLIHQSITGLYETRIDLSQLGGDGGGGGGSGGTLQLEEEYRLFEPESTQKQEMDIWLKNFPQAWAETGGMGTAHCQAPVLIQLKATATPISIRQYPMPHEAYQGIKPHIRRMLDQGILKPCQSPWNTPLLPVKKPGTEDYRPVQDLREVNKRVEDIHPTVPNPYNLLSTLPPSHPWYTVLDLKDAFFCLRLHSESQLLFAFEWRDPEIGLSGQLTWTRLPQGFKNSPTLFNEALHSDLADFRVRYPALVLLQYVDDLLLAAATRTECLEGTKALLETLGNKGYRASAKKAQICLQEVTYLGYSLKDGQRWLTKARKEAILSIPVPKNSRQVREFLGKAGYCRLFIPGFAELAAPLYPLTRPGTLFQWGTEQQLAFEDIKKALLSSPALGLPDITKPFELFIDENSGFAKGVLVQKLGPWKRPVAYLSKKLDTVASGWPPCLRMVAAIAILVKDAGKLTLGQPLTILTSHPVEALVRQPPNKWLSNARMTHYQAMLLDAERVHFGPTVSLNPATLLPLPSGGNHHDCLQILAETHGTRPDLTDQPLPDADLTWYTDGSSFIRNGEREAGAAVTTESEVIWAAPLPPGTSAQRAELIALTQALKMAEGKKLTVYTDSRYAFATTHVHGEIYRRRGWLTSEGKEIKNKNEILALLEALFLPKRLSIIHCPGHQKGDSPQAKGNRLADDTAKKAATETHSSLTVLPAGKRTADGSEFEKRTADGSEFESPKKKAKVE

SEQ ID NO: 1274 - protein, 2099 aa, synthetic construct
MPAAKRVKLDGGDKKYSIGLDIGTNSVGWAVITDEYKVPSKKFKVLGNTDRHSIKKNLIGALLFDSGETAEATRLKRTARRRYTRRKNRICYLQEIFSNEMAKVDDSFFHRLEESFLVEEDKKHERHPIFGNIVDEVAYHEKYPTIYHLRKKLVDSTDKADLRLIYLALAHMIKFRGHFLIEGDLNPDNSDVDKLFIQLVQTYNQLFEENPINASGVDAKAILSARLSKSRRLENLIAQLPGEKKNGLFGNLIALSLGLTPNFKSNFDLAEDAKLQLSKDTYDDDLDNLLAQIGDQYADLFLAAKNLSDAILLSDILRVNTEITKAPLSASMIKRYDEHHQDLTLLKALVRQQLPEKYKEIFFDQSKNGYAGYIDGGASQEEFYKFIKPILEKMDGTEELLVKLNREDLLRKQRTFDNGSIPHQIHLGELHAILRRQEDFYPFLKDNREKIEKILTFRIPYYVGPLARGNSRFAWMTRKSEETITPWNFEEVVDKGASAQSFIERMTNFDKNLPNEKVLPKHSLLYEYFTVYNELTKVKYVTEGMRKPAFLSGEQKKAIVDLLFKTNRKVTVKQLKEDYFKKIECFDSVEISGVEDRFNASLGTYHDLLKIIKDKDFLDNEENEDILEDIVLTLTLFEDREMIEERLKTYAHLFDDKVMKQLKRRRYTGWGRLSRKLINGIRDKQSGKTILDFLKSDGFANRNFMQLIHDDSLTFKEDIQKAQVSGQGDSLHEHIANLAGSPAIKKGILQTVKVVDELVKVMGRHKPENIVIEMARENQTTQKGQKNSRERMKRIEEGIKELGSQILKEHPVENTQLQNEKLYLYYLQNGRDMYVDQELDINRLSDYDVDHIVPQSFLKDDSIDNKVLTRSDKARGKSDNVPSEEVVKKMKNYWRQLLNAKLITQRKFDNLTKAERGGLSELDKAGFIKRQLVETRQITKHVAQILDSRMNTKYDENDKLIREVKVITLKSKLVSDFRKDFQFYKVREINNYHHAHDAYLNAVVGTALIKKYPKLESEFVYGDYKVYDVRKMIAKSEQEIGKATAKYFFYSNIMNFFKTEITLANGEIRKRPLIETNGETGEIVWDKGRDFATVRKVLSMPQVNIVKKTEVQTGGFSKESILPKRNSDKLIARKKDWDPKKYGGFDSPTVAYSVLVVAKVEKGKSKKLKSVKELLGITIMERSSFEKNPIDFLEAKGYKEVKKDLIIKLPKYSLFELENGRKRMLASAGELQKGNELALPSKYVNFLYLASHYEKLKGSPEDNEQKQLFVEQHKHYLDEIIEQISEFSKRVILADANLDKVLSAYNKHRDKPIREQAENIIHLFTLTNLGAPAAFKYFDTTIDRKRYTSTKEVLDATLIHQSITGLYETRIDLSQLGGDGGGSSGSSGSSGSSGSSGGTLQLEEEYRLFEPESTQKQEMDIWLKNFPQAWAETGGMGTAHCQAPVLIQLKATATPISIRQYPMPHEAYQGIKPHIRRMLDQGILKPCQSPWNTPLLPVKKPGTEDYRPVQDLREVNKRVEDIHPTVPNPYNLLSTLPPSHPWYTVLDLKDAFFCLRLHSESQLLFAFEWRDPEIGLSGQLTWTRLPQGFKNSPTLFNEALHSDLADFRVRYPALVLLQYVDDLLLAAATRTECLEGTKALLETLGNKGYRASAKKAQICLQEVTYLGYSLKDGQRWLTKARKEAILSIPVPKNSRQVREFLGKAGYCRLFIPGFAELAAPLYPLTRPGTLFQWGTEQQLAFEDIKKALLSSPALGLPDITKPFELFIDENSGFAKGVLVQKLGPWKRPVAYLSKKLDTVASGWPPCLRMVAAIAILVKDAGKLTLGQPLTILTSHPVEALVRQPPNKWLSNARMTHYQAMLLDAERVHFGPTVSLNPATLLPLPSGGNHHDCLQILAETHGTRPDLTDQPLPDADLTWYTDGSSFIRNGEREAGAAVTTESEVIWAAPLPPGTSAQRAELIALTQALKMAEGKKLTVYTDSRYAFATTHVHGEIYRRRGWLTSEGKEIKNKNEILALLEALFLPKRLSIIHCPGHQKGDSPQAKGNRLADDTAKKAATETHSSLTVLPAGKRTADGSEFEKRTADGSEFESPKKKAKVE

SEQ ID NO: 1275 - protein, 2093 aa, synthetic construct
MPAAKRVKLDGGDKKYSIGLDIGTNSVGWAVITDEYKVPSKKFKVLGNTDRHSIKKNLIGALLFDSGETAEATRLKRTARRRYTRRKNRICYLQEIFSNEMAKVDDSFFHRLEESFLVEEDKKHERHPIFGNIVDEVAYHEKYPTIYHLRKKLVDSTDKADLRLIYLALAHMIKFRGHFLIEGDLNPDNSDVDKLFIQLVQTYNQLFEENPINASGVDAKAILSARLSKSRRLENLIAQLPGEKKNGLFGNLIALSLGLTPNFKSNFDLAEDAKLQLSKDTYDDDLDNLLAQIGDQYADLFLAAKNLSDAILLSDILRVNTEITKAPLSASMIKRYDEHHQDLTLLKALVRQQLPEKYKEIFFDQSKNGYAGYIDGGASQEEFYKFIKPILEKMDGTEELLVKLNREDLLRKQRTFDNGSIPHQIHLGELHAILRRQEDFYPFLKDNREKIEKILTFRIPYYVGPLARGNSRFAWMTRKSEETITPWNFEEVVDKGASAQSFIERMTNFDKNLPNEKVLPKHSLLYEYFTVYNELTKVKYVTEGMRKPAFLSGEQKKAIVDLLFKTNRKVTVKQLKEDYFKKIECFDSVEISGVEDRFNASLGTYHDLLKIIKDKDFLDNEENEDILEDIVLTLTLFEDREMIEERLKTYAHLFDDKVMKQLKRRRYTGWGRLSRKLINGIRDKQSGKTILDFLKSDGFANRNFMQLIHDDSLTFKEDIQKAQVSGQGDSLHEHIANLAGSPAIKKGILQTVKVVDELVKVMGRHKPENIVIEMARENQTTQKGQKNSRERMKRIEEGIKELGSQILKEHPVENTQLQNEKLYLYYLQNGRDMYVDQELDINRLSDYDVDHIVPQSFLKDDSIDNKVLTRSDKARGKSDNVPSEEVVKKMKNYWRQLLNAKLITQRKFDNLTKAERGGLSELDKAGFIKRQLVETRQITKHVAQILDSRMNTKYDENDKLIREVKVITLKSKLVSDFRKDFQFYKVREINNYHHAHDAYLNAVVGTALIKKYPKLESEFVYGDYKVYDVRKMIAKSEQEIGKATAKYFFYSNIMNFFKTEITLANGEIRKRPLIETNGETGEIVWDKGRDFATVRKVLSMPQVNIVKKTEVQTGGFSKESILPKRNSDKLIARKKDWDPKKYGGFDSPTVAYSVLVVAKVEKGKSKKLKSVKELLGITIMERSSFEKNPIDFLEAKGYKEVKKDLIIKLPKYSLFELENGRKRMLASAGELQKGNELALPSKYVNFLYLASHYEKLKGSPEDNEQKQLFVEQHKHYLDEIIEQISEFSKRVILADANLDKVLSAYNKHRDKPIREQAENIIHLFTLTNLGAPAAFKYFDTTIDRKRYTSTKEVLDATLIHQSITGLYETRIDLSQLGGDGGGGSGGGGSSGGTLQLEEEYRLFEPESTQKQEMDIWLKNFPQAWAETGGMGTAHCQAPVLIQLKATATPISIRQYPMPHEAYQGIKPHIRRMLDQGILKPCQSPWNTPLLPVKKPGTEDYRPVQDLREVNKRVEDIHPTVPNPYNLLSTLPPSHPWYTVLDLKDAFFCLRLHSESQLLFAFEWRDPEIGLSGQLTWTRLPQGFKNSPTLFNEALHSDLADFRVRYPALVLLQYVDDLLLAAATRTECLEGTKALLETLGNKGYRASAKKAQICLQEVTYLGYSLKDGQRWLTKARKEAILSIPVPKNSRQVREFLGKAGYCRLFIPGFAELAAPLYPLTRPGTLFQWGTEQQLAFEDIKKALLSSPALGLPDITKPFELFIDENSGFAKGVLVQKLGPWKRPVAYLSKKLDTVASGWPPCLRMVAAIAILVKDAGKLTLGQPLTILTSHPVEALVRQPPNKWLSNARMTHYQAMLLDAERVHFGPTVSLNPATLLPLPSGGNHHDCLQILAETHGTRPDLTDQPLPDADLTWYTDGSSFIRNGEREAGAAVTTESEVIWAAPLPPGTSAQRAELIALTQALKMAEGKKLTVYTDSRYAFATTHVHGEIYRRRGWLTSEGKEIKNKNEILALLEALFLPKRLSIIHCPGHQKGDSPQAKGNRLADDTAKKAATETHSSLTVLPAGKRTADGSEFEKRTADGSEFESPKKKAKVE

SEQ ID NO: 1276 - protein, 2093 aa, synthetic construct
MPAAKRVKLDGGDKKYSIGLDIGTNSVGWAVITDEYKVPSKKFKVLGNTDRHSIKKNLIGALLFDSGETAEATRLKRTARRRYTRRKNRICYLQEIFSNEMAKVDDSFFHRLEESFLVEEDKKHERHPIFGNIVDEVAYHEKYPTIYHLRKKLVDSTDKADLRLIYLALAHMIKFRGHFLIEGDLNPDNSDVDKLFIQLVQTYNQLFEENPINASGVDAKAILSARLSKSRRLENLIAQLPGEKKNGLFGNLIALSLGLTPNFKSNFDLAEDAKLQLSKDTYDDDLDNLLAQIGDQYADLFLAAKNLSDAILLSDILRVNTEITKAPLSASMIKRYDEHHQDLTLLKALVRQQLPEKYKEIFFDQSKNGYAGYIDGGASQEEFYKFIKPILEKMDGTEELLVKLNREDLLRKQRTFDNGSIPHQIHLGELHAILRRQEDFYPFLKDNREKIEKILTFRIPYYVGPLARGNSRFAWMTRKSEETITPWNFEEVVDKGASAQSFIERMTNFDKNLPNEKVLPKHSLLYEYFTVYNELTKVKYVTEGMRKPAFLSGEQKKAIVDLLFKTNRKVTVKQLKEDYFKKIECFDSVEISGVEDRFNASLGTYHDLLKIIKDKDFLDNEENEDILEDIVLTLTLFEDREMIEERLKTYAHLFDDKVMKQLKRRRYTGWGRLSRKLINGIRDKQSGKTILDFLKSDGFANRNFMQLIHDDSLTFKEDIQKAQVSGQGDSLHEHIANLAGSPAIKKGILQTVKVVDELVKVMGRHKPENIVIEMARENQTTQKGQKNSRERMKRIEEGIKELGSQILKEHPVENTQLQNEKLYLYYLQNGRDMYVDQELDINRLSDYDVDHIVPQSFLKDDSIDNKVLTRSDKARGKSDNVPSEEVVKKMKNYWRQLLNAKLITQRKFDNLTKAERGGLSELDKAGFIKRQLVETRQITKHVAQILDSRMNTKYDENDKLIREVKVITLKSKLVSDFRKDFQFYKVREINNYHHAHDAYLNAVVGTALIKKYPKLESEFVYGDYKVYDVRKMIAKSEQEIGKATAKYFFYSNIMNFFKTEITLANGEIRKRPLIETNGETGEIVWDKGRDFATVRKVLSMPQVNIVKKTEVQTGGFSKESILPKRNSDKLIARKKDWDPKKYGGFDSPTVAYSVLVVAKVEKGKSKKLKSVKELLGITIMERSSFEKNPIDFLEAKGYKEVKKDLIIKLPKYSLFELENGRKRMLASAGELQKGNELALPSKYVNFLYLASHYEKLKGSPEDNEQKQLFVEQHKHYLDEIIEQISEFSKRVILADANLDKVLSAYNKHRDKPIREQAENIIHLFTLTNLGAPAAFKYFDTTIDRKRYTSTKEVLDATLIHQSITGLYETRIDLSQLGGDGGPAPGSSGGSGGTLQLEEEYRLFEPESTQKQEMDIWLKNFPQAWAETGGMGTAHCQAPVLIQLKATATPISIRQYPMPHEAYQGIKPHIRRMLDQGILKPCQSPWNTPLLPVKKPGTEDYRPVQDLREVNKRVEDIHPTVPNPYNLLSTLPPSHPWYTVLDLKDAFFCLRLHSESQLLFAFEWRDPEIGLSGQLTWTRLPQGFKNSPTLFNEALHSDLADFRVRYPALVLLQYVDDLLLAAATRTECLEGTKALLETLGNKGYRASAKKAQICLQEVTYLGYSLKDGQRWLTKARKEAILSIPVPKNSRQVREFLGKAGYCRLFIPGFAELAAPLYPLTRPGTLFQWGTEQQLAFEDIKKALLSSPALGLPDITKPFELFIDENSGFAKGVLVQKLGPWKRPVAYLSKKLDTVASGWPPCLRMVAAIAILVKDAGKLTLGQPLTILTSHPVEALVRQPPNKWLSNARMTHYQAMLLDAERVHFGPTVSLNPATLLPLPSGGNHHDCLQILAETHGTRPDLTDQPLPDADLTWYTDGSSFIRNGEREAGAAVTTESEVIWAAPLPPGTSAQRAELIALTQALKMAEGKKLTVYTDSRYAFATTHVHGEIYRRRGWLTSEGKEIKNKNEILALLEALFLPKRLSIIHCPGHQKGDSPQAKGNRLADDTAKKAATETHSSLTVLPAGKRTADGSEFEKRTADGSEFESPKKKAKVE

SEQ ID NO: 1277 - protein, 2093 aa, synthetic construct
MPAAKRVKLDGGDKKYSIGLDIGTNSVGWAVITDEYKVPSKKFKVLGNTDRHSIKKNLIGALLFDSGETAEATRLKRTARRRYTRRKNRICYLQEIFSNEMAKVDDSFFHRLEESFLVEEDKKHERHPIFGNIVDEVAYHEKYPTIYHLRKKLVDSTDKADLRLIYLALAHMIKFRGHFLIEGDLNPDNSDVDKLFIQLVQTYNQLFEENPINASGVDAKAILSARLSKSRRLENLIAQLPGEKKNGLFGNLIALSLGLTPNFKSNFDLAEDAKLQLSKDTYDDDLDNLLAQIGDQYADLFLAAKNLSDAILLSDILRVNTEITKAPLSASMIKRYDEHHQDLTLLKALVRQQLPEKYKEIFFDQSKNGYAGYIDGGASQEEFYKFIKPILEKMDGTEELLVKLNREDLLRKQRTFDNGSIPHQIHLGELHAILRRQEDFYPFLKDNREKIEKILTFRIPYYVGPLARGNSRFAWMTRKSEETITPWNFEEVVDKGASAQSFIERMTNFDKNLPNEKVLPKHSLLYEYFTVYNELTKVKYVTEGMRKPAFLSGEQKKAIVDLLFKTNRKVTVKQLKEDYFKKIECFDSVEISGVEDRFNASLGTYHDLLKIIKDKDFLDNEENEDILEDIVLTLTLFEDREMIEERLKTYAHLFDDKVMKQLKRRRYTGWGRLSRKLINGIRDKQSGKTILDFLKSDGFANRNFMQLIHDDSLTFKEDIQKAQVSGQGDSLHEHIANLAGSPAIKKGILQTVKVVDELVKVMGRHKPENIVIEMARENQTTQKGQKNSRERMKRIEEGIKELGSQILKEHPVENTQLQNEKLYLYYLQNGRDMYVDQELDINRLSDYDVDHIVPQSFLKDDSIDNKVLTRSDKARGKSDNVPSEEVVKKMKNYWRQLLNAKLITQRKFDNLTKAERGGLSELDKAGFIKRQLVETRQITKHVAQILDSRMNTKYDENDKLIREVKVITLKSKLVSDFRKDFQFYKVREINNYHHAHDAYLNAVVGTALIKKYPKLESEFVYGDYKVYDVRKMIAKSEQEIGKATAKYFFYSNIMNFFKTEITLANGEIRKRPLIETNGETGEIVWDKGRDFATVRKVLSMPQVNIVKKTEVQTGGFSKESILPKRNSDKLIARKKDWDPKKYGGFDSPTVAYSVLVVAKVEKGKSKKLKSVKELLGITIMERSSFEKNPIDFLEAKGYKEVKKDLIIKLPKYSLFELENGRKRMLASAGELQKGNELALPSKYVNFLYLASHYEKLKGSPEDNEQKQLFVEQHKHYLDEIIEQISEFSKRVILADANLDKVLSAYNKHRDKPIREQAENIIHLFTLTNLGAPAAFKYFDTTIDRKRYTSTKEVLDATLIHQSITGLYETRIDLSQLGGDGGPAPGGGGSSGGTLQLEEEYRLFEPESTQKQEMDIWLKNFPQAWAETGGMGTAHCQAPVLIQLKATATPISIRQYPMPHEAYQGIKPHIRRMLDQGILKPCQSPWNTPLLPVKKPGTEDYRPVQDLREVNKRVEDIHPTVPNPYNLLSTLPPSHPWYTVLDLKDAFFCLRLHSESQLLFAFEWRDPEIGLSGQLTWTRLPQGFKNSPTLFNEALHSDLADFRVRYPALVLLQYVDDLLLAAATRTECLEGTKALLETLGNKGYRASAKKAQICLQEVTYLGYSLKDGQRWLTKARKEAILSIPVPKNSRQVREFLGKAGYCRLFIPGFAELAAPLYPLTRPGTLFQWGTEQQLAFEDIKKALLSSPALGLPDITKPFELFIDENSGFAKGVLVQKLGPWKRPVAYLSKKLDTVASGWPPCLRMVAAIAILVKDAGKLTLGQPLTILTSHPVEALVRQPPNKWLSNARMTHYQAMLLDAERVHFGPTVSLNPATLLPLPSGGNHHDCLQILAETHGTRPDLTDQPLPDADLTWYTDGSSFIRNGEREAGAAVTTESEVIWAAPLPPGTSAQRAELIALTQALKMAEGKKLTVYTDSRYAFATTHVHGEIYRRRGWLTSEGKEIKNKNEILALLEALFLPKRLSIIHCPGHQKGDSPQAKGNRLADDTAKKAATETHSSLTVLPAGKRTADGSEFEKRTADGSEFESPKKKAKVE

SEQ ID NO: 1278 - protein, 2095 aa, synthetic construct
MPAAKRVKLDGGDKKYSIGLDIGTNSVGWAVITDEYKVPSKKFKVLGNTDRHSIKKNLIGALLFDSGETAEATRLKRTARRRYTRRKNRICYLQEIFSNEMAKVDDSFFHRLEESFLVEEDKKHERHPIFGNIVDEVAYHEKYPTIYHLRKKLVDSTDKADLRLIYLALAHMIKFRGHFLIEGDLNPDNSDVDKLFIQLVQTYNQLFEENPINASGVDAKAILSARLSKSRRLENLIAQLPGEKKNGLFGNLIALSLGLTPNFKSNFDLAEDAKLQLSKDTYDDDLDNLLAQIGDQYADLFLAAKNLSDAILLSDILRVNTEITKAPLSASMIKRYDEHHQDLTLLKALVRQQLPEKYKEIFFDQSKNGYAGYIDGGASQEEFYKFIKPILEKMDGTEELLVKLNREDLLRKQRTFDNGSIPHQIHLGELHAILRRQEDFYPFLKDNREKIEKILTFRIPYYVGPLARGNSRFAWMTRKSEETITPWNFEEVVDKGASAQSFIERMTNFDKNLPNEKVLPKHSLLYEYFTVYNELTKVKYVTEGMRKPAFLSGEQKKAIVDLLFKTNRKVTVKQLKEDYFKKIECFDSVEISGVEDRFNASLGTYHDLLKIIKDKDFLDNEENEDILEDIVLTLTLFEDREMIEERLKTYAHLFDDKVMKQLKRRRYTGWGRLSRKLINGIRDKQSGKTILDFLKSDGFANRNFMQLIHDDSLTFKEDIQKAQVSGQGDSLHEHIANLAGSPAIKKGILQTVKVVDELVKVMGRHKPENIVIEMARENQTTQKGQKNSRERMKRIEEGIKELGSQILKEHPVENTQLQNEKLYLYYLQNGRDMYVDQELDINRLSDYDVDHIVPQSFLKDDSIDNKVLTRSDKARGKSDNVPSEEVVKKMKNYWRQLLNAKLITQRKFDNLTKAERGGLSELDKAGFIKRQLVETRQITKHVAQILDSRMNTKYDENDKLIREVKVITLKSKLVSDFRKDFQFYKVREINNYHHAHDAYLNAVVGTALIKKYPKLESEFVYGDYKVYDVRKMIAKSEQEIGKATAKYFFYSNIMNFFKTEITLANGEIRKRPLIETNGETGEIVWDKGRDFATVRKVLSMPQVNIVKKTEVQTGGFSKESILPKRNSDKLIARKKDWDPKKYGGFDSPTVAYSVLVVAKVEKGKSKKLKSVKELLGITIMERSSFEKNPIDFLEAKGYKEVKKDLIIKLPKYSLFELENGRKRMLASAGELQKGNELALPSKYVNFLYLASHYEKLKGSPEDNEQKQLFVEQHKHYLDEIIEQISEFSKRVILADANLDKVLSAYNKHRDKPIREQAENIIHLFTLTNLGAPAAFKYFDTTIDRKRYTSTKEVLDATLIHQSITGLYETRIDLSQLGGDGGGGSEAAAKGSSGGTLQLEEEYRLFEPESTQKQEMDIWLKNFPQAWAETGGMGTAHCQAPVLIQLKATATPISIRQYPMPHEAYQGIKPHIRRMLDQGILKPCQSPWNTPLLPVKKPGTEDYRPVQDLREVNKRVEDIHPTVPNPYNLLSTLPPSHPWYTVLDLKDAFFCLRLHSESQLLFAFEWRDPEIGLSGQLTWTRLPQGFKNSPTLFNEALHSDLADFRVRYPALVLLQYVDDLLLAAATRTECLEGTKALLETLGNKGYRASAKKAQICLQEVTYLGYSLKDGQRWLTKARKEAILSIPVPKNSRQVREFLGKAGYCRLFIPGFAELAAPLYPLTRPGTLFQWGTEQQLAFEDIKKALLSSPALGLPDITKPFELFIDENSGFAKGVLVQKLGPWKRPVAYLSKKLDTVASGWPPCLRMVAAIAILVKDAGKLTLGQPLTILTSHPVEALVRQPPNKWLSNARMTHYQAMLLDAERVHFGPTVSLNPATLLPLPSGGNHHDCLQILAETHGTRPDLTDQPLPDADLTWYTDGSSFIRNGEREAGAAVTTESEVIWAAPLPPGTSAQRAELIALTQALKMAEGKKLTVYTDSRYAFATTHVHGEIYRRRGWLTSEGKEIKNKNEILALLEALFLPKRLSIIHCPGHQKGDSPQAKGNRLADDTAKKAATETHSSLTVLPAGKRTADGSEFEKRTADGSEFESPKKKAKVE

SEQ ID NO: 1279 - protein, 2095 aa, synthetic construct
MPAAKRVKLDGGDKKYSIGLDIGTNSVGWAVITDEYKVPSKKFKVLGNTDRHSIKKNLIGALLFDSGETAEATRLKRTARRRYTRRKNRICYLQEIFSNEMAKVDDSFFHRLEESFLVEEDKKHERHPIFGNIVDEVAYHEKYPTIYHLRKKLVDSTDKADLRLIYLALAHMIKFRGHFLIEGDLNPDNSDVDKLFIQLVQTYNQLFEENPINASGVDAKAILSARLSKSRRLENLIAQLPGEKKNGLFGNLIALSLGLTPNFKSNFDLAEDAKLQLSKDTYDDDLDNLLAQIGDQYADLFLAAKNLSDAILLSDILRVNTEITKAPLSASMIKRYDEHHQDLTLLKALVRQQLPEKYKEIFFDQSKNGYAGYIDGGASQEEFYKFIKPILEKMDGTEELLVKLNREDLLRKQRTFDNGSIPHQIHLGELHAILRRQEDFYPFLKDNREKIEKILTFRIPYYVGPLARGNSRFAWMTRKSEETITPWNFEEVVDKGASAQSFIERMTNFDKNLPNEKVLPKHSLLYEYFTVYNELTKVKYVTEGMRKPAFLSGEQKKAIVDLLFKTNRKVTVKQLKEDYFKKIECFDSVEISGVEDRFNASLGTYHDLLKIIKDKDFLDNEENEDILEDIVLTLTLFEDREMIEERLKTYAHLFDDKVMKQLKRRRYTGWGRLSRKLINGIRDKQSGKTILDFLKSDGFANRNFMQLIHDDSLTFKEDIQKAQVSGQGDSLHEHIANLAGSPAIKKGILQTVKVVDELVKVMGRHKPENIVIEMARENQTTQKGQKNSRERMKRIEEGIKELGSQILKEHPVENTQLQNEKLYLYYLQNGRDMYVDQELDINRLSDYDVDHIVPQSFLKDDSIDNKVLTRSDKARGKSDNVPSEEVVKKMKNYWRQLLNAKLITQRKFDNLTKAERGGLSELDKAGFIKRQLVETRQITKHVAQILDSRMNTKYDENDKLIREVKVITLKSKLVSDFRKDFQFYKVREINNYHHAHDAYLNAVVGTALIKKYPKLESEFVYGDYKVYDVRKMIAKSEQEIGKATAKYFFYSNIMNFFKTEITLANGEIRKRPLIETNGETGEIVWDKGRDFATVRKVLSMPQVNIVKKTEVQTGGFSKESILPKRNSDKLIARKKDWDPKKYGGFDSPTVAYSVLVVAKVEKGKSKKLKSVKELLGITIMERSSFEKNPIDFLEAKGYKEVKKDLIIKLPKYSLFELENGRKRMLASAGELQKGNELALPSKYVNFLYLASHYEKLKGSPEDNEQKQLFVEQHKHYLDEIIEQISEFSKRVILADANLDKVLSAYNKHRDKPIREQAENIIHLFTLTNLGAPAAFKYFDTTIDRKRYTSTKEVLDATLIHQSITGLYETRIDLSQLGGDGGEAAAKGGSGGGGGTLQLEEEYRLFEPESTQKQEMDIWLKNFPQAWAETGGMGTAHCQAPVLIQLKATATPISIRQYPMPHEAYQGIKPHIRRMLDQGILKPCQSPWNTPLLPVKKPGTEDYRPVQDLREVNKRVEDIHPTVPNPYNLLSTLPPSHPWYTVLDLKDAFFCLRLHSESQLLFAFEWRDPEIGLSGQLTWTRLPQGFKNSPTLFNEALHSDLADFRVRYPALVLLQYVDDLLLAAATRTECLEGTKALLETLGNKGYRASAKKAQICLQEVTYLGYSLKDGQRWLTKARKEAILSIPVPKNSRQVREFLGKAGYCRLFIPGFAELAAPLYPLTRPGTLFQWGTEQQLAFEDIKKALLSSPALGLPDITKPFELFIDENSGFAKGVLVQKLGPWKRPVAYLSKKLDTVASGWPPCLRMVAAIAILVKDAGKLTLGQPLTILTSHPVEALVRQPPNKWLSNARMTHYQAMLLDAERVHFGPTVSLNPATLLPLPSGGNHHDCLQILAETHGTRPDLTDQPLPDADLTWYTDGSSFIRNGEREAGAAVTTESEVIWAAPLPPGTSAQRAELIALTQALKMAEGKKLTVYTDSRYAFATTHVHGEIYRRRGWLTSEGKEIKNKNEILALLEALFLPKRLSIIHCPGHQKGDSPQAKGNRLADDTAKKAATETHSSLTVLPAGKRTADGSEFEKRTADGSEFESPKKKAKVE

SEQ ID NO: 1280 - protein, 2092 aa, synthetic construct
MPAAKRVKLDGGDKKYSIGLDIGTNSVGWAVITDEYKVPSKKFKVLGNTDRHSIKKNLIGALLFDSGETAEATRLKRTARRRYTRRKNRICYLQEIFSNEMAKVDDSFFHRLEESFLVEEDKKHERHPIFGNIVDEVAYHEKYPTIYHLRKKLVDSTDKADLRLIYLALAHMIKFRGHFLIEGDLNPDNSDVDKLFIQLVQTYNQLFEENPINASGVDAKAILSARLSKSRRLENLIAQLPGEKKNGLFGNLIALSLGLTPNFKSNFDLAEDAKLQLSKDTYDDDLDNLLAQIGDQYADLFLAAKNLSDAILLSDILRVNTEITKAPLSASMIKRYDEHHQDLTLLKALVRQQLPEKYKEIFFDQSKNGYAGYIDGGASQEEFYKFIKPILEKMDGTEELLVKLNREDLLRKQRTFDNGSIPHQIHLGELHAILRRQEDFYPFLKDNREKIEKILTFRIPYYVGPLARGNSRFAWMTRKSEETITPWNFEEVVDKGASAQSFIERMTNFDKNLPNEKVLPKHSLLYEYFTVYNELTKVKYVTEGMRKPAFLSGEQKKAIVDLLFKTNRKVTVKQLKEDYFKKIECFDSVEISGVEDRFNASLGTYHDLLKIIKDKDFLDNEENEDILEDIVLTLTLFEDREMIEERLKTYAHLFDDKVMKQLKRRRYTGWGRLSRKLINGIRDKQSGKTILDFLKSDGFANRNFMQLIHDDSLTFKEDIQKAQVSGQGDSLHEHIANLAGSPAIKKGILQTVKVVDELVKVMGRHKPENIVIEMARENQTTQKGQKNSRERMKRIEEGIKELGSQILKEHPVENTQLQNEKLYLYYLQNGRDMYVDQELDINRLSDYDVDHIVPQSFLKDDSIDNKVLTRSDKARGKSDNVPSEEVVKKMKNYWRQLLNAKLITQRKFDNLTKAERGGLSELDKAGFIKRQLVETRQITKHVAQILDSRMNTKYDENDKLIREVKVITLKSKLVSDFRKDFQFYKVREINNYHHAHDAYLNAVVGTALIKKYPKLESEFVYGDYKVYDVRKMIAKSEQEIGKATAKYFFYSNIMNFFKTEITLANGEIRKRPLIETNGETGEIVWDKGRDFATVRKVLSMPQVNIVKKTEVQTGGFSKESILPKRNSDKLIARKKDWDPKKYGGFDSPTVAYSVLVVAKVEKGKSKKLKSVKELLGITIMERSSFEKNPIDFLEAKGYKEVKKDLIIKLPKYSLFELENGRKRMLASAGELQKGNELALPSKYVNFLYLASHYEKLKGSPEDNEQKQLFVEQHKHYLDEIIEQISEFSKRVILADANLDKVLSAYNKHRDKPIREQAENIIHLFTLTNLGAPAAFKYFDTTIDRKRYTSTKEVLDATLIHQSITGLYETRIDLSQLGGDGGGGGEAAAKGGTLQLEEEYRLFEPESTQKQEMDIWLKNFPQAWAETGGMGTAHCQAPVLIQLKATATPISIRQYPMPHEAYQGIKPHIRRMLDQGILKPCQSPWNTPLLPVKKPGTEDYRPVQDLREVNKRVEDIHPTVPNPYNLLSTLPPSHPWYTVLDLKDAFFCLRLHSESQLLFAFEWRDPEIGLSGQLTWTRLPQGFKNSPTLFNEALHSDLADFRVRYPALVLLQYVDDLLLAAATRTECLEGTKALLETLGNKGYRASAKKAQICLQEVTYLGYSLKDGQRWLTKARKEAILSIPVPKNSRQVREFLGKAGYCRLFIPGFAELAAPLYPLTRPGTLFQWGTEQQLAFEDIKKALLSSPALGLPDITKPFELFIDENSGFAKGVLVQKLGPWKRPVAYLSKKLDTVASGWPPCLRMVAAIAILVKDAGKLTLGQPLTILTSHPVEALVRQPPNKWLSNARMTHYQAMLLDAERVHFGPTVSLNPATLLPLPSGGNHHDCLQILAETHGTRPDLTDQPLPDADLTWYTDGSSFIRNGEREAGAAVTTESEVIWAAPLPPGTSAQRAELIALTQALKMAEGKKLTVYTDSRYAFATTHVHGEIYRRRGWLTSEGKEIKNKNEILALLEALFLPKRLSIIHCPGHQKGDSPQAKGNRLADDTAKKAATETHSSLTVLPAGKRTADGSEFEKRTADGSEFESPKKKAKVE

SEQ ID NO: 1281 - protein, 2090 aa, synthetic construct
MPAAKRVKLDGGDKKYSIGLDIGTNSVGWAVITDEYKVPSKKFKVLGNTDRHSIKKNLIGALLFDSGETAEATRLKRTARRRYTRRKNRICYLQEIFSNEMAKVDDSFFHRLEESFLVEEDKKHERHPIFGNIVDEVAYHEKYPTIYHLRKKLVDSTDKADLRLIYLALAHMIKFRGHFLIEGDLNPDNSDVDKLFIQLVQTYNQLFEENPINASGVDAKAILSARLSKSRRLENLIAQLPGEKKNGLFGNLIALSLGLTPNFKSNFDLAEDAKLQLSKDTYDDDLDNLLAQIGDQYADLFLAAKNLSDAILLSDILRVNTEITKAPLSASMIKRYDEHHQDLTLLKALVRQQLPEKYKEIFFDQSKNGYAGYIDGGASQEEFYKFIKPILEKMDGTEELLVKLNREDLLRKQRTFDNGSIPHQIHLGELHAILRRQEDFYPFLKDNREKIEKILTFRIPYYVGPLARGNSRFAWMTRKSEETITPWNFEEVVDKGASAQSFIERMTNFDKNLPNEKVLPKHSLLYEYFTVYNELTKVKYVTEGMRKPAFLSGEQKKAIVDLLFKTNRKVTVKQLKEDYFKKIECFDSVEISGVEDRFNASLGTYHDLLKIIKDKDFLDNEENEDILEDIVLTLTLFEDREMIEERLKTYAHLFDDKVMKQLKRRRYTGWGRLSRKLINGIRDKQSGKTILDFLKSDGFANRNFMQLIHDDSLTFKEDIQKAQVSGQGDSLHEHIANLAGSPAIKKGILQTVKVVDELVKVMGRHKPENIVIEMARENQTTQKGQKNSRERMKRIEEGIKELGSQILKEHPVENTQLQNEKLYLYYLQNGRDMYVDQELDINRLSDYDVDHIVPQSFLKDDSIDNKVLTRSDKARGKSDNVPSEEVVKKMKNYWRQLLNAKLITQRKFDNLTKAERGGLSELDKAGFIKRQLVETRQITKHVAQILDSRMNTKYDENDKLIREVKVITLKSKLVSDFRKDFQFYKVREINNYHHAHDAYLNAVVGTALIKKYPKLESEFVYGDYKVYDVRKMIAKSEQEIGKATAKYFFYSNIMNFFKTEITLANGEIRKRPLIETNGETGEIVWDKGRDFATVRKVLSMPQVNIVKKTEVQTGGFSKESILPKRNSDKLIARKKDWDPKKYGGFDSPTVAYSVLVVAKVEKGKSKKLKSVKELLGITIMERSSFEKNPIDFLEAKGYKEVKKDLIIKLPKYSLFELENGRKRMLASAGELQKGNELALPSKYVNFLYLASHYEKLKGSPEDNEQKQLFVEQHKHYLDEIIEQISEFSKRVILADANLDKVLSAYNKHRDKPIREQAENIIHLFTLTNLGAPAAFKYFDTTIDRKRYTSTKEVLDATLIHQSITGLYETRIDLSQLGGDGGGGGGGSGGTLQLEEEYRLFEPESTQKQEMDIWLKNFPQAWAETGGMGTAHCQAPVLIQLKATATPISIRQYPMPHEAYQGIKPHIRRMLDQGILKPCQSPWNTPLLPVKKPGTEDYRPVQDLREVNKRVEDIHPTVPNPYNLLSTLPPSHPWYTVLDLKDAFFCLRLHSESQLLFAFEWRDPEIGLSGQLTWTRLPQGFKNSPTLFNEALHSDLADFRVRYPALVLLQYVDDLLLAAATRTECLEGTKALLETLGNKGYRASAKKAQICLQEVTYLGYSLKDGQRWLTKARKEAILSIPVPKNSRQVREFLGKAGYCRLFIPGFAELAAPLYPLTRPGTLFQWGTEQQLAFEDIKKALLSSPALGLPDITKPFELFIDENSGFAKGVLVQKLGPWKRPVAYLSKKLDTVASGWPPCLRMVAAIAILVKDAGKLTLGQPLTILTSHPVEALVRQPPNKWLSNARMTHYQAMLLDAERVHFGPTVSLNPATLLPLPSGGNHHDCLQILAETHGTRPDLTDQPLPDADLTWYTDGSSFIRNGEREAGAAVTTESEVIWAAPLPPGTSAQRAELIALTQALKMAEGKKLTVYTDSRYAFATTHVHGEIYRRRGWLTSEGKEIKNKNEILALLEALFLPKRLSIIHCPGHQKGDSPQAKGNRLADDTAKKAATETHSSLTVLPAGKRTADGSEFEKRTADGSEFESPKKKAKVE

SEQ ID NO: 1282 - protein, 2211 aa, synthetic construct
MPAAKRVKLDGGDKKYSIGLDIGTNSVGWAVITDEYKVPSKKFKVLGNTDRHSIKKNLIGALLFDSGETAEATRLKRTARRRYTRRKNRICYLQEIFSNEMAKVDDSFFHRLEESFLVEEDKKHERHPIFGNIVDEVAYHEKYPTIYHLRKKLVDSTDKADLRLIYLALAHMIKFRGHFLIEGDLNPDNSDVDKLFIQLVQTYNQLFEENPINASGVDAKAILSARLSKSRRLENLIAQLPGEKKNGLFGNLIALSLGLTPNFKSNFDLAEDAKLQLSKDTYDDDLDNLLAQIGDQYADLFLAAKNLSDAILLSDILRVNTEITKAPLSASMIKRYDEHHQDLTLLKALVRQQLPEKYKEIFFDQSKNGYAGYIDGGASQEEFYKFIKPILEKMDGTEELLVKLNREDLLRKQRTFDNGSIPHQIHLGELHAILRRQEDFYPFLKDNREKIEKILTFRIPYYVGPLARGNSRFAWMTRKSEETITPWNFEEVVDKGASAQSFIERMTNFDKNLPNEKVLPKHSLLYEYFTVYNELTKVKYVTEGMRKPAFLSGEQKKAIVDLLFKTNRKVTVKQLKEDYFKKIECFDSVEISGVEDRFNASLGTYHDLLKIIKDKDFLDNEENEDILEDIVLTLTLFEDREMIEERLKTYAHLFDDKVMKQLKRRRYTGWGRLSRKLINGIRDKQSGKTILDFLKSDGFANRNFMQLIHDDSLTFKEDIQKAQVSGQGDSLHEHIANLAGSPAIKKGILQTVKVVDELVKVMGRHKPENIVIEMARENQTTQKGQKNSRERMKRIEEGIKELGSQILKEHPVENTQLQNEKLYLYYLQNGRDMYVDQELDINRLSDYDVDHIVPQSFLKDDSIDNKVLTRSDKARGKSDNVPSEEVVKKMKNYWRQLLNAKLITQRKFDNLTKAERGGLSELDKAGFIKRQLVETRQITKHVAQILDSRMNTKYDENDKLIREVKVITLKSKLVSDFRKDFQFYKVREINNYHHAHDAYLNAVVGTALIKKYPKLESEFVYGDYKVYDVRKMIAKSEQEIGKATAKYFFYSNIMNFFKTEITLANGEIRKRPLIETNGETGEIVWDKGRDFATVRKVLSMPQVNIVKKTEVQTGGFSKESILPKRNSDKLIARKKDWDPKKYGGFDSPTVAYSVLVVAKVEKGKSKKLKSVKELLGITIMERSSFEKNPIDFLEAKGYKEVKKDLIIKLPKYSLFELENGRKRMLASAGELQKGNELALPSKYVNFLYLASHYEKLKGSPEDNEQKQLFVEQHKHYLDEIIEQISEFSKRVILADANLDKVLSAYNKHRDKPIREQAENIIHLFTLTNLGAPAAFKYFDTTIDRKRYTSTKEVLDATLIHQSITGLYETRIDLSQLGGDGGAEAAAKEAAAKEAAAKEAAAKALEAEAAAKEAAAKEAAAKEAAAKAGGMNPLQLLQPLPAEIKGTKLLAHWNSGATITCIPESFLEDEQPIKKTLIKTIHGEKQQNVYYVTFKVKGRKVEAEVIASPYEYILLSPTDVPWLTQQPLQLTILVPLQEYQEKILSKTALPEDQKQQLKTLFVKYDNLWQHWENQVGHRKIRPHNIATGDYPPRPQKQYPINPKAKPSIQIVIDDLLKQGVLTPQNSTMNTPVYPVPKPDGRWRMVLDYREVNKTIPLTAAQNQHSAGILATIVRQKYKTTLDLANGFWAHPITPESYWLTAFTWQGKQYCWTRLPQGFLNSPALFTADVVDLLKEIPNVQVYVDDIYLSHDDPKEHVQQLEKVFQILLQAGYVVSLKKSEIGQKTVEFLGFNITKEGRGLTDTFKTKLLNITPPKDLKQLQSILGLLNFARNFIPNFAELVQPLYNLIASAKGKYIEWSEENTKQLNMVIEALNTASNLEERLPEQRLVIKVNTSPSAGYVRYYNETGKKPIMYLNYVFSKAELKFSMLEKLLTTMHKALIKAMDLAMGQEILVYSPIVSMTKIQKTPLPERKALPIRWITWMTYLEDPRIQFHYDKTLPELKHIPDVYTSSQSPVKHPSQYEGVFYTDGSAIKSPDPTKSNNAGMGIVHATYKPEYQVLNQWSIPLGNHTAQMAEIAAVEFACKKALKIPGPVLVITDSFYVAESANKELPYWKSNGFVNNKKKPLKHISKWKSIAECLSMKPDITIQHEKGISLQIPVFILKGNALADKLATQGSYVVNAGKRTADGSEFEKRTADGSEFESPKKKAKVE

SEQ ID NO: 1283 - protein, 2190 aa, synthetic construct
MPAAKRVKLDGGDKKYSIGLDIGTNSVGWAVITDEYKVPSKKFKVLGNTDRHSIKKNLIGALLFDSGETAEATRLKRTARRRYTRRKNRICYLQEIFSNEMAKVDDSFFHRLEESFLVEEDKKHERHPIFGNIVDEVAYHEKYPTIYHLRKKLVDSTDKADLRLIYLALAHMIKFRGHFLIEGDLNPDNSDVDKLFIQLVQTYNQLFEENPINASGVDAKAILSARLSKSRRLENLIAQLPGEKKNGLFGNLIALSLGLTPNFKSNFDLAEDAKLQLSKDTYDDDLDNLLAQIGDQYADLFLAAKNLSDAILLSDILRVNTEITKAPLSASMIKRYDEHHQDLTLLKALVRQQLPEKYKEIFFDQSKNGYAGYIDGGASQEEFYKFIKPILEKMDGTEELLVKLNREDLLRKQRTFDNGSIPHQIHLGELHAILRRQEDFYPFLKDNREKIEKILTFRIPYYVGPLARGNSRFAWMTRKSEETITPWNFEEVVDKGASAQSFIERMTNFDKNLPNEKVLPKHSLLYEYFTVYNELTKVKYVTEGMRKPAFLSGEQKKAIVDLLFKTNRKVTVKQLKEDYFKKIECFDSVEISGVEDRFNASLGTYHDLLKIIKDKDFLDNEENEDILEDIVLTLTLFEDREMIEERLKTYAHLFDDKVMKQLKRRRYTGWGRLSRKLINGIRDKQSGKTILDFLKSDGFANRNFMQLIHDDSLTFKEDIQKAQVSGQGDSLHEHIANLAGSPAIKKGILQTVKVVDELVKVMGRHKPENIVIEMARENQTTQKGQKNSRERMKRIEEGIKELGSQILKEHPVENTQLQNEKLYLYYLQNGRDMYVDQELDINRLSDYDVDHIVPQSFLKDDSIDNKVLTRSDKARGKSDNVPSEEVVKKMKNYWRQLLNAKLITQRKFDNLTKAERGGLSELDKAGFIKRQLVETRQITKHVAQILDSRMNTKYDENDKLIREVKVITLKSKLVSDFRKDFQFYKVREINNYHHAHDAYLNAVVGTALIKKYPKLESEFVYGDYKVYDVRKMIAKSEQEIGKATAKYFFYSNIMNFFKTEITLANGEIRKRPLIETNGETGEIVWDKGRDFATVRKVLSMPQVNIVKKTEVQTGGFSKESILPKRNSDKLIARKKDWDPKKYGGFDSPTVAYSVLVVAKVEKGKSKKLKSVKELLGITIMERSSFEKNPIDFLEAKGYKEVKKDLIIKLPKYSLFELENGRKRMLASAGELQKGNELALPSKYVNFLYLASHYEKLKGSPEDNEQKQLFVEQHKHYLDEIIEQISEFSKRVILADANLDKVLSAYNKHRDKPIREQAENIIHLFTLTNLGAPAAFKYFDTTIDRKRYTSTKEVLDATLIHQSITGLYETRIDLSQLGGDGGEAAAKEAAAKEAAAKEAAAKEAAAKGGMNPLQLLQPLPAEIKGTKLLAHWNSGATITCIPESFLEDEQPIKKTLIKTIHGEKQQNVYYVTFKVKGRKVEAEVIASPYEYILLSPTDVPWLTQQPLQLTILVPLQEYQEKILSKTALPEDQKQQLKTLFVKYDNLWQHWENQVGHRKIRPHNIATGDYPPRPQKQYPINPKAKPSIQIVIDDLLKQGVLTPQNSTMNTPVYPVPKPDGRWRMVLDYREVNKTIPLTAAQNQHSAGILATIVRQKYKTTLDLANGFWAHPITPESYWLTAFTWQGKQYCWTRLPQGFLNSPALFTADVVDLLKEIPNVQVYVDDIYLSHDDPKEHVQQLEKVFQILLQAGYVVSLKKSEIGQKTVEFLGFNITKEGRGLTDTFKTKLLNITPPKDLKQLQSILGLLNFARNFIPNFAELVQPLYNLIASAKGKYIEWSEENTKQLNMVIEALNTASNLEERLPEQRLVIKVNTSPSAGYVRYYNETGKKPIMYLNYVFSKAELKFSMLEKLLTTMHKALIKAMDLAMGQEILVYSPIVSMTKIQKTPLPERKALPIRWITWMTYLEDPRIQFHYDKTLPELKHIPDVYTSSQSPVKHPSQYEGVFYTDGSAIKSPDPTKSNNAGMGIVHATYKPEYQVLNQWSIPLGNHTAQMAEIAAVEFACKKALKIPGPVLVITDSFYVAESANKELPYWKSNGFVNNKKKPLKHISKWKSIAECLSMKPDITIQHEKGISLQIPVFILKGNALADKLATQGSYVVNAGKRTADGSEFEKRTADGSEFESPKKKAKVE

SEQ ID NO: 1284 - protein, 2183 aa, synthetic construct
MPAAKRVKLDGGDKKYSIGLDIGTNSVGWAVITDEYKVPSKKFKVLGNTDRHSIKKNLIGALLFDSGETAEATRLKRTARRRYTRRKNRICYLQEIFSNEMAKVDDSFFHRLEESFLVEEDKKHERHPIFGNIVDEVAYHEKYPTIYHLRKKLVDSTDKADLRLIYLALAHMIKFRGHFLIEGDLNPDNSDVDKLFIQLVQTYNQLFEENPINASGVDAKAILSARLSKSRRLENLIAQLPGEKKNGLFGNLIALSLGLTPNFKSNFDLAEDAKLQLSKDTYDDDLDNLLAQIGDQYADLFLAAKNLSDAILLSDILRVNTEITKAPLSASMIKRYDEHHQDLTLLKALVRQQLPEKYKEIFFDQSKNGYAGYIDGGASQEEFYKFIKPILEKMDGTEELLVKLNREDLLRKQRTFDNGSIPHQIHLGELHAILRRQEDFYPFLKDNREKIEKILTFRIPYYVGPLARGNSRFAWMTRKSEETITPWNFEEVVDKGASAQSFIERMTNFDKNLPNEKVLPKHSLLYEYFTVYNELTKVKYVTEGMRKPAFLSGEQKKAIVDLLFKTNRKVTVKQLKEDYFKKIECFDSVEISGVEDRFNASLGTYHDLLKIIKDKDFLDNEENEDILEDIVLTLTLFEDREMIEERLKTYAHLFDDKVMKQLKRRRYTGWGRLSRKLINGIRDKQSGKTILDFLKSDGFANRNFMQLIHDDSLTFKEDIQKAQVSGQGDSLHEHIANLAGSPAIKKGILQTVKVVDELVKVMGRHKPENIVIEMARENQTTQKGQKNSRERMKRIEEGIKELGSQILKEHPVENTQLQNEKLYLYYLQNGRDMYVDQELDINRLSDYDVDHIVPQSFLKDDSIDNKVLTRSDKARGKSDNVPSEEVVKKMKNYWRQLLNAKLITQRKFDNLTKAERGGLSELDKAGFIKRQLVETRQITKHVAQILDSRMNTKYDENDKLIREVKVITLKSKLVSDFRKDFQFYKVREINNYHHAHDAYLNAVVGTALIKKYPKLESEFVYGDYKVYDVRKMIAKSEQEIGKATAKYFFYSNIMNFFKTEITLANGEIRKRPLIETNGETGEIVWDKGRDFATVRKVLSMPQVNIVKKTEVQTGGFSKESILPKRNSDKLIARKKDWDPKKYGGFDSPTVAYSVLVVAKVEKGKSKKLKSVKELLGITIMERSSFEKNPIDFLEAKGYKEVKKDLIIKLPKYSLFELENGRKRMLASAGELQKGNELALPSKYVNFLYLASHYEKLKGSPEDNEQKQLFVEQHKHYLDEIIEQISEFSKRVILADANLDKVLSAYNKHRDKPIREQAENIIHLFTLTNLGAPAAFKYFDTTIDRKRYTSTKEVLDATLIHQSITGLYETRIDLSQLGGDGGGSSGSSGSSGSSGSSGSSGGMNPLQLLQPLPAEIKGTKLLAHWNSGATITCIPESFLEDEQPIKKTLIKTIHGEKQQNVYYVTFKVKGRKVEAEVIASPYEYILLSPTDVPWLTQQPLQLTILVPLQEYQEKILSKTALPEDQKQQLKTLFVKYDNLWQHWENQVGHRKIRPHNIATGDYPPRPQKQYPINPKAKPSIQIVIDDLLKQGVLTPQNSTMNTPVYPVPKPDGRWRMVLDYREVNKTIPLTAAQNQHSAGILATIVRQKYKTTLDLANGFWAHPITPESYWLTAFTWQGKQYCWTRLPQGFLNSPALFTADVVDLLKEIPNVQVYVDDIYLSHDDPKEHVQQLEKVFQILLQAGYVVSLKKSEIGQKTVEFLGFNITKEGRGLTDTFKTKLLNITPPKDLKQLQSILGLLNFARNFIPNFAELVQPLYNLIASAKGKYIEWSEENTKQLNMVIEALNTASNLEERLPEQRLVIKVNTSPSAGYVRYYNETGKKPIMYLNYVFSKAELKFSMLEKLLTTMHKALIKAMDLAMGQEILVYSPIVSMTKIQKTPLPERKALPIRWITWMTYLEDPRIQFHYDKTLPELKHIPDVYTSSQSPVKHPSQYEGVFYTDGSAIKSPDPTKSNNAGMGIVHATYKPEYQVLNQWSIPLGNHTAQMAEIAAVEFACKKALKIPGPVLVITDSFYVAESANKELPYWKSNGFVNNKKKPLKHISKWKSIAECLSMKPDITIQHEKGISLQIPVFILKGNALADKLATQGSYVVNAGKRTADGSEFEKRTADGSEFESPKKKAKVE

SEQ ID NO: 1285 - protein, 2176 aa, synthetic construct
MPAAKRVKLDGGDKKYSIGLDIGTNSVGWAVITDEYKVPSKKFKVLGNTDRHSIKKNLIGALLFDSGETAEATRLKRTARRRYTRRKNRICYLQEIFSNEMAKVDDSFFHRLEESFLVEEDKKHERHPIFGNIVDEVAYHEKYPTIYHLRKKLVDSTDKADLRLIYLALAHMIKFRGHFLIEGDLNPDNSDVDKLFIQLVQTYNQLFEENPINASGVDAKAILSARLSKSRRLENLIAQLPGEKKNGLFGNLIALSLGLTPNFKSNFDLAEDAKLQLSKDTYDDDLDNLLAQIGDQYADLFLAAKNLSDAILLSDILRVNTEITKAPLSASMIKRYDEHHQDLTLLKALVRQQLPEKYKEIFFDQSKNGYAGYIDGGASQEEFYKFIKPILEKMDGTEELLVKLNREDLLRKQRTFDNGSIPHQIHLGELHAILRRQEDFYPFLKDNREKIEKILTFRIPYYVGPLARGNSRFAWMTRKSEETITPWNFEEVVDKGASAQSFIERMTNFDKNLPNEKVLPKHSLLYEYFTVYNELTKVKYVTEGMRKPAFLSGEQKKAIVDLLFKTNRKVTVKQLKEDYFKKIECFDSVEISGVEDRFNASLGTYHDLLKIIKDKDFLDNEENEDILEDIVLTLTLFEDREMIEERLKTYAHLFDDKVMKQLKRRRYTGWGRLSRKLINGIRDKQSGKTILDFLKSDGFANRNFMQLIHDDSLTFKEDIQKAQVSGQGDSLHEHIANLAGSPAIKKGILQTVKVVDELVKVMGRHKPENIVIEMARENQTTQKGQKNSRERMKRIEEGIKELGSQILKEHPVENTQLQNEKLYLYYLQNGRDMYVDQELDINRLSDYDVDHIVPQSFLKDDSIDNKVLTRSDKARGKSDNVPSEEVVKKMKNYWRQLLNAKLITQRKFDNLTKAERGGLSELDKAGFIKRQLVETRQITKHVAQILDSRMNTKYDENDKLIREVKVITLKSKLVSDFRKDFQFYKVREINNYHHAHDAYLNAVVGTALIKKYPKLESEFVYGDYKVYDVRKMIAKSEQEIGKATAKYFFYSNIMNFFKTEITLANGEIRKRPLIETNGETGEIVWDKGRDFATVRKVLSMPQVNIVKKTEVQTGGFSKESILPKRNSDKLIARKKDWDPKKYGGFDSPTVAYSVLVVAKVEKGKSKKLKSVKELLGITIMERSSFEKNPIDFLEAKGYKEVKKDLIIKLPKYSLFELENGRKRMLASAGELQKGNELALPSKYVNFLYLASHYEKLKGSPEDNEQKQLFVEQHKHYLDEIIEQISEFSKRVILADANLDKVLSAYNKHRDKPIREQAENIIHLFTLTNLGAPAAFKYFDTTIDRKRYTSTKEVLDATLIHQSITGLYETRIDLSQLGGDGGPAPAPAPAPAPGGMNPLQLLQPLPAEIKGTKLLAHWNSGATITCIPESFLEDEQPIKKTLIKTIHGEKQQNVYYVTFKVKGRKVEAEVIASPYEYILLSPTDVPWLTQQPLQLTILVPLQEYQEKILSKTALPEDQKQQLKTLFVKYDNLWQHWENQVGHRKIRPHNIATGDYPPRPQKQYPINPKAKPSIQIVIDDLLKQGVLTPQNSTMNTPVYPVPKPDGRWRMVLDYREVNKTIPLTAAQNQHSAGILATIVRQKYKTTLDLANGFWAHPITPESYWLTAFTWQGKQYCWTRLPQGFLNSPALFTADVVDLLKEIPNVQVYVDDIYLSHDDPKEHVQQLEKVFQILLQAGYVVSLKKSEIGQKTVEFLGFNITKEGRGLTDTFKTKLLNITPPKDLKQLQSILGLLNFARNFIPNFAELVQPLYNLIASAKGKYIEWSEENTKQLNMVIEALNTASNLEERLPEQRLVIKVNTSPSAGYVRYYNETGKKPIMYLNYVFSKAELKFSMLEKLLTTMHKALIKAMDLAMGQEILVYSPIVSMTKIQKTPLPERKALPIRWITWMTYLEDPRIQFHYDKTLPELKHIPDVYTSSQSPVKHPSQYEGVFYTDGSAIKSPDPTKSNNAGMGIVHATYKPEYQVLNQWSIPLGNHTAQMAEIAAVEFACKKALKIPGPVLVITDSFYVAESANKELPYWKSNGFVNNKKKPLKHISKWKSIAECLSMKPDITIQHEKGISLQIPVFILKGNALADKLATQGSYVVNAGKRTADGSEFEKRTADGSEFESPKKKAKVE

SEQ ID NO: 1286 - protein, 2176 aa, synthetic construct
MPAAKRVKLDGGDKKYSIGLDIGTNSVGWAVITDEYKVPSKKFKVLGNTDRHSIKKNLIGALLFDSGETAEATRLKRTARRRYTRRKNRICYLQEIFSNEMAKVDDSFFHRLEESFLVEEDKKHERHPIFGNIVDEVAYHEKYPTIYHLRKKLVDSTDKADLRLIYLALAHMIKFRGHFLIEGDLNPDNSDVDKLFIQLVQTYNQLFEENPINASGVDAKAILSARLSKSRRLENLIAQLPGEKKNGLFGNLIALSLGLTPNFKSNFDLAEDAKLQLSKDTYDDDLDNLLAQIGDQYADLFLAAKNLSDAILLSDILRVNTEITKAPLSASMIKRYDEHHQDLTLLKALVRQQLPEKYKEIFFDQSKNGYAGYIDGGASQEEFYKFIKPILEKMDGTEELLVKLNREDLLRKQRTFDNGSIPHQIHLGELHAILRRQEDFYPFLKDNREKIEKILTFRIPYYVGPLARGNSRFAWMTRKSEETITPWNFEEVVDKGASAQSFIERMTNFDKNLPNEKVLPKHSLLYEYFTVYNELTKVKYVTEGMRKPAFLSGEQKKAIVDLLFKTNRKVTVKQLKEDYFKKIECFDSVEISGVEDRFNASLGTYHDLLKIIKDKDFLDNEENEDILEDIVLTLTLFEDREMIEERLKTYAHLFDDKVMKQLKRRRYTGWGRLSRKLINGIRDKQSGKTILDFLKSDGFANRNFMQLIHDDSLTFKEDIQKAQVSGQGDSLHEHIANLAGSPAIKKGILQTVKVVDELVKVMGRHKPENIVIEMARENQTTQKGQKNSRERMKRIEEGIKELGSQILKEHPVENTQLQNEKLYLYYLQNGRDMYVDQELDINRLSDYDVDHIVPQSFLKDDSIDNKVLTRSDKARGKSDNVPSEEVVKKMKNYWRQLLNAKLITQRKFDNLTKAERGGLSELDKAGFIKRQLVETRQITKHVAQILDSRMNTKYDENDKLIREVKVITLKSKLVSDFRKDFQFYKVREINNYHHAHDAYLNAVVGTALIKKYPKLESEFVYGDYKVYDVRKMIAKSEQEIGKATAKYFFYSNIMNFFKTEITLANGEIRKRPLIETNGETGEIVWDKGRDFATVRKVLSMPQVNIVKKTEVQTGGFSKESILPKRNSDKLIARKKDWDPKKYGGFDSPTVAYSVLVVAKVEKGKSKKLKSVKELLGITIMERSSFEKNPIDFLEAKGYKEVKKDLIIKLPKYSLFELENGRKRMLASAGELQKGNELALPSKYVNFLYLASHYEKLKGSPEDNEQKQLFVEQHKHYLDEIIEQISEFSKRVILADANLDKVLSAYNKHRDKPIREQAENIIHLFTLTNLGAPAAFKYFDTTIDRKRYTSTKEVLDATLIHQSITGLYETRIDLSQLGGDGGGGSPAPEAAAKGGMNPLQLLQPLPAEIKGTKLLAHWNSGATITCIPESFLEDEQPIKKTLIKTIHGEKQQNVYYVTFKVKGRKVEAEVIASPYEYILLSPTDVPWLTQQPLQLTILVPLQEYQEKILSKTALPEDQKQQLKTLFVKYDNLWQHWENQVGHRKIRPHNIATGDYPPRPQKQYPINPKAKPSIQIVIDDLLKQGVLTPQNSTMNTPVYPVPKPDGRWRMVLDYREVNKTIPLTAAQNQHSAGILATIVRQKYKTTLDLANGFWAHPITPESYWLTAFTWQGKQYCWTRLPQGFLNSPALFTADVVDLLKEIPNVQVYVDDIYLSHDDPKEHVQQLEKVFQILLQAGYVVSLKKSEIGQKTVEFLGFNITKEGRGLTDTFKTKLLNITPPKDLKQLQSILGLLNFARNFIPNFAELVQPLYNLIASAKGKYIEWSEENTKQLNMVIEALNTASNLEERLPEQRLVIKVNTSPSAGYVRYYNETGKKPIMYLNYVFSKAELKFSMLEKLLTTMHKALIKAMDLAMGQEILVYSPIVSMTKIQKTPLPERKALPIRWITWMTYLEDPRIQFHYDKTLPELKHIPDVYTSSQSPVKHPSQYEGVFYTDGSAIKSPDPTKSNNAGMGIVHATYKPEYQVLNQWSIPLGNHTAQMAEIAAVEFACKKALKIPGPVLVITDSFYVAESANKELPYWKSNGFVNNKKKPLKHISKWKSIAECLSMKPDITIQHEKGISLQIPVFILKGNALADKLATQGSYVVNAGKRTADGSEFEKRTADGSEFESPKKKAKVE

SEQ ID NO: 1287 - protein, 2176 aa, synthetic construct
MPAAKRVKLDGGDKKYSIGLDIGTNSVGWAVITDEYKVPSKKFKVLGNTDRHSIKKNLIGALLFDSGETAEATRLKRTARRRYTRRKNRICYLQEIFSNEMAKVDDSFFHRLEESFLVEEDKKHERHPIFGNIVDEVAYHEKYPTIYHLRKKLVDSTDKADLRLIYLALAHMIKFRGHFLIEGDLNPDNSDVDKLFIQLVQTYNQLFEENPINASGVDAKAILSARLSKSRRLENLIAQLPGEKKNGLFGNLIALSLGLTPNFKSNFDLAEDAKLQLSKDTYDDDLDNLLAQIGDQYADLFLAAKNLSDAILLSDILRVNTEITKAPLSASMIKRYDEHHQDLTLLKALVRQQLPEKYKEIFFDQSKNGYAGYIDGGASQEEFYKFIKPILEKMDGTEELLVKLNREDLLRKQRTFDNGSIPHQIHLGELHAILRRQEDFYPFLKDNREKIEKILTFRIPYYVGPLARGNSRFAWMTRKSEETITPWNFEEVVDKGASAQSFIERMTNFDKNLPNEKVLPKHSLLYEYFTVYNELTKVKYVTEGMRKPAFLSGEQKKAIVDLLFKTNRKVTVKQLKEDYFKKIECFDSVEISGVEDRFNASLGTYHDLLKIIKDKDFLDNEENEDILEDIVLTLTLFEDREMIEERLKTYAHLFDDKVMKQLKRRRYTGWGRLSRKLINGIRDKQSGKTILDFLKSDGFANRNFMQLIHDDSLTFKEDIQKAQVSGQGDSLHEHIANLAGSPAIKKGILQTVKVVDELVKVMGRHKPENIVIEMARENQTTQKGQKNSRERMKRIEEGIKELGSQILKEHPVENTQLQNEKLYLYYLQNGRDMYVDQELDINRLSDYDVDHIVPQSFLKDDSIDNKVLTRSDKARGKSDNVPSEEVVKKMKNYWRQLLNAKLITQRKFDNLTKAERGGLSELDKAGFIKRQLVETRQITKHVAQILDSRMNTKYDENDKLIREVKVITLKSKLVSDFRKDFQFYKVREINNYHHAHDAYLNAVVGTALIKKYPKLESEFVYGDYKVYDVRKMIAKSEQEIGKATAKYFFYSNIMNFFKTEITLANGEIRKRPLIETNGETGEIVWDKGRDFATVRKVLSMPQVNIVKKTEVQTGGFSKESILPKRNSDKLIARKKDWDPKKYGGFDSPTVAYSVLVVAKVEKGKSKKLKSVKELLGITIMERSSFEKNPIDFLEAKGYKEVKKDLIIKLPKYSLFELENGRKRMLASAGELQKGNELALPSKYVNFLYLASHYEKLKGSPEDNEQKQLFVEQHKHYLDEIIEQISEFSKRVILADANLDKVLSAYNKHRDKPIREQAENIIHLFTLTNLGAPAAFKYFDTTIDRKRYTSTKEVLDATLIHQSITGLYETRIDLSQLGGDGGEAAAKGGSPAPGGMNPLQLLQPLPAEIKGTKLLAHWNSGATITCIPESFLEDEQPIKKTLIKTIHGEKQQNVYYVTFKVKGRKVEAEVIASPYEYILLSPTDVPWLTQQPLQLTILVPLQEYQEKILSKTALPEDQKQQLKTLFVKYDNLWQHWENQVGHRKIRPHNIATGDYPPRPQKQYPINPKAKPSIQIVIDDLLKQGVLTPQNSTMNTPVYPVPKPDGRWRMVLDYREVNKTIPLTAAQNQHSAGILATIVRQKYKTTLDLANGFWAHPITPESYWLTAFTWQGKQYCWTRLPQGFLNSPALFTADVVDLLKEIPNVQVYVDDIYLSHDDPKEHVQQLEKVFQILLQAGYVVSLKKSEIGQKTVEFLGFNITKEGRGLTDTFKTKLLNITPPKDLKQLQSILGLLNFARNFIPNFAELVQPLYNLIASAKGKYIEWSEENTKQLNMVIEALNTASNLEERLPEQRLVIKVNTSPSAGYVRYYNETGKKPIMYLNYVFSKAELKFSMLEKLLTTMHKALIKAMDLAMGQEILVYSPIVSMTKIQKTPLPERKALPIRWITWMTYLEDPRIQFHYDKTLPELKHIPDVYTSSQSPVKHPSQYEGVFYTDGSAIKSPDPTKSNNAGMGIVHATYKPEYQVLNQWSIPLGNHTAQMAEIAAVEFACKKALKIPGPVLVITDSFYVAESANKELPYWKSNGFVNNKKKPLKHISKWKSIAECLSMKPDITIQHEKGISLQIPVFILKGNALADKLATQGSYVVNAGKRTADGSEFEKRTADGSEFESPKKKAKVE

SEQ ID NO: 1288 - protein, 2180 aa, synthetic construct
MPAAKRVKLDGGDKKYSIGLDIGTNSVGWAVITDEYKVPSKKFKVLGNTDRHSIKKNLIGALLFDSGETAEATRLKRTARRRYTRRKNRICYLQEIFSNEMAKVDDSFFHRLEESFLVEEDKKHERHPIFGNIVDEVAYHEKYPTIYHLRKKLVDSTDKADLRLIYLALAHMIKFRGHFLIEGDLNPDNSDVDKLFIQLVQTYNQLFEENPINASGVDAKAILSARLSKSRRLENLIAQLPGEKKNGLFGNLIALSLGLTPNFKSNFDLAEDAKLQLSKDTYDDDLDNLLAQIGDQYADLFLAAKNLSDAILLSDILRVNTEITKAPLSASMIKRYDEHHQDLTLLKALVRQQLPEKYKEIFFDQSKNGYAGYIDGGASQEEFYKFIKPILEKMDGTEELLVKLNREDLLRKQRTFDNGSIPHQIHLGELHAILRRQEDFYPFLKDNREKIEKILTFRIPYYVGPLARGNSRFAWMTRKSEETITPWNFEEVVDKGASAQSFIERMTNFDKNLPNEKVLPKHSLLYEYFTVYNELTKVKYVTEGMRKPAFLSGEQKKAIVDLLFKTNRKVTVKQLKEDYFKKIECFDSVEISGVEDRFNASLGTYHDLLKIIKDKDFLDNEENEDILEDIVLTLTLFEDREMIEERLKTYAHLFDDKVMKQLKRRRYTGWGRLSRKLINGIRDKQSGKTILDFLKSDGFANRNFMQLIHDDSLTFKEDIQKAQVSGQGDSLHEHIANLAGSPAIKKGILQTVKVVDELVKVMGRHKPENIVIEMARENQTTQKGQKNSRERMKRIEEGIKELGSQILKEHPVENTQLQNEKLYLYYLQNGRDMYVDQELDINRLSDYDVDHIVPQSFLKDDSIDNKVLTRSDKARGKSDNVPSEEVVKKMKNYWRQLLNAKLITQRKFDNLTKAERGGLSELDKAGFIKRQLVETRQITKHVAQILDSRMNTKYDENDKLIREVKVITLKSKLVSDFRKDFQFYKVREINNYHHAHDAYLNAVVGTALIKKYPKLESEFVYGDYKVYDVRKMIAKSEQEIGKATAKYFFYSNIMNFFKTEITLANGEIRKRPLIETNGETGEIVWDKGRDFATVRKVLSMPQVNIVKKTEVQTGGFSKESILPKRNSDKLIARKKDWDPKKYGGFDSPTVAYSVLVVAKVEKGKSKKLKSVKELLGITIMERSSFEKNPIDFLEAKGYKEVKKDLIIKLPKYSLFELENGRKRMLASAGELQKGNELALPSKYVNFLYLASHYEKLKGSPEDNEQKQLFVEQHKHYLDEIIEQISEFSKRVILADANLDKVLSAYNKHRDKPIREQAENIIHLFTLTNLGAPAAFKYFDTTIDRKRYTSTKEVLDATLIHQSITGLYETRIDLSQLGGDGGEAAAKEAAAKEAAAKGGMNPLQLLQPLPAEIKGTKLLAHWNSGATITCIPESFLEDEQPIKKTLIKTIHGEKQQNVYYVTFKVKGRKVEAEVIASPYEYILLSPTDVPWLTQQPLQLTILVPLQEYQEKILSKTALPEDQKQQLKTLFVKYDNLWQHWENQVGHRKIRPHNIATGDYPPRPQKQYPINPKAKPSIQIVIDDLLKQGVLTPQNSTMNTPVYPVPKPDGRWRMVLDYREVNKTIPLTAAQNQHSAGILATIVRQKYKTTLDLANGFWAHPITPESYWLTAFTWQGKQYCWTRLPQGFLNSPALFTADVVDLLKEIPNVQVYVDDIYLSHDDPKEHVQQLEKVFQILLQAGYVVSLKKSEIGQKTVEFLGFNITKEGRGLTDTFKTKLLNITPPKDLKQLQSILGLLNFARNFIPNFAELVQPLYNLIASAKGKYIEWSEENTKQLNMVIEALNTASNLEERLPEQRLVIKVNTSPSAGYVRYYNETGKKPIMYLNYVFSKAELKFSMLEKLLTTMHKALIKAMDLAMGQEILVYSPIVSMTKIQKTPLPERKALPIRWITWMTYLEDPRIQFHYDKTLPELKHIPDVYTSSQSPVKHPSQYEGVFYTDGSAIKSPDPTKSNNAGMGIVHATYKPEYQVLNQWSIPLGNHTAQMAEIAAVEFACKKALKIPGPVLVITDSFYVAESANKELPYWKSNGFVNNKKKPLKHISKWKSIAECLSMKPDITIQHEKGISLQIPVFILKGNALADKLATQGSYVVNAGKRTADGSEFEKRTADGSEFESPKKKAKVE

SEQ ID NO: 1289 - protein, 2177 aa, synthetic construct
MPAAKRVKLDGGDKKYSIGLDIGTNSVGWAVITDEYKVPSKKFKVLGNTDRHSIKKNLIGALLFDSGETAEATRLKRTARRRYTRRKNRICYLQEIFSNEMAKVDDSFFHRLEESFLVEEDKKHERHPIFGNIVDEVAYHEKYPTIYHLRKKLVDSTDKADLRLIYLALAHMIKFRGHFLIEGDLNPDNSDVDKLFIQLVQTYNQLFEENPINASGVDAKAILSARLSKSRRLENLIAQLPGEKKNGLFGNLIALSLGLTPNFKSNFDLAEDAKLQLSKDTYDDDLDNLLAQIGDQYADLFLAAKNLSDAILLSDILRVNTEITKAPLSASMIKRYDEHHQDLTLLKALVRQQLPEKYKEIFFDQSKNGYAGYIDGGASQEEFYKFIKPILEKMDGTEELLVKLNREDLLRKQRTFDNGSIPHQIHLGELHAILRRQEDFYPFLKDNREKIEKILTFRIPYYVGPLARGNSRFAWMTRKSEETITPWNFEEVVDKGASAQSFIERMTNFDKNLPNEKVLPKHSLLYEYFTVYNELTKVKYVTEGMRKPAFLSGEQKKAIVDLLFKTNRKVTVKQLKEDYFKKIECFDSVEISGVEDRFNASLGTYHDLLKIIKDKDFLDNEENEDILEDIVLTLTLFEDREMIEERLKTYAHLFDDKVMKQLKRRRYTGWGRLSRKLINGIRDKQSGKTILDFLKSDGFANRNFMQLIHDDSLTFKEDIQKAQVSGQGDSLHEHIANLAGSPAIKKGILQTVKVVDELVKVMGRHKPENIVIEMARENQTTQKGQKNSRERMKRIEEGIKELGSQILKEHPVENTQLQNEKLYLYYLQNGRDMYVDQELDINRLSDYDVDHIVPQSFLKDDSIDNKVLTRSDKARGKSDNVPSEEVVKKMKNYWRQLLNAKLITQRKFDNLTKAERGGLSELDKAGFIKRQLVETRQITKHVAQILDSRMNTKYDENDKLIREVKVITLKSKLVSDFRKDFQFYKVREINNYHHAHDAYLNAVVGTALIKKYPKLESEFVYGDYKVYDVRKMIAKSEQEIGKATAKYFFYSNIMNFFKTEITLANGEIRKRPLIETNGETGEIVWDKGRDFATVRKVLSMPQVNIVKKTEVQTGGFSKESILPKRNSDKLIARKKDWDPKKYGGFDSPTVAYSVLVVAKVEKGKSKKLKSVKELLGITIMERSSFEKNPIDFLEAKGYKEVKKDLIIKLPKYSLFELENGRKRMLASAGELQKGNELALPSKYVNFLYLASHYEKLKGSPEDNEQKQLFVEQHKHYLDEIIEQISEFSKRVILADANLDKVLSAYNKHRDKPIREQAENIIHLFTLTNLGAPAAFKYFDTTIDRKRYTSTKEVLDATLIHQSITGLYETRIDLSQLGGDGGGGSGGSGGSGGSGGMNPLQLLQPLPAEIKGTKLLAHWNSGATITCIPESFLEDEQPIKKTLIKTIHGEKQQNVYYVTFKVKGRKVEAEVIASPYEYILLSPTDVPWLTQQPLQLTILVPLQEYQEKILSKTALPEDQKQQLKTLFVKYDNLWQHWENQVGHRKIRPHNIATGDYPPRPQKQYPINPKAKPSIQIVIDDLLKQGVLTPQNSTMNTPVYPVPKPDGRWRMVLDYREVNKTIPLTAAQNQHSAGILATIVRQKYKTTLDLANGFWAHPITPESYWLTAFTWQGKQYCWTRLPQGFLNSPALFTADVVDLLKEIPNVQVYVDDIYLSHDDPKEHVQQLEKVFQILLQAGYVVSLKKSEIGQKTVEFLGFNITKEGRGLTDTFKTKLLNITPPKDLKQLQSILGLLNFARNFIPNFAELVQPLYNLIASAKGKYIEWSEENTKQLNMVIEALNTASNLEERLPEQRLVIKVNTSPSAGYVRYYNETGKKPIMYLNYVFSKAELKFSMLEKLLTTMHKALIKAMDLAMGQEILVYSPIVSMTKIQKTPLPERKALPIRWITWMTYLEDPRIQFHYDKTLPELKHIPDVYTSSQSPVKHPSQYEGVFYTDGSAIKSPDPTKSNNAGMGIVHATYKPEYQVLNQWSIPLGNHTAQMAEIAAVEFACKKALKIPGPVLVITDSFYVAESANKELPYWKSNGFVNNKKKPLKHISKWKSIAECLSMKPDITIQHEKGISLQIPVFILKGNALADKLATQGSYVVNAGKRTADGSEFEKRTADGSEFESPKKKAKVE

SEQ ID NO: 1290 - protein, 2174 aa, synthetic construct
MPAAKRVKLDGGDKKYSIGLDIGTNSVGWAVITDEYKVPSKKFKVLGNTDRHSIKKNLIGALLFDSGETAEATRLKRTARRRYTRRKNRICYLQEIFSNEMAKVDDSFFHRLEESFLVEEDKKHERHPIFGNIVDEVAYHEKYPTIYHLRKKLVDSTDKADLRLIYLALAHMIKFRGHFLIEGDLNPDNSDVDKLFIQLVQTYNQLFEENPINASGVDAKAILSARLSKSRRLENLIAQLPGEKKNGLFGNLIALSLGLTPNFKSNFDLAEDAKLQLSKDTYDDDLDNLLAQIGDQYADLFLAAKNLSDAILLSDILRVNTEITKAPLSASMIKRYDEHHQDLTLLKALVRQQLPEKYKEIFFDQSKNGYAGYIDGGASQEEFYKFIKPILEKMDGTEELLVKLNREDLLRKQRTFDNGSIPHQIHLGELHAILRRQEDFYPFLKDNREKIEKILTFRIPYYVGPLARGNSRFAWMTRKSEETITPWNFEEVVDKGASAQSFIERMTNFDKNLPNEKVLPKHSLLYEYFTVYNELTKVKYVTEGMRKPAFLSGEQKKAIVDLLFKTNRKVTVKQLKEDYFKKIECFDSVEISGVEDRFNASLGTYHDLLKIIKDKDFLDNEENEDILEDIVLTLTLFEDREMIEERLKTYAHLFDDKVMKQLKRRRYTGWGRLSRKLINGIRDKQSGKTILDFLKSDGFANRNFMQLIHDDSLTFKEDIQKAQVSGQGDSLHEHIANLAGSPAIKKGILQTVKVVDELVKVMGRHKPENIVIEMARENQTTQKGQKNSRERMKRIEEGIKELGSQILKEHPVENTQLQNEKLYLYYLQNGRDMYVDQELDINRLSDYDVDHIVPQSFLKDDSIDNKVLTRSDKARGKSDNVPSEEVVKKMKNYWRQLLNAKLITQRKFDNLTKAERGGLSELDKAGFIKRQLVETRQITKHVAQILDSRMNTKYDENDKLIREVKVITLKSKLVSDFRKDFQFYKVREINNYHHAHDAYLNAVVGTALIKKYPKLESEFVYGDYKVYDVRKMIAKSEQEIGKATAKYFFYSNIMNFFKTEITLANGEIRKRPLIETNGETGEIVWDKGRDFATVRKVLSMPQVNIVKKTEVQTGGFSKESILPKRNSDKLIARKKDWDPKKYGGFDSPTVAYSVLVVAKVEKGKSKKLKSVKELLGITIMERSSFEKNPIDFLEAKGYKEVKKDLIIKLPKYSLFELENGRKRMLASAGELQKGNELALPSKYVNFLYLASHYEKLKGSPEDNEQKQLFVEQHKHYLDEIIEQISEFSKRVILADANLDKVLSAYNKHRDKPIREQAENIIHLFTLTNLGAPAAFKYFDTTIDRKRYTSTKEVLDATLIHQSITGLYETRIDLSQLGGDGGGGSGGGPAPGGMNPLQLLQPLPAEIKGTKLLAHWNSGATITCIPESFLEDEQPIKKTLIKTIHGEKQQNVYYVTFKVKGRKVEAEVIASPYEYILLSPTDVPWLTQQPLQLTILVPLQEYQEKILSKTALPEDQKQQLKTLFVKYDNLWQHWENQVGHRKIRPHNIATGDYPPRPQKQYPINPKAKPSIQIVIDDLLKQGVLTPQNSTMNTPVYPVPKPDGRWRMVLDYREVNKTIPLTAAQNQHSAGILATIVRQKYKTTLDLANGFWAHPITPESYWLTAFTWQGKQYCWTRLPQGFLNSPALFTADVVDLLKEIPNVQVYVDDIYLSHDDPKEHVQQLEKVFQILLQAGYVVSLKKSEIGQKTVEFLGFNITKEGRGLTDTFKTKLLNITPPKDLKQLQSILGLLNFARNFIPNFAELVQPLYNLIASAKGKYIEWSEENTKQLNMVIEALNTASNLEERLPEQRLVIKVNTSPSAGYVRYYNETGKKPIMYLNYVFSKAELKFSMLEKLLTTMHKALIKAMDLAMGQEILVYSPIVSMTKIQKTPLPERKALPIRWITWMTYLEDPRIQFHYDKTLPELKHIPDVYTSSQSPVKHPSQYEGVFYTDGSAIKSPDPTKSNNAGMGIVHATYKPEYQVLNQWSIPLGNHTAQMAEIAAVEFACKKALKIPGPVLVITDSFYVAESANKELPYWKSNGFVNNKKKPLKHISKWKSIAECLSMKPDITIQHEKGISLQIPVFILKGNALADKLATQGSYVVNAGKRTADGSEFEKRTADGSEFESPKKKAKVE

SEQ ID NO: 1291 - protein, 2176 aa, synthetic construct
MPAAKRVKLDGGDKKYSIGLDIGTNSVGWAVITDEYKVPSKKFKVLGNTDRHSIKKNLIGALLFDSGETAEATRLKRTARRRYTRRKNRICYLQEIFSNEMAKVDDSFFHRLEESFLVEEDKKHERHPIFGNIVDEVAYHEKYPTIYHLRKKLVDSTDKADLRLIYLALAHMIKFRGHFLIEGDLNPDNSDVDKLFIQLVQTYNQLFEENPINASGVDAKAILSARLSKSRRLENLIAQLPGEKKNGLFGNLIALSLGLTPNFKSNFDLAEDAKLQLSKDTYDDDLDNLLAQIGDQYADLFLAAKNLSDAILLSDILRVNTEITKAPLSASMIKRYDEHHQDLTLLKALVRQQLPEKYKEIFFDQSKNGYAGYIDGGASQEEFYKFIKPILEKMDGTEELLVKLNREDLLRKQRTFDNGSIPHQIHLGELHAILRRQEDFYPFLKDNREKIEKILTFRIPYYVGPLARGNSRFAWMTRKSEETITPWNFEEVVDKGASAQSFIERMTNFDKNLPNEKVLPKHSLLYEYFTVYNELTKVKYVTEGMRKPAFLSGEQKKAIVDLLFKTNRKVTVKQLKEDYFKKIECFDSVEISGVEDRFNASLGTYHDLLKIIKDKDFLDNEENEDILEDIVLTLTLFEDREMIEERLKTYAHLFDDKVMKQLKRRRYTGWGRLSRKLINGIRDKQSGKTILDFLKSDGFANRNFMQLIHDDSLTFKEDIQKAQVSGQGDSLHEHIANLAGSPAIKKGILQTVKVVDELVKVMGRHKPENIVIEMARENQTTQKGQKNSRERMKRIEEGIKELGSQILKEHPVENTQLQNEKLYLYYLQNGRDMYVDQELDINRLSDYDVDHIVPQSFLKDDSIDNKVLTRSDKARGKSDNVPSEEVVKKMKNYWRQLLNAKLITQRKFDNLTKAERGGLSELDKAGFIKRQLVETRQITKHVAQILDSRMNTKYDENDKLIREVKVITLKSKLVSDFRKDFQFYKVREINNYHHAHDAYLNAVVGTALIKKYPKLESEFVYGDYKVYDVRKMIAKSEQEIGKATAKYFFYSNIMNFFKTEITLANGEIRKRPLIETNGETGEIVWDKGRDFATVRKVLSMPQVNIVKKTEVQTGGFSKESILPKRNSDKLIARKKDWDPKKYGGFDSPTVAYSVLVVAKVEKGKSKKLKSVKELLGITIMERSSFEKNPIDFLEAKGYKEVKKDLIIKLPKYSLFELENGRKRMLASAGELQKGNELALPSKYVNFLYLASHYEKLKGSPEDNEQKQLFVEQHKHYLDEIIEQISEFSKRVILADANLDKVLSAYNKHRDKPIREQAENIIHLFTLTNLGAPAAFKYFDTTIDRKRYTSTKEVLDATLIHQSITGLYETRIDLSQLGGDGGPAPGGSEAAAKGGMNPLQLLQPLPAEIKGTKLLAHWNSGATITCIPESFLEDEQPIKKTLIKTIHGEKQQNVYYVTFKVKGRKVEAEVIASPYEYILLSPTDVPWLTQQPLQLTILVPLQEYQEKILSKTALPEDQKQQLKTLFVKYDNLWQHWENQVGHRKIRPHNIATGDYPPRPQKQYPINPKAKPSIQIVIDDLLKQGVLTPQNSTMNTPVYPVPKPDGRWRMVLDYREVNKTIPLTAAQNQHSAGILATIVRQKYKTTLDLANGFWAHPITPESYWLTAFTWQGKQYCWTRLPQGFLNSPALFTADVVDLLKEIPNVQVYVDDIYLSHDDPKEHVQQLEKVFQILLQAGYVVSLKKSEIGQKTVEFLGFNITKEGRGLTDTFKTKLLNITPPKDLKQLQSILGLLNFARNFIPNFAELVQPLYNLIASAKGKYIEWSEENTKQLNMVIEALNTASNLEERLPEQRLVIKVNTSPSAGYVRYYNETGKKPIMYLNYVFSKAELKFSMLEKLLTTMHKALIKAMDLAMGQEILVYSPIVSMTKIQKTPLPERKALPIRWITWMTYLEDPRIQFHYDKTLPELKHIPDVYTSSQSPVKHPSQYEGVFYTDGSAIKSPDPTKSNNAGMGIVHATYKPEYQVLNQWSIPLGNHTAQMAEIAAVEFACKKALKIPGPVLVITDSFYVAESANKELPYWKSNGFVNNKKKPLKHISKWKSIAECLSMKPDITIQHEKGISLQIPVFILKGNALADKLATQGSYVVNAGKRTADGSEFEKRTADGSEFESPKKKAKVE

SEQ ID NO: 1292 - protein, 2173 aa, synthetic construct
MPAAKRVKLDGGDKKYSIGLDIGTNSVGWAVITDEYKVPSKKFKVLGNTDRHSIKKNLIGALLFDSGETAEATRLKRTARRRYTRRKNRICYLQEIFSNEMAKVDDSFFHRLEESFLVEEDKKHERHPIFGNIVDEVAYHEKYPTIYHLRKKLVDSTDKADLRLIYLALAHMIKFRGHFLIEGDLNPDNSDVDKLFIQLVQTYNQLFEENPINASGVDAKAILSARLSKSRRLENLIAQLPGEKKNGLFGNLIALSLGLTPNFKSNFDLAEDAKLQLSKDTYDDDLDNLLAQIGDQYADLFLAAKNLSDAILLSDILRVNTEITKAPLSASMIKRYDEHHQDLTLLKALVRQQLPEKYKEIFFDQSKNGYAGYIDGGASQEEFYKFIKPILEKMDGTEELLVKLNREDLLRKQRTFDNGSIPHQIHLGELHAILRRQEDFYPFLKDNREKIEKILTFRIPYYVGPLARGNSRFAWMTRKSEETITPWNFEEVVDKGASAQSFIERMTNFDKNLPNEKVLPKHSLLYEYFTVYNELTKVKYVTEGMRKPAFLSGEQKKAIVDLLFKTNRKVTVKQLKEDYFKKIECFDSVEISGVEDRFNASLGTYHDLLKIIKDKDFLDNEENEDILEDIVLTLTLFEDREMIEERLKTYAHLFDDKVMKQLKRRRYTGWGRLSRKLINGIRDKQSGKTILDFLKSDGFANRNFMQLIHDDSLTFKEDIQKAQVSGQGDSLHEHIANLAGSPAIKKGILQTVKVVDELVKVMGRHKPENIVIEMARENQTTQKGQKNSRERMKRIEEGIKELGSQILKEHPVENTQLQNEKLYLYYLQNGRDMYVDQELDINRLSDYDVDHIVPQSFLKDDSIDNKVLTRSDKARGKSDNVPSEEVVKKMKNYWRQLLNAKLITQRKFDNLTKAERGGLSELDKAGFIKRQLVETRQITKHVAQILDSRMNTKYDENDKLIREVKVITLKSKLVSDFRKDFQFYKVREINNYHHAHDAYLNAVVGTALIKKYPKLESEFVYGDYKVYDVRKMIAKSEQEIGKATAKYFFYSNIMNFFKTEITLANGEIRKRPLIETNGETGEIVWDKGRDFATVRKVLSMPQVNIVKKTEVQTGGFSKESILPKRNSDKLIARKKDWDPKKYGGFDSPTVAYSVLVVAKVEKGKSKKLKSVKELLGITIMERSSFEKNPIDFLEAKGYKEVKKDLIIKLPKYSLFELENGRKRMLASAGELQKGNELALPSKYVNFLYLASHYEKLKGSPEDNEQKQLFVEQHKHYLDEIIEQISEFSKRVILADANLDKVLSAYNKHRDKPIREQAENIIHLFTLTNLGAPAAFKYFDTTIDRKRYTSTKEVLDATLIHQSITGLYETRIDLSQLGGDGGGSSEAAAKGGMNPLQLLQPLPAEIKGTKLLAHWNSGATITCIPESFLEDEQPIKKTLIKTIHGEKQQNVYYVTFKVKGRKVEAEVIASPYEYILLSPTDVPWLTQQPLQLTILVPLQEYQEKILSKTALPEDQKQQLKTLFVKYDNLWQHWENQVGHRKIRPHNIATGDYPPRPQKQYPINPKAKPSIQIVIDDLLKQGVLTPQNSTMNTPVYPVPKPDGRWRMVLDYREVNKTIPLTAAQNQHSAGILATIVRQKYKTTLDLANGFWAHPITPESYWLTAFTWQGKQYCWTRLPQGFLNSPALFTADVVDLLKEIPNVQVYVDDIYLSHDDPKEHVQQLEKVFQILLQAGYVVSLKKSEIGQKTVEFLGFNITKEGRGLTDTFKTKLLNITPPKDLKQLQSILGLLNFARNFIPNFAELVQPLYNLIASAKGKYIEWSEENTKQLNMVIEALNTASNLEERLPEQRLVIKVNTSPSAGYVRYYNETGKKPIMYLNYVFSKAELKFSMLEKLLTTMHKALIKAMDLAMGQEILVYSPIVSMTKIQKTPLPERKALPIRWITWMTYLEDPRIQFHYDKTLPELKHIPDVYTSSQSPVKHPSQYEGVFYTDGSAIKSPDPTKSNNAGMGIVHATYKPEYQVLNQWSIPLGNHTAQMAEIAAVEFACKKALKIPGPVLVITDSFYVAESANKELPYWKSNGFVNNKKKPLKHISKWKSIAECLSMKPDITIQHEKGISLQIPVFILKGNALADKLATQGSYVVNAGKRTADGSEFEKRTADGSEFESPKKKAKVE

SEQ ID NO: 1293 - protein, 2176 aa, synthetic construct
MPAAKRVKLDGGDKKYSIGLDIGTNSVGWAVITDEYKVPSKKFKVLGNTDRHSIKKNLIGALLFDSGETAEATRLKRTARRRYTRRKNRICYLQEIFSNEMAKVDDSFFHRLEESFLVEEDKKHERHPIFGNIVDEVAYHEKYPTIYHLRKKLVDSTDKADLRLIYLALAHMIKFRGHFLIEGDLNPDNSDVDKLFIQLVQTYNQLFEENPINASGVDAKAILSARLSKSRRLENLIAQLPGEKKNGLFGNLIALSLGLTPNFKSNFDLAEDAKLQLSKDTYDDDLDNLLAQIGDQYADLFLAAKNLSDAILLSDILRVNTEITKAPLSASMIKRYDEHHQDLTLLKALVRQQLPEKYKEIFFDQSKNGYAGYIDGGASQEEFYKFIKPILEKMDGTEELLVKLNREDLLRKQRTFDNGSIPHQIHLGELHAILRRQEDFYPFLKDNREKIEKILTFRIPYYVGPLARGNSRFAWMTRKSEETITPWNFEEVVDKGASAQSFIERMTNFDKNLPNEKVLPKHSLLYEYFTVYNELTKVKYVTEGMRKPAFLSGEQKKAIVDLLFKTNRKVTVKQLKEDYFKKIECFDSVEISGVEDRFNASLGTYHDLLKIIKDKDFLDNEENEDILEDIVLTLTLFEDREMIEERLKTYAHLFDDKVMKQLKRRRYTGWGRLSRKLINGIRDKQSGKTILDFLKSDGFANRNFMQLIHDDSLTFKEDIQKAQVSGQGDSLHEHIANLAGSPAIKKGILQTVKVVDELVKVMGRHKPENIVIEMARENQTTQKGQKNSRERMKRIEEGIKELGSQILKEHPVENTQLQNEKLYLYYLQNGRDMYVDQELDINRLSDYDVDHIVPQSFLKDDSIDNKVLTRSDKARGKSDNVPSEEVVKKMKNYWRQLLNAKLITQRKFDNLTKAERGGLSELDKAGFIKRQLVETRQITKHVAQILDSRMNTKYDENDKLIREVKVITLKSKLVSDFRKDFQFYKVREINNYHHAHDAYLNAVVGTALIKKYPKLESEFVYGDYKVYDVRKMIAKSEQEIGKATAKYFFYSNIMNFFKTEITLANGEIRKRPLIETNGETGEIVWDKGRDFATVRKVLSMPQVNIVKKTEVQTGGFSKESILPKRNSDKLIARKKDWDPKKYGGFDSPTVAYSVLVVAKVEKGKSKKLKSVKELLGITIMERSSFEKNPIDFLEAKGYKEVKKDLIIKLPKYSLFELENGRKRMLASAGELQKGNELALPSKYVNFLYLASHYEKLKGSPEDNEQKQLFVEQHKHYLDEIIEQISEFSKRVILADANLDKVLSAYNKHRDKPIREQAENIIHLFTLTNLGAPAAFKYFDTTIDRKRYTSTKEVLDATLIHQSITGLYETRIDLSQLGGDGGGGSGSSEAAAKGGMNPLQLLQPLPAEIKGTKLLAHWNSGATITCIPESFLEDEQPIKKTLIKTIHGEKQQNVYYVTFKVKGRKVEAEVIASPYEYILLSPTDVPWLTQQPLQLTILVPLQEYQEKILSKTALPEDQKQQLKTLFVKYDNLWQHWENQVGHRKIRPHNIATGDYPPRPQKQYPINPKAKPSIQIVIDDLLKQGVLTPQNSTMNTPVYPVPKPDGRWRMVLDYREVNKTIPLTAAQNQHSAGILATIVRQKYKTTLDLANGFWAHPITPESYWLTAFTWQGKQYCWTRLPQGFLNSPALFTADVVDLLKEIPNVQVYVDDIYLSHDDPKEHVQQLEKVFQILLQAGYVVSLKKSEIGQKTVEFLGFNITKEGRGLTDTFKTKLLNITPPKDLKQLQSILGLLNFARNFIPNFAELVQPLYNLIASAKGKYIEWSEENTKQLNMVIEALNTASNLEERLPEQRLVIKVNTSPSAGYVRYYNETGKKPIMYLNYVFSKAELKFSMLEKLLTTMHKALIKAMDLAMGQEILVYSPIVSMTKIQKTPLPERKALPIRWITWMTYLEDPRIQFHYDKTLPELKHIPDVYTSSQSPVKHPSQYEGVFYTDGSAIKSPDPTKSNNAGMGIVHATYKPEYQVLNQWSIPLGNHTAQMAEIAAVEFACKKALKIPGPVLVITDSFYVAESANKELPYWKSNGFVNNKKKPLKHISKWKSIAECLSMKPDITIQHEKGISLQIPVFILKGNALADKLATQGSYVVNAGKRTADGSEFEKRTADGSEFESPKKKAKVE

SEQ ID NO: 1294 - protein, 2171 aa, synthetic construct
MPAAKRVKLDGGDKKYSIGLDIGTNSVGWAVITDEYKVPSKKFKVLGNTDRHSIKKNLIGALLFDSGETAEATRLKRTARRRYTRRKNRICYLQEIFSNEMAKVDDSFFHRLEESFLVEEDKKHERHPIFGNIVDEVAYHEKYPTIYHLRKKLVDSTDKADLRLIYLALAHMIKFRGHFLIEGDLNPDNSDVDKLFIQLVQTYNQLFEENPINASGVDAKAILSARLSKSRRLENLIAQLPGEKKNGLFGNLIALSLGLTPNFKSNFDLAEDAKLQLSKDTYDDDLDNLLAQIGDQYADLFLAAKNLSDAILLSDILRVNTEITKAPLSASMIKRYDEHHQDLTLLKALVRQQLPEKYKEIFFDQSKNGYAGYIDGGASQEEFYKFIKPILEKMDGTEELLVKLNREDLLRKQRTFDNGSIPHQIHLGELHAILRRQEDFYPFLKDNREKIEKILTFRIPYYVGPLARGNSRFAWMTRKSEETITPWNFEEVVDKGASAQSFIERMTNFDKNLPNEKVLPKHSLLYEYFTVYNELTKVKYVTEGMRKPAFLSGEQKKAIVDLLFKTNRKVTVKQLKEDYFKKIECFDSVEISGVEDRFNASLGTYHDLLKIIKDKDFLDNEENEDILEDIVLTLTLFEDREMIEERLKTYAHLFDDKVMKQLKRRRYTGWGRLSRKLINGIRDKQSGKTILDFLKSDGFANRNFMQLIHDDSLTFKEDIQKAQVSGQGDSLHEHIANLAGSPAIKKGILQTVKVVDELVKVMGRHKPENIVIEMARENQTTQKGQKNSRERMKRIEEGIKELGSQILKEHPVENTQLQNEKLYLYYLQNGRDMYVDQELDINRLSDYDVDHIVPQSFLKDDSIDNKVLTRSDKARGKSDNVPSEEVVKKMKNYWRQLLNAKLITQRKFDNLTKAERGGLSELDKAGFIKRQLVETRQITKHVAQILDSRMNTKYDENDKLIREVKVITLKSKLVSDFRKDFQFYKVREINNYHHAHDAYLNAVVGTALIKKYPKLESEFVYGDYKVYDVRKMIAKSEQEIGKATAKYFFYSNIMNFFKTEITLANGEIRKRPLIETNGETGEIVWDKGRDFATVRKVLSMPQVNIVKKTEVQTGGFSKESILPKRNSDKLIARKKDWDPKKYGGFDSPTVAYSVLVVAKVEKGKSKKLKSVKELLGITIMERSSFEKNPIDFLEAKGYKEVKKDLIIKLPKYSLFELENGRKRMLASAGELQKGNELALPSKYVNFLYLASHYEKLKGSPEDNEQKQLFVEQHKHYLDEIIEQISEFSKRVILADANLDKVLSAYNKHRDKPIREQAENIIHLFTLTNLGAPAAFKYFDTTIDRKRYTSTKEVLDATLIHQSITGLYETRIDLSQLGGDGGGGSGGSGGMNPLQLLQPLPAEIKGTKLLAHWNSGATITCIPESFLEDEQPIKKTLIKTIHGEKQQNVYYVTFKVKGRKVEAEVIASPYEYILLSPTDVPWLTQQPLQLTILVPLQEYQEKILSKTALPEDQKQQLKTLFVKYDNLWQHWENQVGHRKIRPHNIATGDYPPRPQKQYPINPKAKPSIQIVIDDLLKQGVLTPQNSTMNTPVYPVPKPDGRWRMVLDYREVNKTIPLTAAQNQHSAGILATIVRQKYKTTLDLANGFWAHPITPESYWLTAFTWQGKQYCWTRLPQGFLNSPALFTADVVDLLKEIPNVQVYVDDIYLSHDDPKEHVQQLEKVFQILLQAGYVVSLKKSEIGQKTVEFLGFNITKEGRGLTDTFKTKLLNITPPKDLKQLQSILGLLNFARNFIPNFAELVQPLYNLIASAKGKYIEWSEENTKQLNMVIEALNTASNLEERLPEQRLVIKVNTSPSAGYVRYYNETGKKPIMYLNYVFSKAELKFSMLEKLLTTMHKALIKAMDLAMGQEILVYSPIVSMTKIQKTPLPERKALPIRWITWMTYLEDPRIQFHYDKTLPELKHIPDVYTSSQSPVKHPSQYEGVFYTDGSAIKSPDPTKSNNAGMGIVHATYKPEYQVLNQWSIPLGNHTAQMAEIAAVEFACKKALKIPGPVLVITDSFYVAESANKELPYWKSNGFVNNKKKPLKHISKWKSIAECLSMKPDITIQHEKGISLQIPVFILKGNALADKLATQGSYVVNAGKRTADGSEFEKRTADGSEFESPKKKAKVE

SEQ ID NO: 1295 - protein, 2084 aa, synthetic construct
MPAAKRVKLDGGDKKYSIGLDIGTNSVGWAVITDEYKVPSKKFKVLGNTDRHSIKKNLIGALLFDSGETAEATRLKRTARRRYTRRKNRICYLQEIFSNEMAKVDDSFFHRLEESFLVEEDKKHERHPIFGNIVDEVAYHEKYPTIYHLRKKLVDSTDKADLRLIYLALAHMIKFRGHFLIEGDLNPDNSDVDKLFIQLVQTYNQLFEENPINASGVDAKAILSARLSKSRRLENLIAQLPGEKKNGLFGNLIALSLGLTPNFKSNFDLAEDAKLQLSKDTYDDDLDNLLAQIGDQYADLFLAAKNLSDAILLSDILRVNTEITKAPLSASMIKRYDEHHQDLTLLKALVRQQLPEKYKEIFFDQSKNGYAGYIDGGASQEEFYKFIKPILEKMDGTEELLVKLNREDLLRKQRTFDNGSIPHQIHLGELHAILRRQEDFYPFLKDNREKIEKILTFRIPYYVGPLARGNSRFAWMTRKSEETITPWNFEEVVDKGASAQSFIERMTNFDKNLPNEKVLPKHSLLYEYFTVYNELTKVKYVTEGMRKPAFLSGEQKKAIVDLLFKTNRKVTVKQLKEDYFKKIECFDSVEISGVEDRFNASLGTYHDLLKIIKDKDFLDNEENEDILEDIVLTLTLFEDREMIEERLKTYAHLFDDKVMKQLKRRRYTGWGRLSRKLINGIRDKQSGKTILDFLKSDGFANRNFMQLIHDDSLTFKEDIQKAQVSGQGDSLHEHIANLAGSPAIKKGILQTVKVVDELVKVMGRHKPENIVIEMARENQTTQKGQKNSRERMKRIEEGIKELGSQILKEHPVENTQLQNEKLYLYYLQNGRDMYVDQELDINRLSDYDVDHIVPQSFLKDDSIDNKVLTRSDKARGKSDNVPSEEVVKKMKNYWRQLLNAKLITQRKFDNLTKAERGGLSELDKAGFIKRQLVETRQITKHVAQILDSRMNTKYDENDKLIREVKVITLKSKLVSDFRKDFQFYKVREINNYHHAHDAYLNAVVGTALIKKYPKLESEFVYGDYKVYDVRKMIAKSEQEIGKATAKYFFYSNIMNFFKTEITLANGEIRKRPLIETNGETGEIVWDKGRDFATVRKVLSMPQVNIVKKTEVQTGGFSKESILPKRNSDKLIARKKDWDPKKYGGFDSPTVAYSVLVVAKVEKGKSKKLKSVKELLGITIMERSSFEKNPIDFLEAKGYKEVKKDLIIKLPKYSLFELENGRKRMLASAGELQKGNELALPSKYVNFLYLASHYEKLKGSPEDNEQKQLFVEQHKHYLDEIIEQISEFSKRVILADANLDKVLSAYNKHRDKPIREQAENIIHLFTLTNLGAPAAFKYFDTTIDRKRYTSTKEVLDATLIHQSITGLYETRIDLSQLGGDGGEAAAKPAPGGVPWLTQQPLQLTILVPLQEYQEKILSKTALPEDQKQQLKTLFVKYDNLWQHWENQVGHRKIRPHNIATGDYPPRPQKQYPINPKAKPSIQIVIDDLLKQGVLTPQNSTMNTPVYPVPKPDGRWRMVLDYREVNKTIPLTAAQNQHSAGILATIVRQKYKTTLDLANGFWAHPITPESYWLTAFTWQGKQYCWTRLPQGFLNSPALFTADVVDLLKEIPNVQVYVDDIYLSHDDPKEHVQQLEKVFQILLQAGYVVSLKKSEIGQKTVEFLGFNITKEGRGLTDTFKTKLLNITPPKDLKQLQSILGLLNFARNFIPNFAELVQPLYNLIASAKGKYIEWSEENTKQLNMVIEALNTASNLEERLPEQRLVIKVNTSPSAGYVRYYNETGKKPIMYLNYVFSKAELKFSMLEKLLTTMHKALIKAMDLAMGQEILVYSPIVSMTKIQKTPLPERKALPIRWITWMTYLEDPRIQFHYDKTLPELKHIPDVYTSSQSPVKHPSQYEGVFYTDGSAIKSPDPTKSNNAGMGIVHATYKPEYQVLNQWSIPLGNHTAQMAEIAAVEFACKKALKIPGPVLVITDSFYVAESANKELPYWKSNGFVNNKKKPLKHISKWKSIAECLSMKPDITIQHEKGISLQIPVFILKGNALADKLATQGSYVVNAGKRTADGSEFEKRTADGSEFESPKKKAKVE

SEQ ID NO: 1296 - protein, 2087 aa, synthetic construct
MPAAKRVKLDGGDKKYSIGLDIGTNSVGWAVITDEYKVPSKKFKVLGNTDRHSIKKNLIGALLFDSGETAEATRLKRTARRRYTRRKNRICYLQEIFSNEMAKVDDSFFHRLEESFLVEEDKKHERHPIFGNIVDEVAYHEKYPTIYHLRKKLVDSTDKADLRLIYLALAHMIKFRGHFLIEGDLNPDNSDVDKLFIQLVQTYNQLFEENPINASGVDAKAILSARLSKSRRLENLIAQLPGEKKNGLFGNLIALSLGLTPNFKSNFDLAEDAKLQLSKDTYDDDLDNLLAQIGDQYADLFLAAKNLSDAILLSDILRVNTEITKAPLSASMIKRYDEHHQDLTLLKALVRQQLPEKYKEIFFDQSKNGYAGYIDGGASQEEFYKFIKPILEKMDGTEELLVKLNREDLLRKQRTFDNGSIPHQIHLGELHAILRRQEDFYPFLKDNREKIEKILTFRIPYYVGPLARGNSRFAWMTRKSEETITPWNFEEVVDKGASAQSFIERMTNFDKNLPNEKVLPKHSLLYEYFTVYNELTKVKYVTEGMRKPAFLSGEQKKAIVDLLFKTNRKVTVKQLKEDYFKKIECFDSVEISGVEDRFNASLGTYHDLLKIIKDKDFLDNEENEDILEDIVLTLTLFEDREMIEERLKTYAHLFDDKVMKQLKRRRYTGWGRLSRKLINGIRDKQSGKTILDFLKSDGFANRNFMQLIHDDSLTFKEDIQKAQVSGQGDSLHEHIANLAGSPAIKKGILQTVKVVDELVKVMGRHKPENIVIEMARENQTTQKGQKNSRERMKRIEEGIKELGSQILKEHPVENTQLQNEKLYLYYLQNGRDMYVDQELDINRLSDYDVDHIVPQSFLKDDSIDNKVLTRSDKARGKSDNVPSEEVVKKMKNYWRQLLNAKLITQRKFDNLTKAERGGLSELDKAGFIKRQLVETRQITKHVAQILDSRMNTKYDENDKLIREVKVITLKSKLVSDFRKDFQFYKVREINNYHHAHDAYLNAVVGTALIKKYPKLESEFVYGDYKVYDVRKMIAKSEQEIGKATAKYFFYSNIMNFFKTEITLANGEIRKRPLIETNGETGEIVWDKGRDFATVRKVLSMPQVNIVKKTEVQTGGFSKESILPKRNSDKLIARKKDWDPKKYGGFDSPTVAYSVLVVAKVEKGKSKKLKSVKELLGITIMERSSFEKNPIDFLEAKGYKEVKKDLIIKLPKYSLFELENGRKRMLASAGELQKGNELALPSKYVNFLYLASHYEKLKGSPEDNEQKQLFVEQHKHYLDEIIEQISEFSKRVILADANLDKVLSAYNKHRDKPIREQAENIIHLFTLTNLGAPAAFKYFDTTIDRKRYTSTKEVLDATLIHQSITGLYETRIDLSQLGGDGGEAAAKGSSGGSGGVPWLTQQPLQLTILVPLQEYQEKILSKTALPEDQKQQLKTLFVKYDNLWQHWENQVGHRKIRPHNIATGDYPPRPQKQYPINPKAKPSIQIVIDDLLKQGVLTPQNSTMNTPVYPVPKPDGRWRMVLDYREVNKTIPLTAAQNQHSAGILATIVRQKYKTTLDLANGFWAHPITPESYWLTAFTWQGKQYCWTRLPQGFLNSPALFTADVVDLLKEIPNVQVYVDDIYLSHDDPKEHVQQLEKVFQILLQAGYVVSLKKSEIGQKTVEFLGFNITKEGRGLTDTFKTKLLNITPPKDLKQLQSILGLLNFARNFIPNFAELVQPLYNLIASAKGKYIEWSEENTKQLNMVIEALNTASNLEERLPEQRLVIKVNTSPSAGYVRYYNETGKKPIMYLNYVFSKAELKFSMLEKLLTTMHKALIKAMDLAMGQEILVYSPIVSMTKIQKTPLPERKALPIRWITWMTYLEDPRIQFHYDKTLPELKHIPDVYTSSQSPVKHPSQYEGVFYTDGSAIKSPDPTKSNNAGMGIVHATYKPEYQVLNQWSIPLGNHTAQMAEIAAVEFACKKALKIPGPVLVITDSFYVAESANKELPYWKSNGFVNNKKKPLKHISKWKSIAECLSMKPDITIQHEKGISLQIPVFILKGNALADKLATQGSYVVNAGKRTADGSEFEKRTADGSEFESPKKKAKVE

SEQ ID NO: 1297 - protein, 2094 aa, synthetic construct
MPAAKRVKLDGGDKKYSIGLDIGTNSVGWAVITDEYKVPSKKFKVLGNTDRHSIKKNLIGALLFDSGETAEATRLKRTARRRYTRRKNRICYLQEIFSNEMAKVDDSFFHRLEESFLVEEDKKHERHPIFGNIVDEVAYHEKYPTIYHLRKKLVDSTDKADLRLIYLALAHMIKFRGHFLIEGDLNPDNSDVDKLFIQLVQTYNQLFEENPINASGVDAKAILSARLSKSRRLENLIAQLPGEKKNGLFGNLIALSLGLTPNFKSNFDLAEDAKLQLSKDTYDDDLDNLLAQIGDQYADLFLAAKNLSDAILLSDILRVNTEITKAPLSASMIKRYDEHHQDLTLLKALVRQQLPEKYKEIFFDQSKNGYAGYIDGGASQEEFYKFIKPILEKMDGTEELLVKLNREDLLRKQRTFDNGSIPHQIHLGELHAILRRQEDFYPFLKDNREKIEKILTFRIPYYVGPLARGNSRFAWMTRKSEETITPWNFEEVVDKGASAQSFIERMTNFDKNLPNEKVLPKHSLLYEYFTVYNELTKVKYVTEGMRKPAFLSGEQKKAIVDLLFKTNRKVTVKQLKEDYFKKIECFDSVEISGVEDRFNASLGTYHDLLKIIKDKDFLDNEENEDILEDIVLTLTLFEDREMIEERLKTYAHLFDDKVMKQLKRRRYTGWGRLSRKLINGIRDKQSGKTILDFLKSDGFANRNFMQLIHDDSLTFKEDIQKAQVSGQGDSLHEHIANLAGSPAIKKGILQTVKVVDELVKVMGRHKPENIVIEMARENQTTQKGQKNSRERMKRIEEGIKELGSQILKEHPVENTQLQNEKLYLYYLQNGRDMYVDQELDINRLSDYDVDHIVPQSFLKDDSIDNKVLTRSDKARGKSDNVPSEEVVKKMKNYWRQLLNAKLITQRKFDNLTKAERGGLSELDKAGFIKRQLVETRQITKHVAQILDSRMNTKYDENDKLIREVKVITLKSKLVSDFRKDFQFYKVREINNYHHAHDAYLNAVVGTALIKKYPKLESEFVYGDYKVYDVRKMIAKSEQEIGKATAKYFFYSNIMNFFKTEITLANGEIRKRPLIETNGETGEIVWDKGRDFATVRKVLSMPQVNIVKKTEVQTGGFSKESILPKRNSDKLIARKKDWDPKKYGGFDSPTVAYSVLVVAKVEKGKSKKLKSVKELLGITIMERSSFEKNPIDFLEAKGYKEVKKDLIIKLPKYSLFELENGRKRMLASAGELQKGNELALPSKYVNFLYLASHYEKLKGSPEDNEQKQLFVEQHKHYLDEIIEQISEFSKRVILADANLDKVLSAYNKHRDKPIREQAENIIHLFTLTNLGAPAAFKYFDTTIDRKRYTSTKEVLDATLIHQSITGLYETRIDLSQLGGDGGGSSGSSGSSGSSGSSGSSGGVPWLTQQPLQLTILVPLQEYQEKILSKTALPEDQKQQLKTLFVKYDNLWQHWENQVGHRKIRPHNIATGDYPPRPQKQYPINPKAKPSIQIVIDDLLKQGVLTPQNSTMNTPVYPVPKPDGRWRMVLDYREVNKTIPLTAAQNQHSAGILATIVRQKYKTTLDLANGFWAHPITPESYWLTAFTWQGKQYCWTRLPQGFLNSPALFTADVVDLLKEIPNVQVYVDDIYLSHDDPKEHVQQLEKVFQILLQAGYVVSLKKSEIGQKTVEFLGFNITKEGRGLTDTFKTKLLNITPPKDLKQLQSILGLLNFARNFIPNFAELVQPLYNLIASAKGKYIEWSEENTKQLNMVIEALNTASNLEERLPEQRLVIKVNTSPSAGYVRYYNETGKKPIMYLNYVFSKAELKFSMLEKLLTTMHKALIKAMDLAMGQEILVYSPIVSMTKIQKTPLPERKALPIRWITWMTYLEDPRIQFHYDKTLPELKHIPDVYTSSQSPVKHPSQYEGVFYTDGSAIKSPDPTKSNNAGMGIVHATYKPEYQVLNQWSIPLGNHTAQMAEIAAVEFACKKALKIPGPVLVITDSFYVAESANKELPYWKSNGFVNNKKKPLKHISKWKSIAECLSMKPDITIQHEKGISLQIPVFILKGNALADKLATQGSYVVNAGKRTADGSEFEKRTADGSEFESPKKKAKVE

SEQ ID NO: 1298 - protein, 2122 aa, synthetic construct
MPAAKRVKLDGGDKKYSIGLDIGTNSVGWAVITDEYKVPSKKFKVLGNTDRHSIKKNLIGALLFDSGETAEATRLKRTARRRYTRRKNRICYLQEIFSNEMAKVDDSFFHRLEESFLVEEDKKHERHPIFGNIVDEVAYHEKYPTIYHLRKKLVDSTDKADLRLIYLALAHMIKFRGHFLIEGDLNPDNSDVDKLFIQLVQTYNQLFEENPINASGVDAKAILSARLSKSRRLENLIAQLPGEKKNGLFGNLIALSLGLTPNFKSNFDLAEDAKLQLSKDTYDDDLDNLLAQIGDQYADLFLAAKNLSDAILLSDILRVNTEITKAPLSASMIKRYDEHHQDLTLLKALVRQQLPEKYKEIFFDQSKNGYAGYIDGGASQEEFYKFIKPILEKMDGTEELLVKLNREDLLRKQRTFDNGSIPHQIHLGELHAILRRQEDFYPFLKDNREKIEKILTFRIPYYVGPLARGNSRFAWMTRKSEETITPWNFEEVVDKGASAQSFIERMTNFDKNLPNEKVLPKHSLLYEYFTVYNELTKVKYVTEGMRKPAFLSGEQKKAIVDLLFKTNRKVTVKQLKEDYFKKIECFDSVEISGVEDRFNASLGTYHDLLKIIKDKDFLDNEENEDILEDIVLTLTLFEDREMIEERLKTYAHLFDDKVMKQLKRRRYTGWGRLSRKLINGIRDKQSGKTILDFLKSDGFANRNFMQLIHDDSLTFKEDIQKAQVSGQGDSLHEHIANLAGSPAIKKGILQTVKVVDELVKVMGRHKPENIVIEMARENQTTQKGQKNSRERMKRIEEGIKELGSQILKEHPVENTQLQNEKLYLYYLQNGRDMYVDQELDINRLSDYDVDHIVPQSFLKDDSIDNKVLTRSDKARGKSDNVPSEEVVKKMKNYWRQLLNAKLITQRKFDNLTKAERGGLSELDKAGFIKRQLVETRQITKHVAQILDSRMNTKYDENDKLIREVKVITLKSKLVSDFRKDFQFYKVREINNYHHAHDAYLNAVVGTALIKKYPKLESEFVYGDYKVYDVRKMIAKSEQEIGKATAKYFFYSNIMNFFKTEITLANGEIRKRPLIETNGETGEIVWDKGRDFATVRKVLSMPQVNIVKKTEVQTGGFSKESILPKRNSDKLIARKKDWDPKKYGGFDSPTVAYSVLVVAKVEKGKSKKLKSVKELLGITIMERSSFEKNPIDFLEAKGYKEVKKDLIIKLPKYSLFELENGRKRMLASAGELQKGNELALPSKYVNFLYLASHYEKLKGSPEDNEQKQLFVEQHKHYLDEIIEQISEFSKRVILADANLDKVLSAYNKHRDKPIREQAENIIHLFTLTNLGAPAAFKYFDTTIDRKRYTSTKEVLDATLIHQSITGLYETRIDLSQLGGDGGAEAAAKEAAAKEAAAKEAAAKALEAEAAAKEAAAKEAAAKEAAAKAGGVPWLTQQPLQLTILVPLQEYQEKILSKTALPEDQKQQLKTLFVKYDNLWQHWENQVGHRKIRPHNIATGDYPPRPQKQYPINPKAKPSIQIVIDDLLKQGVLTPQNSTMNTPVYPVPKPDGRWRMVLDYREVNKTIPLTAAQNQHSAGILATIVRQKYKTTLDLANGFWAHPITPESYWLTAFTWQGKQYCWTRLPQGFLNSPALFNADVVDLLKEIPNVQVYVDDIYLSHDDPKEHVQQLEKVFQILLQAGYVVSLKKSEIGQKTVEFLGFNITKEGRGLTDTFKTKLLNITPPKDLKQLQSILGLLNFARNFIPNFAELVQPLYNLIAPAKGKYIEWSEENTKQLNMVIEALNTASNLEERLPEQRLVIKVNTSPSAGYVRYYNETGKKPIMYLNYVFSKAELKFSMLEKLLTTMHKALIKAMDLAMGQEILVYSPIVSMTKIQKTPLPERKALPIRWITWMTYLEDPRIQFHYDKTLPELKHIPDVYTSSQSPVKHPSQYEGVFYTDGSAIKSPDPTKSNNAGMGIVHATYKPEYQVLNQWSIPLGNHTAQMAEIAAVEFACKKALKIPGPVLVITDSFYVAESANKELPYWKSNGFVNNKKKPLKHISKWKSIAECLSMKPDITIQHEKGISLQIPVFILKGNALADKLATQGSYVVNAGKRTADGSEFEKRTADGSEFESPKKKAKVE

SEQ ID NO: 1299 - protein, 2096 aa, synthetic construct
MPAAKRVKLDGGDKKYSIGLDIGTNSVGWAVITDEYKVPSKKFKVLGNTDRHSIKKNLIGALLFDSGETAEATRLKRTARRRYTRRKNRICYLQEIFSNEMAKVDDSFFHRLEESFLVEEDKKHERHPIFGNIVDEVAYHEKYPTIYHLRKKLVDSTDKADLRLIYLALAHMIKFRGHFLIEGDLNPDNSDVDKLFIQLVQTYNQLFEENPINASGVDAKAILSARLSKSRRLENLIAQLPGEKKNGLFGNLIALSLGLTPNFKSNFDLAEDAKLQLSKDTYDDDLDNLLAQIGDQYADLFLAAKNLSDAILLSDILRVNTEITKAPLSASMIKRYDEHHQDLTLLKALVRQQLPEKYKEIFFDQSKNGYAGYIDGGASQEEFYKFIKPILEKMDGTEELLVKLNREDLLRKQRTFDNGSIPHQIHLGELHAILRRQEDFYPFLKDNREKIEKILTFRIPYYVGPLARGNSRFAWMTRKSEETITPWNFEEVVDKGASAQSFIERMTNFDKNLPNEKVLPKHSLLYEYFTVYNELTKVKYVTEGMRKPAFLSGEQKKAIVDLLFKTNRKVTVKQLKEDYFKKIECFDSVEISGVEDRFNASLGTYHDLLKIIKDKDFLDNEENEDILEDIVLTLTLFEDREMIEERLKTYAHLFDDKVMKQLKRRRYTGWGRLSRKLINGIRDKQSGKTILDFLKSDGFANRNFMQLIHDDSLTFKEDIQKAQVSGQGDSLHEHIANLAGSPAIKKGILQTVKVVDELVKVMGRHKPENIVIEMARENQTTQKGQKNSRERMKRIEEGIKELGSQILKEHPVENTQLQNEKLYLYYLQNGRDMYVDQELDINRLSDYDVDHIVPQSFLKDDSIDNKVLTRSDKARGKSDNVPSEEVVKKMKNYWRQLLNAKLITQRKFDNLTKAERGGLSELDKAGFIKRQLVETRQITKHVAQILDSRMNTKYDENDKLIREVKVITLKSKLVSDFRKDFQFYKVREINNYHHAHDAYLNAVVGTALIKKYPKLESEFVYGDYKVYDVRKMIAKSEQEIGKATAKYFFYSNIMNFFKTEITLANGEIRKRPLIETNGETGEIVWDKGRDFATVRKVLSMPQVNIVKKTEVQTGGFSKESILPKRNSDKLIARKKDWDPKKYGGFDSPTVAYSVLVVAKVEKGKSKKLKSVKELLGITIMERSSFEKNPIDFLEAKGYKEVKKDLIIKLPKYSLFELENGRKRMLASAGELQKGNELALPSKYVNFLYLASHYEKLKGSPEDNEQKQLFVEQHKHYLDEIIEQISEFSKRVILADANLDKVLSAYNKHRDKPIREQAENIIHLFTLTNLGAPAAFKYFDTTIDRKRYTSTKEVLDATLIHQSITGLYETRIDLSQLGGDGGGGGGSGGGGSGGGGSGGGGSGGVPWLTQQPLQLTILVPLQEYQEKILSKTALPEDQKQQLKTLFVKYDNLWQHWENQVGHRKIRPHNIATGDYPPRPQKQYPINPKAKPSIQIVIDDLLKQGVLTPQNSTMNTPVYPVPKPDGRWRMVLDYREVNKTIPLTAAQNQHSAGILATIVRQKYKTTLDLANGFWAHPITPESYWLTAFTWQGKQYCWTRLPQGFLNSPALFNADVVDLLKEIPNVQVYVDDIYLSHDDPKEHVQQLEKVFQILLQAGYVVSLKKSEIGQKTVEFLGFNITKEGRGLTDTFKTKLLNITPPKDLKQLQSILGLLNFARNFIPNFAELVQPLYNLIAPAKGKYIEWSEENTKQLNMVIEALNTASNLEERLPEQRLVIKVNTSPSAGYVRYYNETGKKPIMYLNYVFSKAELKFSMLEKLLTTMHKALIKAMDLAMGQEILVYSPIVSMTKIQKTPLPERKALPIRWITWMTYLEDPRIQFHYDKTLPELKHIPDVYTSSQSPVKHPSQYEGVFYTDGSAIKSPDPTKSNNAGMGIVHATYKPEYQVLNQWSIPLGNHTAQMAEIAAVEFACKKALKIPGPVLVITDSFYVAESANKELPYWKSNGFVNNKKKPLKHISKWKSIAECLSMKPDITIQHEKGISLQIPVFILKGNALADKLATQGSYVVNAGKRTADGSEFEKRTADGSEFESPKKKAKVE

SEQ ID NO: 1300 - protein, 2096 aa, synthetic construct
MPAAKRVKLDGGDKKYSIGLDIGTNSVGWAVITDEYKVPSKKFKVLGNTDRHSIKKNLIGALLFDSGETAEATRLKRTARRRYTRRKNRICYLQEIFSNEMAKVDDSFFHRLEESFLVEEDKKHERHPIFGNIVDEVAYHEKYPTIYHLRKKLVDSTDKADLRLIYLALAHMIKFRGHFLIEGDLNPDNSDVDKLFIQLVQTYNQLFEENPINASGVDAKAILSARLSKSRRLENLIAQLPGEKKNGLFGNLIALSLGLTPNFKSNFDLAEDAKLQLSKDTYDDDLDNLLAQIGDQYADLFLAAKNLSDAILLSDILRVNTEITKAPLSASMIKRYDEHHQDLTLLKALVRQQLPEKYKEIFFDQSKNGYAGYIDGGASQEEFYKFIKPILEKMDGTEELLVKLNREDLLRKQRTFDNGSIPHQIHLGELHAILRRQEDFYPFLKDNREKIEKILTFRIPYYVGPLARGNSRFAWMTRKSEETITPWNFEEVVDKGASAQSFIERMTNFDKNLPNEKVLPKHSLLYEYFTVYNELTKVKYVTEGMRKPAFLSGEQKKAIVDLLFKTNRKVTVKQLKEDYFKKIECFDSVEISGVEDRFNASLGTYHDLLKIIKDKDFLDNEENEDILEDIVLTLTLFEDREMIEERLKTYAHLFDDKVMKQLKRRRYTGWGRLSRKLINGIRDKQSGKTILDFLKSDGFANRNFMQLIHDDSLTFKEDIQKAQVSGQGDSLHEHIANLAGSPAIKKGILQTVKVVDELVKVMGRHKPENIVIEMARENQTTQKGQKNSRERMKRIEEGIKELGSQILKEHPVENTQLQNEKLYLYYLQNGRDMYVDQELDINRLSDYDVDHIVPQSFLKDDSIDNKVLTRSDKARGKSDNVPSEEVVKKMKNYWRQLLNAKLITQRKFDNLTKAERGGLSELDKAGFIKRQLVETRQITKHVAQILDSRMNTKYDENDKLIREVKVITLKSKLVSDFRKDFQFYKVREINNYHHAHDAYLNAVVGTALIKKYPKLESEFVYGDYKVYDVRKMIAKSEQEIGKATAKYFFYSNIMNFFKTEITLANGEIRKRPLIETNGETGEIVWDKGRDFATVRKVLSMPQVNIVKKTEVQTGGFSKESILPKRNSDKLIARKKDWDPKKYGGFDSPTVAYSVLVVAKVEKGKSKKLKSVKELLGITIMERSSFEKNPIDFLEAKGYKEVKKDLIIKLPKYSLFELENGRKRMLASAGELQKGNELALPSKYVNFLYLASHYEKLKGSPEDNEQKQLFVEQHKHYLDEIIEQISEFSKRVILADANLDKVLSAYNKHRDKPIREQAENIIHLFTLTNLGAPAAFKYFDTTIDRKRYTSTKEVLDATLIHQSITGLYETRIDLSQLGGDGGEAAAKEAAAKEAAAKEAAAKGGVPWLTQQPLQLTILVPLQEYQEKILSKTALPEDQKQQLKTLFVKYDNLWQHWENQVGHRKIRPHNIATGDYPPRPQKQYPINPKAKPSIQIVIDDLLKQGVLTPQNSTMNTPVYPVPKPDGRWRMVLDYREVNKTIPLTAAQNQHSAGILATIVRQKYKTTLDLANGFWAHPITPESYWLTAFTWQGKQYCWTRLPQGFLNSPALFNADVVDLLKEIPNVQVYVDDIYLSHDDPKEHVQQLEKVFQILLQAGYVVSLKKSEIGQKTVEFLGFNITKEGRGLTDTFKTKLLNITPPKDLKQLQSILGLLNFARNFIPNFAELVQPLYNLIAPAKGKYIEWSEENTKQLNMVIEALNTASNLEERLPEQRLVIKVNTSPSAGYVRYYNETGKKPIMYLNYVFSKAELKFSMLEKLLTTMHKALIKAMDLAMGQEILVYSPIVSMTKIQKTPLPERKALPIRWITWMTYLEDPRIQFHYDKTLPELKHIPDVYTSSQSPVKHPSQYEGVFYTDGSAIKSPDPTKSNNAGMGIVHATYKPEYQVLNQWSIPLGNHTAQMAEIAAVEFACKKALKIPGPVLVITDSFYVAESANKELPYWKSNGFVNNKKKPLKHISKWKSIAECLSMKPDITIQHEKGISLQIPVFILKGNALADKLATQGSYVVNAGKRTADGSEFEKRTADGSEFESPKKKAKVE

SEQ ID NO: 1301 - protein, 2084 aa, synthetic construct
MPAAKRVKLDGGDKKYSIGLDIGTNSVGWAVITDEYKVPSKKFKVLGNTDRHSIKKNLIGALLFDSGETAEATRLKRTARRRYTRRKNRICYLQEIFSNEMAKVDDSFFHRLEESFLVEEDKKHERHPIFGNIVDEVAYHEKYPTIYHLRKKLVDSTDKADLRLIYLALAHMIKFRGHFLIEGDLNPDNSDVDKLFIQLVQTYNQLFEENPINASGVDAKAILSARLSKSRRLENLIAQLPGEKKNGLFGNLIALSLGLTPNFKSNFDLAEDAKLQLSKDTYDDDLDNLLAQIGDQYADLFLAAKNLSDAILLSDILRVNTEITKAPLSASMIKRYDEHHQDLTLLKALVRQQLPEKYKEIFFDQSKNGYAGYIDGGASQEEFYKFIKPILEKMDGTEELLVKLNREDLLRKQRTFDNGSIPHQIHLGELHAILRRQEDFYPFLKDNREKIEKILTFRIPYYVGPLARGNSRFAWMTRKSEETITPWNFEEVVDKGASAQSFIERMTNFDKNLPNEKVLPKHSLLYEYFTVYNELTKVKYVTEGMRKPAFLSGEQKKAIVDLLFKTNRKVTVKQLKEDYFKKIECFDSVEISGVEDRFNASLGTYHDLLKIIKDKDFLDNEENEDILEDIVLTLTLFEDREMIEERLKTYAHLFDDKVMKQLKRRRYTGWGRLSRKLINGIRDKQSGKTILDFLKSDGFANRNFMQLIHDDSLTFKEDIQKAQVSGQGDSLHEHIANLAGSPAIKKGILQTVKVVDELVKVMGRHKPENIVIEMARENQTTQKGQKNSRERMKRIEEGIKELGSQILKEHPVENTQLQNEKLYLYYLQNGRDMYVDQELDINRLSDYDVDHIVPQSFLKDDSIDNKVLTRSDKARGKSDNVPSEEVVKKMKNYWRQLLNAKLITQRKFDNLTKAERGGLSELDKAGFIKRQLVETRQITKHVAQILDSRMNTKYDENDKLIREVKVITLKSKLVSDFRKDFQFYKVREINNYHHAHDAYLNAVVGTALIKKYPKLESEFVYGDYKVYDVRKMIAKSEQEIGKATAKYFFYSNIMNFFKTEITLANGEIRKRPLIETNGETGEIVWDKGRDFATVRKVLSMPQVNIVKKTEVQTGGFSKESILPKRNSDKLIARKKDWDPKKYGGFDSPTVAYSVLVVAKVEKGKSKKLKSVKELLGITIMERSSFEKNPIDFLEAKGYKEVKKDLIIKLPKYSLFELENGRKRMLASAGELQKGNELALPSKYVNFLYLASHYEKLKGSPEDNEQKQLFVEQHKHYLDEIIEQISEFSKRVILADANLDKVLSAYNKHRDKPIREQAENIIHLFTLTNLGAPAAFKYFDTTIDRKRYTSTKEVLDATLIHQSITGLYETRIDLSQLGGDGGEAAAKPAPGGVPWLTQQPLQLTILVPLQEYQEKILSKTALPEDQKQQLKTLFVKYDNLWQHWENQVGHRKIRPHNIATGDYPPRPQKQYPINPKAKPSIQIVIDDLLKQGVLTPQNSTMNTPVYPVPKPDGRWRMVLDYREVNKTIPLTAAQNQHSAGILATIVRQKYKTTLDLANGFWAHPITPESYWLTAFTWQGKQYCWTRLPQGFLNSPALFNADVVDLLKEIPNVQVYVDDIYLSHDDPKEHVQQLEKVFQILLQAGYVVSLKKSEIGQKTVEFLGFNITKEGRGLTDTFKTKLLNITPPKDLKQLQSILGLLNFARNFIPNFAELVQPLYNLIAPAKGKYIEWSEENTKQLNMVIEALNTASNLEERLPEQRLVIKVNTSPSAGYVRYYNETGKKPIMYLNYVFSKAELKFSMLEKLLTTMHKALIKAMDLAMGQEILVYSPIVSMTKIQKTPLPERKALPIRWITWMTYLEDPRIQFHYDKTLPELKHIPDVYTSSQSPVKHPSQYEGVFYTDGSAIKSPDPTKSNNAGMGIVHATYKPEYQVLNQWSIPLGNHTAQMAEIAAVEFACKKALKIPGPVLVITDSFYVAESANKELPYWKSNGFVNNKKKPLKHISKWKSIAECLSMKPDITIQHEKGISLQIPVFILKGNALADKLATQGSYVVNAGKRTADGSEFEKRTADGSEFESPKKKAKVE

SEQ ID NO: 1302 - protein, 2087 aa, synthetic construct
MPAAKRVKLDGGDKKYSIGLDIGTNSVGWAVITDEYKVPSKKFKVLGNTDRHSIKKNLIGALLFDSGETAEATRLKRTARRRYTRRKNRICYLQEIFSNEMAKVDDSFFHRLEESFLVEEDKKHERHPIFGNIVDEVAYHEKYPTIYHLRKKLVDSTDKADLRLIYLALAHMIKFRGHFLIEGDLNPDNSDVDKLFIQLVQTYNQLFEENPINASGVDAKAILSARLSKSRRLENLIAQLPGEKKNGLFGNLIALSLGLTPNFKSNFDLAEDAKLQLSKDTYDDDLDNLLAQIGDQYADLFLAAKNLSDAILLSDILRVNTEITKAPLSASMIKRYDEHHQDLTLLKALVRQQLPEKYKEIFFDQSKNGYAGYIDGGASQEEFYKFIKPILEKMDGTEELLVKLNREDLLRKQRTFDNGSIPHQIHLGELHAILRRQEDFYPFLKDNREKIEKILTFRIPYYVGPLARGNSRFAWMTRKSEETITPWNFEEVVDKGASAQSFIERMTNFDKNLPNEKVLPKHSLLYEYFTVYNELTKVKYVTEGMRKPAFLSGEQKKAIVDLLFKTNRKVTVKQLKEDYFKKIECFDSVEISGVEDRFNASLGTYHDLLKIIKDKDFLDNEENEDILEDIVLTLTLFEDREMIEERLKTYAHLFDDKVMKQLKRRRYTGWGRLSRKLINGIRDKQSGKTILDFLKSDGFANRNFMQLIHDDSLTFKEDIQKAQVSGQGDSLHEHIANLAGSPAIKKGILQTVKVVDELVKVMGRHKPENIVIEMARENQTTQKGQKNSRERMKRIEEGIKELGSQILKEHPVENTQLQNEKLYLYYLQNGRDMYVDQELDINRLSDYDVDHIVPQSFLKDDSIDNKVLTRSDKARGKSDNVPSEEVVKKMKNYWRQLLNAKLITQRKFDNLTKAERGGLSELDKAGFIKRQLVETRQITKHVAQILDSRMNTKYDENDKLIREVKVITLKSKLVSDFRKDFQFYKVREINNYHHAHDAYLNAVVGTALIKKYPKLESEFVYGDYKVYDVRKMIAKSEQEIGKATAKYFFYSNIMNFFKTEITLANGEIRKRPLIETNGETGEIVWDKGRDFATVRKVLSMPQVNIVKKTEVQTGGFSKESILPKRNSDKLIARKKDWDPKKYGGFDSPTVAYSVLVVAKVEKGKSKKLKSVKELLGITIMERSSFEKNPIDFLEAKGYKEVKKDLIIKLPKYSLFELENGRKRMLASAGELQKGNELALPSKYVNFLYLASHYEKLKGSPEDNEQKQLFVEQHKHYLDEIIEQISEFSKRVILADANLDKVLSAYNKHRDKPIREQAENIIHLFTLTNLGAPAAFKYFDTTIDRKRYTSTKEVLDATLIHQSITGLYETRIDLSQLGGDGGPAPGSSEAAAKGGVPWLTQQPLQLTILVPLQEYQEKILSKTALPEDQKQQLKTLFVKYDNLWQHWENQVGHRKIRPHNIATGDYPPRPQKQYPINPKAKPSIQIVIDDLLKQGVLTPQNSTMNTPVYPVPKPDGRWRMVLDYREVNKTIPLTAAQNQHSAGILATIVRQKYKTTLDLANGFWAHPITPESYWLTAFTWQGKQYCWTRLPQGFLNSPALFNADVVDLLKEIPNVQVYVDDIYLSHDDPKEHVQQLEKVFQILLQAGYVVSLKKSEIGQKTVEFLGFNITKEGRGLTDTFKTKLLNITPPKDLKQLQSILGLLNFARNFIPNFAELVQPLYNLIAPAKGKYIEWSEENTKQLNMVIEALNTASNLEERLPEQRLVIKVNTSPSAGYVRYYNETGKKPIMYLNYVFSKAELKFSMLEKLLTTMHKALIKAMDLAMGQEILVYSPIVSMTKIQKTPLPERKALPIRWITWMTYLEDPRIQFHYDKTLPELKHIPDVYTSSQSPVKHPSQYEGVFYTDGSAIKSPDPTKSNNAGMGIVHATYKPEYQVLNQWSIPLGNHTAQMAEIAAVEFACKKALKIPGPVLVITDSFYVAESANKELPYWKSNGFVNNKKKPLKHISKWKSIAECLSMKPDITIQHEKGISLQIPVFILKGNALADKLATQGSYVVNAGKRTADGSEFEKRTADGSEFESPKKKAKVE

SEQ ID NO: 1303 - protein, 2091 aa, synthetic construct
MPAAKRVKLDGGDKKYSIGLDIGTNSVGWAVITDEYKVPSKKFKVLGNTDRHSIKKNLIGALLFDSGETAEATRLKRTARRRYTRRKNRICYLQEIFSNEMAKVDDSFFHRLEESFLVEEDKKHERHPIFGNIVDEVAYHEKYPTIYHLRKKLVDSTDKADLRLIYLALAHMIKFRGHFLIEGDLNPDNSDVDKLFIQLVQTYNQLFEENPINASGVDAKAILSARLSKSRRLENLIAQLPGEKKNGLFGNLIALSLGLTPNFKSNFDLAEDAKLQLSKDTYDDDLDNLLAQIGDQYADLFLAAKNLSDAILLSDILRVNTEITKAPLSASMIKRYDEHHQDLTLLKALVRQQLPEKYKEIFFDQSKNGYAGYIDGGASQEEFYKFIKPILEKMDGTEELLVKLNREDLLRKQRTFDNGSIPHQIHLGELHAILRRQEDFYPFLKDNREKIEKILTFRIPYYVGPLARGNSRFAWMTRKSEETITPWNFEEVVDKGASAQSFIERMTNFDKNLPNEKVLPKHSLLYEYFTVYNELTKVKYVTEGMRKPAFLSGEQKKAIVDLLFKTNRKVTVKQLKEDYFKKIECFDSVEISGVEDRFNASLGTYHDLLKIIKDKDFLDNEENEDILEDIVLTLTLFEDREMIEERLKTYAHLFDDKVMKQLKRRRYTGWGRLSRKLINGIRDKQSGKTILDFLKSDGFANRNFMQLIHDDSLTFKEDIQKAQVSGQGDSLHEHIANLAGSPAIKKGILQTVKVVDELVKVMGRHKPENIVIEMARENQTTQKGQKNSRERMKRIEEGIKELGSQILKEHPVENTQLQNEKLYLYYLQNGRDMYVDQELDINRLSDYDVDHIVPQSFLKDDSIDNKVLTRSDKARGKSDNVPSEEVVKKMKNYWRQLLNAKLITQRKFDNLTKAERGGLSELDKAGFIKRQLVETRQITKHVAQILDSRMNTKYDENDKLIREVKVITLKSKLVSDFRKDFQFYKVREINNYHHAHDAYLNAVVGTALIKKYPKLESEFVYGDYKVYDVRKMIAKSEQEIGKATAKYFFYSNIMNFFKTEITLANGEIRKRPLIETNGETGEIVWDKGRDFATVRKVLSMPQVNIVKKTEVQTGGFSKESILPKRNSDKLIARKKDWDPKKYGGFDSPTVAYSVLVVAKVEKGKSKKLKSVKELLGITIMERSSFEKNPIDFLEAKGYKEVKKDLIIKLPKYSLFELENGRKRMLASAGELQKGNELALPSKYVNFLYLASHYEKLKGSPEDNEQKQLFVEQHKHYLDEIIEQISEFSKRVILADANLDKVLSAYNKHRDKPIREQAENIIHLFTLTNLGAPAAFKYFDTTIDRKRYTSTKEVLDATLIHQSITGLYETRIDLSQLGGDGGGSSGSSGSSGSSGSSGGVPWLTQQPLQLTILVPLQEYQEKILSKTALPEDQKQQLKTLFVKYDNLWQHWENQVGHRKIRPHNIATGDYPPRPQKQYPINPKAKPSIQIVIDDLLKQGVLTPQNSTMNTPVYPVPKPDGRWRMVLDYREVNKTIPLTAAQNQHSAGILATIVRQKYKTTLDLANGFWAHPITPESYWLTAFTWQGKQYCWTRLPQGFLNSPALFNADVVDLLKEIPNVQVYVDDIYLSHDDPKEHVQQLEKVFQILLQAGYVVSLKKSEIGQKTVEFLGFNITKEGRGLTDTFKTKLLNITPPKDLKQLQSILGLLNFARNFIPNFAELVQPLYNLIAPAKGKYIEWSEENTKQLNMVIEALNTASNLEERLPEQRLVIKVNTSPSAGYVRYYNETGKKPIMYLNYVFSKAELKFSMLEKLLTTMHKALIKAMDLAMGQEILVYSPIVSMTKIQKTPLPERKALPIRWITWMTYLEDPRIQFHYDKTLPELKHIPDVYTSSQSPVKHPSQYEGVFYTDGSAIKSPDPTKSNNAGMGIVHATYKPEYQVLNQWSIPLGNHTAQMAEIAAVEFACKKALKIPGPVLVITDSFYVAESANKELPYWKSNGFVNNKKKPLKHISKWKSIAECLSMKPDITIQHEKGISLQIPVFILKGNALADKLATQGSYVVNAGKRTADGSEFEKRTADGSEFESPKKKAKVE

SEQ ID NO: 1304 - protein, 2085 aa, synthetic construct
MPAAKRVKLDGGDKKYSIGLDIGTNSVGWAVITDEYKVPSKKFKVLGNTDRHSIKKNLIGALLFDSGETAEATRLKRTARRRYTRRKNRICYLQEIFSNEMAKVDDSFFHRLEESFLVEEDKKHERHPIFGNIVDEVAYHEKYPTIYHLRKKLVDSTDKADLRLIYLALAHMIKFRGHFLIEGDLNPDNSDVDKLFIQLVQTYNQLFEENPINASGVDAKAILSARLSKSRRLENLIAQLPGEKKNGLFGNLIALSLGLTPNFKSNFDLAEDAKLQLSKDTYDDDLDNLLAQIGDQYADLFLAAKNLSDAILLSDILRVNTEITKAPLSASMIKRYDEHHQDLTLLKALVRQQLPEKYKEIFFDQSKNGYAGYIDGGASQEEFYKFIKPILEKMDGTEELLVKLNREDLLRKQRTFDNGSIPHQIHLGELHAILRRQEDFYPFLKDNREKIEKILTFRIPYYVGPLARGNSRFAWMTRKSEETITPWNFEEVVDKGASAQSFIERMTNFDKNLPNEKVLPKHSLLYEYFTVYNELTKVKYVTEGMRKPAFLSGEQKKAIVDLLFKTNRKVTVKQLKEDYFKKIECFDSVEISGVEDRFNASLGTYHDLLKIIKDKDFLDNEENEDILEDIVLTLTLFEDREMIEERLKTYAHLFDDKVMKQLKRRRYTGWGRLSRKLINGIRDKQSGKTILDFLKSDGFANRNFMQLIHDDSLTFKEDIQKAQVSGQGDSLHEHIANLAGSPAIKKGILQTVKVVDELVKVMGRHKPENIVIEMARENQTTQKGQKNSRERMKRIEEGIKELGSQILKEHPVENTQLQNEKLYLYYLQNGRDMYVDQELDINRLSDYDVDHIVPQSFLKDDSIDNKVLTRSDKARGKSDNVPSEEVVKKMKNYWRQLLNAKLITQRKFDNLTKAERGGLSELDKAGFIKRQLVETRQITKHVAQILDSRMNTKYDENDKLIREVKVITLKSKLVSDFRKDFQFYKVREINNYHHAHDAYLNAVVGTALIKKYPKLESEFVYGDYKVYDVRKMIAKSEQEIGKATAKYFFYSNIMNFFKTEITLANGEIRKRPLIETNGETGEIVWDKGRDFATVRKVLSMPQVNIVKKTEVQTGGFSKESILPKRNSDKLIARKKDWDPKKYGGFDSPTVAYSVLVVAKVEKGKSKKLKSVKELLGITIMERSSFEKNPIDFLEAKGYKEVKKDLIIKLPKYSLFELENGRKRMLASAGELQKGNELALPSKYVNFLYLASHYEKLKGSPEDNEQKQLFVEQHKHYLDEIIEQISEFSKRVILADANLDKVLSAYNKHRDKPIREQAENIIHLFTLTNLGAPAAFKYFDTTIDRKRYTSTKEVLDATLIHQSITGLYETRIDLSQLGGDGGGGSGGSGGSGGVPWLTQQPLQLTILVPLQEYQEKILSKTALPEDQKQQLKTLFVKYDNLWQHWENQVGHRKIRPHNIATGDYPPRPQKQYPINPKAKPSIQIVIDDLLKQGVLTPQNSTMNTPVYPVPKPDGRWRMVLDYREVNKTIPLTAAQNQHSAGILATIVRQKYKTTLDLANGFWAHPITPESYWLTAFTWQGKQYCWTRLPQGFLNSPALFNADVVDLLKEIPNVQVYVDDIYLSHDDPKEHVQQLEKVFQILLQAGYVVSLKKSEIGQKTVEFLGFNITKEGRGLTDTFKTKLLNITPPKDLKQLQSILGLLNFARNFIPNFAELVQPLYNLIAPAKGKYIEWSEENTKQLNMVIEALNTASNLEERLPEQRLVIKVNTSPSAGYVRYYNETGKKPIMYLNYVFSKAELKFSMLEKLLTTMHKALIKAMDLAMGQEILVYSPIVSMTKIQKTPLPERKALPIRWITWMTYLEDPRIQFHYDKTLPELKHIPDVYTSSQSPVKHPSQYEGVFYTDGSAIKSPDPTKSNNAGMGIVHATYKPEYQVLNQWSIPLGNHTAQMAEIAAVEFACKKALKIPGPVLVITDSFYVAESANKELPYWKSNGFVNNKKKPLKHISKWKSIAECLSMKPDITIQHEKGISLQIPVFILKGNALADKLATQGSYVVNAGKRTADGSEFEKRTADGSEFESPKKKAKVE

SEQ ID NO: 1305 - protein, 2085 aa, synthetic construct
MPAAKRVKLDGGDKKYSIGLDIGTNSVGWAVITDEYKVPSKKFKVLGNTDRHSIKKNLIGALLFDSGETAEATRLKRTARRRYTRRKNRICYLQEIFSNEMAKVDDSFFHRLEESFLVEEDKKHERHPIFGNIVDEVAYHEKYPTIYHLRKKLVDSTDKADLRLIYLALAHMIKFRGHFLIEGDLNPDNSDVDKLFIQLVQTYNQLFEENPINASGVDAKAILSARLSKSRRLENLIAQLPGEKKNGLFGNLIALSLGLTPNFKSNFDLAEDAKLQLSKDTYDDDLDNLLAQIGDQYADLFLAAKNLSDAILLSDILRVNTEITKAPLSASMIKRYDEHHQDLTLLKALVRQQLPEKYKEIFFDQSKNGYAGYIDGGASQEEFYKFIKPILEKMDGTEELLVKLNREDLLRKQRTFDNGSIPHQIHLGELHAILRRQEDFYPFLKDNREKIEKILTFRIPYYVGPLARGNSRFAWMTRKSEETITPWNFEEVVDKGASAQSFIERMTNFDKNLPNEKVLPKHSLLYEYFTVYNELTKVKYVTEGMRKPAFLSGEQKKAIVDLLFKTNRKVTVKQLKEDYFKKIECFDSVEISGVEDRFNASLGTYHDLLKIIKDKDFLDNEENEDILEDIVLTLTLFEDREMIEERLKTYAHLFDDKVMKQLKRRRYTGWGRLSRKLINGIRDKQSGKTILDFLKSDGFANRNFMQLIHDDSLTFKEDIQKAQVSGQGDSLHEHIANLAGSPAIKKGILQTVKVVDELVKVMGRHKPENIVIEMARENQTTQKGQKNSRERMKRIEEGIKELGSQILKEHPVENTQLQNEKLYLYYLQNGRDMYVDQELDINRLSDYDVDHIVPQSFLKDDSIDNKVLTRSDKARGKSDNVPSEEVVKKMKNYWRQLLNAKLITQRKFDNLTKAERGGLSELDKAGFIKRQLVETRQITKHVAQILDSRMNTKYDENDKLIREVKVITLKSKLVSDFRKDFQFYKVREINNYHHAHDAYLNAVVGTALIKKYPKLESEFVYGDYKVYDVRKMIAKSEQEIGKATAKYFFYSNIMNFFKTEITLANGEIRKRPLIETNGETGEIVWDKGRDFATVRKVLSMPQVNIVKKTEVQTGGFSKESILPKRNSDKLIARKKDWDPKKYGGFDSPTVAYSVLVVAKVEKGKSKKLKSVKELLGITIMERSSFEKNPIDFLEAKGYKEVKKDLIIKLPKYSLFELENGRKRMLASAGELQKGNELALPSKYVNFLYLASHYEKLKGSPEDNEQKQLFVEQHKHYLDEIIEQISEFSKRVILADANLDKVLSAYNKHRDKPIREQAENIIHLFTLTNLGAPAAFKYFDTTIDRKRYTSTKEVLDATLIHQSITGLYETRIDLSQLGGDGGGGGGSSPAPGGVPWLTQQPLQLTILVPLQEYQEKILSKTALPEDQKQQLKTLFVKYDNLWQHWENQVGHRKIRPHNIATGDYPPRPQKQYPINPKAKPSIQIVIDDLLKQGVLTPQNSTMNTPVYPVPKPDGRWRMVLDYREVNKTIPLTAAQNQHSAGILATIVRQKYKTTLDLANGFWAHPITPESYWLTAFTWQGKQYCWTRLPQGFLNSPALFNADVVDLLKEIPNVQVYVDDIYLSHDDPKEHVQQLEKVFQILLQAGYVVSLKKSEIGQKTVEFLGFNITKEGRGLTDTFKTKLLNITPPKDLKQLQSILGLLNFARNFIPNFAELVQPLYNLIAPAKGKYIEWSEENTKQLNMVIEALNTASNLEERLPEQRLVIKVNTSPSAGYVRYYNETGKKPIMYLNYVFSKAELKFSMLEKLLTTMHKALIKAMDLAMGQEILVYSPIVSMTKIQKTPLPERKALPIRWITWMTYLEDPRIQFHYDKTLPELKHIPDVYTSSQSPVKHPSQYEGVFYTDGSAIKSPDPTKSNNAGMGIVHATYKPEYQVLNQWSIPLGNHTAQMAEIAAVEFACKKALKIPGPVLVITDSFYVAESANKELPYWKSNGFVNNKKKPLKHISKWKSIAECLSMKPDITIQHEKGISLQIPVFILKGNALADKLATQGSYVVNAGKRTADGSEFEKRTADGSEFESPKKKAKVE

SEQ ID NO: 1306 - protein, 2087 aa, synthetic construct
MPAAKRVKLDGGDKKYSIGLDIGTNSVGWAVITDEYKVPSKKFKVLGNTDRHSIKKNLIGALLFDSGETAEATRLKRTARRRYTRRKNRICYLQEIFSNEMAKVDDSFFHRLEESFLVEEDKKHERHPIFGNIVDEVAYHEKYPTIYHLRKKLVDSTDKADLRLIYLALAHMIKFRGHFLIEGDLNPDNSDVDKLFIQLVQTYNQLFEENPINASGVDAKAILSARLSKSRRLENLIAQLPGEKKNGLFGNLIALSLGLTPNFKSNFDLAEDAKLQLSKDTYDDDLDNLLAQIGDQYADLFLAAKNLSDAILLSDILRVNTEITKAPLSASMIKRYDEHHQDLTLLKALVRQQLPEKYKEIFFDQSKNGYAGYIDGGASQEEFYKFIKPILEKMDGTEELLVKLNREDLLRKQRTFDNGSIPHQIHLGELHAILRRQEDFYPFLKDNREKIEKILTFRIPYYVGPLARGNSRFAWMTRKSEETITPWNFEEVVDKGASAQSFIERMTNFDKNLPNEKVLPKHSLLYEYFTVYNELTKVKYVTEGMRKPAFLSGEQKKAIVDLLFKTNRKVTVKQLKEDYFKKIECFDSVEISGVEDRFNASLGTYHDLLKIIKDKDFLDNEENEDILEDIVLTLTLFEDREMIEERLKTYAHLFDDKVMKQLKRRRYTGWGRLSRKLINGIRDKQSGKTILDFLKSDGFANRNFMQLIHDDSLTFKEDIQKAQVSGQGDSLHEHIANLAGSPAIKKGILQTVKVVDELVKVMGRHKPENIVIEMARENQTTQKGQKNSRERMKRIEEGIKELGSQILKEHPVENTQLQNEKLYLYYLQNGRDMYVDQELDINRLSDYDVDHIVPQSFLKDDSIDNKVLTRSDKARGKSDNVPSEEVVKKMKNYWRQLLNAKLITQRKFDNLTKAERGGLSELDKAGFIKRQLVETRQITKHVAQILDSRMNTKYDENDKLIREVKVITLKSKLVSDFRKDFQFYKVREINNYHHAHDAYLNAVVGTALIKKYPKLESEFVYGDYKVYDVRKMIAKSEQEIGKATAKYFFYSNIMNFFKTEITLANGEIRKRPLIETNGETGEIVWDKGRDFATVRKVLSMPQVNIVKKTEVQTGGFSKESILPKRNSDKLIARKKDWDPKKYGGFDSPTVAYSVLVVAKVEKGKSKKLKSVKELLGITIMERSSFEKNPIDFLEAKGYKEVKKDLIIKLPKYSLFELENGRKRMLASAGELQKGNELALPSKYVNFLYLASHYEKLKGSPEDNEQKQLFVEQHKHYLDEIIEQISEFSKRVILADANLDKVLSAYNKHRDKPIREQAENIIHLFTLTNLGAPAAFKYFDTTIDRKRYTSTKEVLDATLIHQSITGLYETRIDLSQLGGDGGGSSGGSEAAAKGGVPWLTQQPLQLTILVPLQEYQEKILSKTALPEDQKQQLKTLFVKYDNLWQHWENQVGHRKIRPHNIATGDYPPRPQKQYPINPKAKPSIQIVIDDLLKQGVLTPQNSTMNTPVYPVPKPDGRWRMVLDYREVNKTIPLTAAQNQHSAGILATIVRQKYKTTLDLANGFWAHPITPESYWLTAFTWQGKQYCWTRLPQGFLNSPALFNADVVDLLKEIPNVQVYVDDIYLSHDDPKEHVQQLEKVFQILLQAGYVVSLKKSEIGQKTVEFLGFNITKEGRGLTDTFKTKLLNITPPKDLKQLQSILGLLNFARNFIPNFAELVQPLYNLIAPAKGKYIEWSEENTKQLNMVIEALNTASNLEERLPEQRLVIKVNTSPSAGYVRYYNETGKKPIMYLNYVFSKAELKFSMLEKLLTTMHKALIKAMDLAMGQEILVYSPIVSMTKIQKTPLPERKALPIRWITWMTYLEDPRIQFHYDKTLPELKHIPDVYTSSQSPVKHPSQYEGVFYTDGSAIKSPDPTKSNNAGMGIVHATYKPEYQVLNQWSIPLGNHTAQMAEIAAVEFACKKALKIPGPVLVITDSFYVAESANKELPYWKSNGFVNNKKKPLKHISKWKSIAECLSMKPDITIQHEKGISLQIPVFILKGNALADKLATQGSYVVNAGKRTADGSEFEKRTADGSEFESPKKKAKVE

SEQ ID NO: 1307 - protein, 2085 aa, synthetic construct
MPAAKRVKLDGGDKKYSIGLDIGTNSVGWAVITDEYKVPSKKFKVLGNTDRHSIKKNLIGALLFDSGETAEATRLKRTARRRYTRRKNRICYLQEIFSNEMAKVDDSFFHRLEESFLVEEDKKHERHPIFGNIVDEVAYHEKYPTIYHLRKKLVDSTDKADLRLIYLALAHMIKFRGHFLIEGDLNPDNSDVDKLFIQLVQTYNQLFEENPINASGVDAKAILSARLSKSRRLENLIAQLPGEKKNGLFGNLIALSLGLTPNFKSNFDLAEDAKLQLSKDTYDDDLDNLLAQIGDQYADLFLAAKNLSDAILLSDILRVNTEITKAPLSASMIKRYDEHHQDLTLLKALVRQQLPEKYKEIFFDQSKNGYAGYIDGGASQEEFYKFIKPILEKMDGTEELLVKLNREDLLRKQRTFDNGSIPHQIHLGELHAILRRQEDFYPFLKDNREKIEKILTFRIPYYVGPLARGNSRFAWMTRKSEETITPWNFEEVVDKGASAQSFIERMTNFDKNLPNEKVLPKHSLLYEYFTVYNELTKVKYVTEGMRKPAFLSGEQKKAIVDLLFKTNRKVTVKQLKEDYFKKIECFDSVEISGVEDRFNASLGTYHDLLKIIKDKDFLDNEENEDILEDIVLTLTLFEDREMIEERLKTYAHLFDDKVMKQLKRRRYTGWGRLSRKLINGIRDKQSGKTILDFLKSDGFANRNFMQLIHDDSLTFKEDIQKAQVSGQGDSLHEHIANLAGSPAIKKGILQTVKVVDELVKVMGRHKPENIVIEMARENQTTQKGQKNSRERMKRIEEGIKELGSQILKEHPVENTQLQNEKLYLYYLQNGRDMYVDQELDINRLSDYDVDHIVPQSFLKDDSIDNKVLTRSDKARGKSDNVPSEEVVKKMKNYWRQLLNAKLITQRKFDNLTKAERGGLSELDKAGFIKRQLVETRQITKHVAQILDSRMNTKYDENDKLIREVKVITLKSKLVSDFRKDFQFYKVREINNYHHAHDAYLNAVVGTALIKKYPKLESEFVYGDYKVYDVRKMIAKSEQEIGKATAKYFFYSNIMNFFKTEITLANGEIRKRPLIETNGETGEIVWDKGRDFATVRKVLSMPQVNIVKKTEVQTGGFSKESILPKRNSDKLIARKKDWDPKKYGGFDSPTVAYSVLVVAKVEKGKSKKLKSVKELLGITIMERSSFEKNPIDFLEAKGYKEVKKDLIIKLPKYSLFELENGRKRMLASAGELQKGNELALPSKYVNFLYLASHYEKLKGSPEDNEQKQLFVEQHKHYLDEIIEQISEFSKRVILADANLDKVLSAYNKHRDKPIREQAENIIHLFTLTNLGAPAAFKYFDTTIDRKRYTSTKEVLDATLIHQSITGLYETRIDLSQLGGDGGGSSPAPGGSGGVPWLTQQPLQLTILVPLQEYQEKILSKTALPEDQKQQLKTLFVKYDNLWQHWENQVGHRKIRPHNIATGDYPPRPQKQYPINPKAKPSIQIVIDDLLKQGVLTPQNSTMNTPVYPVPKPDGRWRMVLDYREVNKTIPLTAAQNQHSAGILATIVRQKYKTTLDLANGFWAHPITPESYWLTAFTWQGKQYCWTRLPQGFLNSPALFNADVVDLLKEIPNVQVYVDDIYLSHDDPKEHVQQLEKVFQILLQAGYVVSLKKSEIGQKTVEFLGFNITKEGRGLTDTFKTKLLNITPPKDLKQLQSILGLLNFARNFIPNFAELVQPLYNLIAPAKGKYIEWSEENTKQLNMVIEALNTASNLEERLPEQRLVIKVNTSPSAGYVRYYNETGKKPIMYLNYVFSKAELKFSMLEKLLTTMHKALIKAMDLAMGQEILVYSPIVSMTKIQKTPLPERKALPIRWITWMTYLEDPRIQFHYDKTLPELKHIPDVYTSSQSPVKHPSQYEGVFYTDGSAIKSPDPTKSNNAGMGIVHATYKPEYQVLNQWSIPLGNHTAQMAEIAAVEFACKKALKIPGPVLVITDSFYVAESANKELPYWKSNGFVNNKKKPLKHISKWKSIAECLSMKPDITIQHEKGISLQIPVFILKGNALADKLATQGSYVVNAGKRTADGSEFEKRTADGSEFESPKKKAKVE

SEQ ID NO: 1308 - protein, 2086 aa, synthetic construct
MPAAKRVKLDGGDKKYSIGLDIGTNSVGWAVITDEYKVPSKKFKVLGNTDRHSIKKNLIGALLFDSGETAEATRLKRTARRRYTRRKNRICYLQEIFSNEMAKVDDSFFHRLEESFLVEEDKKHERHPIFGNIVDEVAYHEKYPTIYHLRKKLVDSTDKADLRLIYLALAHMIKFRGHFLIEGDLNPDNSDVDKLFIQLVQTYNQLFEENPINASGVDAKAILSARLSKSRRLENLIAQLPGEKKNGLFGNLIALSLGLTPNFKSNFDLAEDAKLQLSKDTYDDDLDNLLAQIGDQYADLFLAAKNLSDAILLSDILRVNTEITKAPLSASMIKRYDEHHQDLTLLKALVRQQLPEKYKEIFFDQSKNGYAGYIDGGASQEEFYKFIKPILEKMDGTEELLVKLNREDLLRKQRTFDNGSIPHQIHLGELHAILRRQEDFYPFLKDNREKIEKILTFRIPYYVGPLARGNSRFAWMTRKSEETITPWNFEEVVDKGASAQSFIERMTNFDKNLPNEKVLPKHSLLYEYFTVYNELTKVKYVTEGMRKPAFLSGEQKKAIVDLLFKTNRKVTVKQLKEDYFKKIECFDSVEISGVEDRFNASLGTYHDLLKIIKDKDFLDNEENEDILEDIVLTLTLFEDREMIEERLKTYAHLFDDKVMKQLKRRRYTGWGRLSRKLINGIRDKQSGKTILDFLKSDGFANRNFMQLIHDDSLTFKEDIQKAQVSGQGDSLHEHIANLAGSPAIKKGILQTVKVVDELVKVMGRHKPENIVIEMARENQTTQKGQKNSRERMKRIEEGIKELGSQILKEHPVENTQLQNEKLYLYYLQNGRDMYVDQELDINRLSDYDVDHIVPQSFLKDDSIDNKVLTRSDKARGKSDNVPSEEVVKKMKNYWRQLLNAKLITQRKFDNLTKAERGGLSELDKAGFIKRQLVETRQITKHVAQILDSRMNTKYDENDKLIREVKVITLKSKLVSDFRKDFQFYKVREINNYHHAHDAYLNAVVGTALIKKYPKLESEFVYGDYKVYDVRKMIAKSEQEIGKATAKYFFYSNIMNFFKTEITLANGEIRKRPLIETNGETGEIVWDKGRDFATVRKVLSMPQVNIVKKTEVQTGGFSKESILPKRNSDKLIARKKDWDPKKYGGFDSPTVAYSVLVVAKVEKGKSKKLKSVKELLGITIMERSSFEKNPIDFLEAKGYKEVKKDLIIKLPKYSLFELENGRKRMLASAGELQKGNELALPSKYVNFLYLASHYEKLKGSPEDNEQKQLFVEQHKHYLDEIIEQISEFSKRVILADANLDKVLSAYNKHRDKPIREQAENIIHLFTLTNLGAPAAFKYFDTTIDRKRYTSTKEVLDATLIHQSITGLYETRIDLSQLGGDGGEAAAKEAAAKGGVPWLTQQPLQLTILVPLQEYQEKILSKTALPEDQKQQLKTLFVKYDNLWQHWENQVGHRKIRPHNIATGDYPPRPQKQYPINPKAKPSIQIVIDDLLKQGVLTPQNSTMNTPVYPVPKPDGRWRMVLDYREVNKTIPLTAAQNQHSAGILATIVRQKYKTTLDLANGFWAHPITPESYWLTAFTWQGKQYCWTRLPQGFLNSPALFNADVVDLLKEIPNVQVYVDDIYLSHDDPKEHVQQLEKVFQILLQAGYVVSLKKSEIGQKTVEFLGFNITKEGRGLTDTFKTKLLNITPPKDLKQLQSILGLLNFARNFIPNFAELVQPLYNLIAPAKGKYIEWSEENTKQLNMVIEALNTASNLEERLPEQRLVIKVNTSPSAGYVRYYNETGKKPIMYLNYVFSKAELKFSMLEKLLTTMHKALIKAMDLAMGQEILVYSPIVSMTKIQKTPLPERKALPIRWITWMTYLEDPRIQFHYDKTLPELKHIPDVYTSSQSPVKHPSQYEGVFYTDGSAIKSPDPTKSNNAGMGIVHATYKPEYQVLNQWSIPLGNHTAQMAEIAAVEFACKKALKIPGPVLVITDSFYVAESANKELPYWKSNGFVNNKKKPLKHISKWKSIAECLSMKPDITIQHEKGISLQIPVFILKGNALADKLATQGSYVVNAGKRTADGSEFEKRTADGSEFESPKKKAKVE

SEQ ID NO: 1309 - protein, 2087 aa, synthetic construct
MPAAKRVKLDGGDKKYSIGLDIGTNSVGWAVITDEYKVPSKKFKVLGNTDRHSIKKNLIGALLFDSGETAEATRLKRTARRRYTRRKNRICYLQEIFSNEMAKVDDSFFHRLEESFLVEEDKKHERHPIFGNIVDEVAYHEKYPTIYHLRKKLVDSTDKADLRLIYLALAHMIKFRGHFLIEGDLNPDNSDVDKLFIQLVQTYNQLFEENPINASGVDAKAILSARLSKSRRLENLIAQLPGEKKNGLFGNLIALSLGLTPNFKSNFDLAEDAKLQLSKDTYDDDLDNLLAQIGDQYADLFLAAKNLSDAILLSDILRVNTEITKAPLSASMIKRYDEHHQDLTLLKALVRQQLPEKYKEIFFDQSKNGYAGYIDGGASQEEFYKFIKPILEKMDGTEELLVKLNREDLLRKQRTFDNGSIPHQIHLGELHAILRRQEDFYPFLKDNREKIEKILTFRIPYYVGPLARGNSRFAWMTRKSEETITPWNFEEVVDKGASAQSFIERMTNFDKNLPNEKVLPKHSLLYEYFTVYNELTKVKYVTEGMRKPAFLSGEQKKAIVDLLFKTNRKVTVKQLKEDYFKKIECFDSVEISGVEDRFNASLGTYHDLLKIIKDKDFLDNEENEDILEDIVLTLTLFEDREMIEERLKTYAHLFDDKVMKQLKRRRYTGWGRLSRKLINGIRDKQSGKTILDFLKSDGFANRNFMQLIHDDSLTFKEDIQKAQVSGQGDSLHEHIANLAGSPAIKKGILQTVKVVDELVKVMGRHKPENIVIEMARENQTTQKGQKNSRERMKRIEEGIKELGSQILKEHPVENTQLQNEKLYLYYLQNGRDMYVDQELDINRLSDYDVDHIVPQSFLKDDSIDNKVLTRSDKARGKSDNVPSEEVVKKMKNYWRQLLNAKLITQRKFDNLTKAERGGLSELDKAGFIKRQLVETRQITKHVAQILDSRMNTKYDENDKLIREVKVITLKSKLVSDFRKDFQFYKVREINNYHHAHDAYLNAVVGTALIKKYPKLESEFVYGDYKVYDVRKMIAKSEQEIGKATAKYFFYSNIMNFFKTEITLANGEIRKRPLIETNGETGEIVWDKGRDFATVRKVLSMPQVNIVKKTEVQTGGFSKESILPKRNSDKLIARKKDWDPKKYGGFDSPTVAYSVLVVAKVEKGKSKKLKSVKELLGITIMERSSFEKNPIDFLEAKGYKEVKKDLIIKLPKYSLFELENGRKRMLASAGELQKGNELALPSKYVNFLYLASHYEKLKGSPEDNEQKQLFVEQHKHYLDEIIEQISEFSKRVILADANLDKVLSAYNKHRDKPIREQAENIIHLFTLTNLGAPAAFKYFDTTIDRKRYTSTKEVLDATLIHQSITGLYETRIDLSQLGGDGGGGGEAAAKPAPGGVPWLTQQPLQLTILVPLQEYQEKILSKTALPEDQKQQLKTLFVKYDNLWQHWENQVGHRKIRPHNIATGDYPPRPQKQYPINPKAKPSIQIVIDDLLKQGVLTPQNSTMNTPVYPVPKPDGRWRMVLDYREVNKTIPLTAAQNQHSAGILATIVRQKYKTTLDLANGFWAHPITPESYWLTAFTWQGKQYCWTRLPQGFLNSPALFNADVVDLLKEIPNVQVYVDDIYLSHDDPKEHVQQLEKVFQILLQAGYVVSLKKSEIGQKTVEFLGFNITKEGRGLTDTFKTKLLNITPPKDLKQLQSILGLLNFARNFIPNFAELVQPLYNLIAPAKGKYIEWSEENTKQLNMVIEALNTASNLEERLPEQRLVIKVNTSPSAGYVRYYNETGKKPIMYLNYVFSKAELKFSMLEKLLTTMHKALIKAMDLAMGQEILVYSPIVSMTKIQKTPLPERKALPIRWITWMTYLEDPRIQFHYDKTLPELKHIPDVYTSSQSPVKHPSQYEGVFYTDGSAIKSPDPTKSNNAGMGIVHATYKPEYQVLNQWSIPLGNHTAQMAEIAAVEFACKKALKIPGPVLVITDSFYVAESANKELPYWKSNGFVNNKKKPLKHISKWKSIAECLSMKPDITIQHEKGISLQIPVFILKGNALADKLATQGSYVVNAGKRTADGSEFEKRTADGSEFESPKKKAKVE

SEQ ID NO: 1310 - protein, 2085 aa, synthetic construct
MPAAKRVKLDGGDKKYSIGLDIGTNSVGWAVITDEYKVPSKKFKVLGNTDRHSIKKNLIGALLFDSGETAEATRLKRTARRRYTRRKNRICYLQEIFSNEMAKVDDSFFHRLEESFLVEEDKKHERHPIFGNIVDEVAYHEKYPTIYHLRKKLVDSTDKADLRLIYLALAHMIKFRGHFLIEGDLNPDNSDVDKLFIQLVQTYNQLFEENPINASGVDAKAILSARLSKSRRLENLIAQLPGEKKNGLFGNLIALSLGLTPNFKSNFDLAEDAKLQLSKDTYDDDLDNLLAQIGDQYADLFLAAKNLSDAILLSDILRVNTEITKAPLSASMIKRYDEHHQDLTLLKALVRQQLPEKYKEIFFDQSKNGYAGYIDGGASQEEFYKFIKPILEKMDGTEELLVKLNREDLLRKQRTFDNGSIPHQIHLGELHAILRRQEDFYPFLKDNREKIEKILTFRIPYYVGPLARGNSRFAWMTRKSEETITPWNFEEVVDKGASAQSFIERMTNFDKNLPNEKVLPKHSLLYEYFTVYNELTKVKYVTEGMRKPAFLSGEQKKAIVDLLFKTNRKVTVKQLKEDYFKKIECFDSVEISGVEDRFNASLGTYHDLLKIIKDKDFLDNEENEDILEDIVLTLTLFEDREMIEERLKTYAHLFDDKVMKQLKRRRYTGWGRLSRKLINGIRDKQSGKTILDFLKSDGFANRNFMQLIHDDSLTFKEDIQKAQVSGQGDSLHEHIANLAGSPAIKKGILQTVKVVDELVKVMGRHKPENIVIEMARENQTTQKGQKNSRERMKRIEEGIKELGSQILKEHPVENTQLQNEKLYLYYLQNGRDMYVDQELDINRLSDYDVDHIVPQSFLKDDSIDNKVLTRSDKARGKSDNVPSEEVVKKMKNYWRQLLNAKLITQRKFDNLTKAERGGLSELDKAGFIKRQLVETRQITKHVAQILDSRMNTKYDENDKLIREVKVITLKSKLVSDFRKDFQFYKVREINNYHHAHDAYLNAVVGTALIKKYPKLESEFVYGDYKVYDVRKMIAKSEQEIGKATAKYFFYSNIMNFFKTEITLANGEIRKRPLIETNGETGEIVWDKGRDFATVRKVLSMPQVNIVKKTEVQTGGFSKESILPKRNSDKLIARKKDWDPKKYGGFDSPTVAYSVLVVAKVEKGKSKKLKSVKELLGITIMERSSFEKNPIDFLEAKGYKEVKKDLIIKLPKYSLFELENGRKRMLASAGELQKGNELALPSKYVNFLYLASHYEKLKGSPEDNEQKQLFVEQHKHYLDEIIEQISEFSKRVILADANLDKVLSAYNKHRDKPIREQAENIIHLFTLTNLGAPAAFKYFDTTIDRKRYTSTKEVLDATLIHQSITGLYETRIDLSQLGGDGGGGSGGGPAPGGVPWLTQQPLQLTILVPLQEYQEKILSKTALPEDQKQQLKTLFVKYDNLWQHWENQVGHRKIRPHNIATGDYPPRPQKQYPINPKAKPSIQIVIDDLLKQGVLTPQNSTMNTPVYPVPKPDGRWRMVLDYREVNKTIPLTAAQNQHSAGILATIVRQKYKTTLDLANGFWAHPITPESYWLTAFTWQGKQYCWTRLPQGFLNSPALFNADVVDLLKEIPNVQVYVDDIYLSHDDPKEHVQQLEKVFQILLQAGYVVSLKKSEIGQKTVEFLGFNITKEGRGLTDTFKTKLLNITPPKDLKQLQSILGLLNFARNFIPNFAELVQPLYNLIAPAKGKYIEWSEENTKQLNMVIEALNTASNLEERLPEQRLVIKVNTSPSAGYVRYYNETGKKPIMYLNYVFSKAELKFSMLEKLLTTMHKALIKAMDLAMGQEILVYSPIVSMTKIQKTPLPERKALPIRWITWMTYLEDPRIQFHYDKTLPELKHIPDVYTSSQSPVKHPSQYEGVFYTDGSAIKSPDPTKSNNAGMGIVHATYKPEYQVLNQWSIPLGNHTAQMAEIAAVEFACKKALKIPGPVLVITDSFYVAESANKELPYWKSNGFVNNKKKPLKHISKWKSIAECLSMKPDITIQHEKGISLQIPVFILKGNALADKLATQGSYVVNAGKRTADGSEFEKRTADGSEFESPKKKAKVE

SEQ ID NO: 1311 - protein, 2122 aa, synthetic construct
MPAAKRVKLDGGDKKYSIGLDIGTNSVGWAVITDEYKVPSKKFKVLGNTDRHSIKKNLIGALLFDSGETAEATRLKRTARRRYTRRKNRICYLQEIFSNEMAKVDDSFFHRLEESFLVEEDKKHERHPIFGNIVDEVAYHEKYPTIYHLRKKLVDSTDKADLRLIYLALAHMIKFRGHFLIEGDLNPDNSDVDKLFIQLVQTYNQLFEENPINASGVDAKAILSARLSKSRRLENLIAQLPGEKKNGLFGNLIALSLGLTPNFKSNFDLAEDAKLQLSKDTYDDDLDNLLAQIGDQYADLFLAAKNLSDAILLSDILRVNTEITKAPLSASMIKRYDEHHQDLTLLKALVRQQLPEKYKEIFFDQSKNGYAGYIDGGASQEEFYKFIKPILEKMDGTEELLVKLNREDLLRKQRTFDNGSIPHQIHLGELHAILRRQEDFYPFLKDNREKIEKILTFRIPYYVGPLARGNSRFAWMTRKSEETITPWNFEEVVDKGASAQSFIERMTNFDKNLPNEKVLPKHSLLYEYFTVYNELTKVKYVTEGMRKPAFLSGEQKKAIVDLLFKTNRKVTVKQLKEDYFKKIECFDSVEISGVEDRFNASLGTYHDLLKIIKDKDFLDNEENEDILEDIVLTLTLFEDREMIEERLKTYAHLFDDKVMKQLKRRRYTGWGRLSRKLINGIRDKQSGKTILDFLKSDGFANRNFMQLIHDDSLTFKEDIQKAQVSGQGDSLHEHIANLAGSPAIKKGILQTVKVVDELVKVMGRHKPENIVIEMARENQTTQKGQKNSRERMKRIEEGIKELGSQILKEHPVENTQLQNEKLYLYYLQNGRDMYVDQELDINRLSDYDVDHIVPQSFLKDDSIDNKVLTRSDKARGKSDNVPSEEVVKKMKNYWRQLLNAKLITQRKFDNLTKAERGGLSELDKAGFIKRQLVETRQITKHVAQILDSRMNTKYDENDKLIREVKVITLKSKLVSDFRKDFQFYKVREINNYHHAHDAYLNAVVGTALIKKYPKLESEFVYGDYKVYDVRKMIAKSEQEIGKATAKYFFYSNIMNFFKTEITLANGEIRKRPLIETNGETGEIVWDKGRDFATVRKVLSMPQVNIVKKTEVQTGGFSKESILPKRNSDKLIARKKDWDPKKYGGFDSPTVAYSVLVVAKVEKGKSKKLKSVKELLGITIMERSSFEKNPIDFLEAKGYKEVKKDLIIKLPKYSLFELENGRKRMLASAGELQKGNELALPSKYVNFLYLASHYEKLKGSPEDNEQKQLFVEQHKHYLDEIIEQISEFSKRVILADANLDKVLSAYNKHRDKPIREQAENIIHLFTLTNLGAPAAFKYFDTTIDRKRYTSTKEVLDATLIHQSITGLYETRIDLSQLGGDGGAEAAAKEAAAKEAAAKEAAAKALEAEAAAKEAAAKEAAAKEAAAKAGGVPWLTQQPLQLTILVPLQEYQEKILSKTALPEDQKQQLKTLFVKYDNLWQHWENQVGHRKIRPHNIATGDYPPRPQKQYPINPKAKPSIQIVIDDLLKQGVLTPQNSTMNTPVYPVPKPDGRWRMVLDYREVNKTIPLTAAQNQHSAGILATIVRQKYKTTLDLANGFWAHPITPESYWLTAFTWQGKQYCWTRLPQGFLNSPALFNADVVDLLKEIPNVQVYVDDIYLSHDDPKEHVQQLEKVFQILLQAGYVVSLKKSEIGQKTVEFLGFNITKEGRGLTDTFKTKLLNITPPKDLKQLQSILGKLNFARNFIPNFAELVQPLYNLIAPAKGKYIEWSEENTKQLNMVIEALNTASNLEERLPEQRLVIKVNTSPSAGYVRYYNETGKKPIMYLNYVFSKAELKFSMLEKLLTTMHKALIKAMDLAMGQEILVYSPIVSMTKIQKTPLPERKALPIRWITWMTYLEDPRIQFHYDKTLPELKHIPDVYTSSQSPVKHPSQYEGVFYTDGSAIKSPDPTKSNNAGMGIVHATYKPEYQVLNQWSIPLGNHTAQMAEIAAVEFACKKALKIPGPVLVITDSFYVAESANKELPYWKSNGFVNNKKKPLKHISKWKSIAECLSMKPDITIQHEKGISLQIPVFILKGNALADKLATQGSYVVNAGKRTADGSEFEKRTADGSEFESPKKKAKVE

SEQ ID NO: 1312 - protein, 2092 aa, synthetic construct
MPAAKRVKLDGGDKKYSIGLDIGTNSVGWAVITDEYKVPSKKFKVLGNTDRHSIKKNLIGALLFDSGETAEATRLKRTARRRYTRRKNRICYLQEIFSNEMAKVDDSFFHRLEESFLVEEDKKHERHPIFGNIVDEVAYHEKYPTIYHLRKKLVDSTDKADLRLIYLALAHMIKFRGHFLIEGDLNPDNSDVDKLFIQLVQTYNQLFEENPINASGVDAKAILSARLSKSRRLENLIAQLPGEKKNGLFGNLIALSLGLTPNFKSNFDLAEDAKLQLSKDTYDDDLDNLLAQIGDQYADLFLAAKNLSDAILLSDILRVNTEITKAPLSASMIKRYDEHHQDLTLLKALVRQQLPEKYKEIFFDQSKNGYAGYIDGGASQEEFYKFIKPILEKMDGTEELLVKLNREDLLRKQRTFDNGSIPHQIHLGELHAILRRQEDFYPFLKDNREKIEKILTFRIPYYVGPLARGNSRFAWMTRKSEETITPWNFEEVVDKGASAQSFIERMTNFDKNLPNEKVLPKHSLLYEYFTVYNELTKVKYVTEGMRKPAFLSGEQKKAIVDLLFKTNRKVTVKQLKEDYFKKIECFDSVEISGVEDRFNASLGTYHDLLKIIKDKDFLDNEENEDILEDIVLTLTLFEDREMIEERLKTYAHLFDDKVMKQLKRRRYTGWGRLSRKLINGIRDKQSGKTILDFLKSDGFANRNFMQLIHDDSLTFKEDIQKAQVSGQGDSLHEHIANLAGSPAIKKGILQTVKVVDELVKVMGRHKPENIVIEMARENQTTQKGQKNSRERMKRIEEGIKELGSQILKEHPVENTQLQNEKLYLYYLQNGRDMYVDQELDINRLSDYDVDHIVPQSFLKDDSIDNKVLTRSDKARGKSDNVPSEEVVKKMKNYWRQLLNAKLITQRKFDNLTKAERGGLSELDKAGFIKRQLVETRQITKHVAQILDSRMNTKYDENDKLIREVKVITLKSKLVSDFRKDFQFYKVREINNYHHAHDAYLNAVVGTALIKKYPKLESEFVYGDYKVYDVRKMIAKSEQEIGKATAKYFFYSNIMNFFKTEITLANGEIRKRPLIETNGETGEIVWDKGRDFATVRKVLSMPQVNIVKKTEVQTGGFSKESILPKRNSDKLIARKKDWDPKKYGGFDSPTVAYSVLVVAKVEKGKSKKLKSVKELLGITIMERSSFEKNPIDFLEAKGYKEVKKDLIIKLPKYSLFELENGRKRMLASAGELQKGNELALPSKYVNFLYLASHYEKLKGSPEDNEQKQLFVEQHKHYLDEIIEQISEFSKRVILADANLDKVLSAYNKHRDKPIREQAENIIHLFTLTNLGAPAAFKYFDTTIDRKRYTSTKEVLDATLIHQSITGLYETRIDLSQLGGDGGSGSETPGTSESATPESGGVPWLTQQPLQLTILVPLQEYQEKILSKTALPEDQKQQLKTLFVKYDNLWQHWENQVGHRKIRPHNIATGDYPPRPQKQYPINPKAKPSIQIVIDDLLKQGVLTPQNSTMNTPVYPVPKPDGRWRMVLDYREVNKTIPLTAAQNQHSAGILATIVRQKYKTTLDLANGFWAHPITPESYWLTAFTWQGKQYCWTRLPQGFLNSPALFNADVVDLLKEIPNVQVYVDDIYLSHDDPKEHVQQLEKVFQILLQAGYVVSLKKSEIGQKTVEFLGFNITKEGRGLTDTFKTKLLNITPPKDLKQLQSILGKLNFARNFIPNFAELVQPLYNLIAPAKGKYIEWSEENTKQLNMVIEALNTASNLEERLPEQRLVIKVNTSPSAGYVRYYNETGKKPIMYLNYVFSKAELKFSMLEKLLTTMHKALIKAMDLAMGQEILVYSPIVSMTKIQKTPLPERKALPIRWITWMTYLEDPRIQFHYDKTLPELKHIPDVYTSSQSPVKHPSQYEGVFYTDGSAIKSPDPTKSNNAGMGIVHATYKPEYQVLNQWSIPLGNHTAQMAEIAAVEFACKKALKIPGPVLVITDSFYVAESANKELPYWKSNGFVNNKKKPLKHISKWKSIAECLSMKPDITIQHEKGISLQIPVFILKGNALADKLATQGSYVVNAGKRTADGSEFEKRTADGSEFESPKKKAKVE

SEQ ID NO: 1313 - protein, 2096 aa, synthetic construct
MPAAKRVKLDGGDKKYSIGLDIGTNSVGWAVITDEYKVPSKKFKVLGNTDRHSIKKNLIGALLFDSGETAEATRLKRTARRRYTRRKNRICYLQEIFSNEMAKVDDSFFHRLEESFLVEEDKKHERHPIFGNIVDEVAYHEKYPTIYHLRKKLVDSTDKADLRLIYLALAHMIKFRGHFLIEGDLNPDNSDVDKLFIQLVQTYNQLFEENPINASGVDAKAILSARLSKSRRLENLIAQLPGEKKNGLFGNLIALSLGLTPNFKSNFDLAEDAKLQLSKDTYDDDLDNLLAQIGDQYADLFLAAKNLSDAILLSDILRVNTEITKAPLSASMIKRYDEHHQDLTLLKALVRQQLPEKYKEIFFDQSKNGYAGYIDGGASQEEFYKFIKPILEKMDGTEELLVKLNREDLLRKQRTFDNGSIPHQIHLGELHAILRRQEDFYPFLKDNREKIEKILTFRIPYYVGPLARGNSRFAWMTRKSEETITPWNFEEVVDKGASAQSFIERMTNFDKNLPNEKVLPKHSLLYEYFTVYNELTKVKYVTEGMRKPAFLSGEQKKAIVDLLFKTNRKVTVKQLKEDYFKKIECFDSVEISGVEDRFNASLGTYHDLLKIIKDKDFLDNEENEDILEDIVLTLTLFEDREMIEERLKTYAHLFDDKVMKQLKRRRYTGWGRLSRKLINGIRDKQSGKTILDFLKSDGFANRNFMQLIHDDSLTFKEDIQKAQVSGQGDSLHEHIANLAGSPAIKKGILQTVKVVDELVKVMGRHKPENIVIEMARENQTTQKGQKNSRERMKRIEEGIKELGSQILKEHPVENTQLQNEKLYLYYLQNGRDMYVDQELDINRLSDYDVDHIVPQSFLKDDSIDNKVLTRSDKARGKSDNVPSEEVVKKMKNYWRQLLNAKLITQRKFDNLTKAERGGLSELDKAGFIKRQLVETRQITKHVAQILDSRMNTKYDENDKLIREVKVITLKSKLVSDFRKDFQFYKVREINNYHHAHDAYLNAVVGTALIKKYPKLESEFVYGDYKVYDVRKMIAKSEQEIGKATAKYFFYSNIMNFFKTEITLANGEIRKRPLIETNGETGEIVWDKGRDFATVRKVLSMPQVNIVKKTEVQTGGFSKESILPKRNSDKLIARKKDWDPKKYGGFDSPTVAYSVLVVAKVEKGKSKKLKSVKELLGITIMERSSFEKNPIDFLEAKGYKEVKKDLIIKLPKYSLFELENGRKRMLASAGELQKGNELALPSKYVNFLYLASHYEKLKGSPEDNEQKQLFVEQHKHYLDEIIEQISEFSKRVILADANLDKVLSAYNKHRDKPIREQAENIIHLFTLTNLGAPAAFKYFDTTIDRKRYTSTKEVLDATLIHQSITGLYETRIDLSQLGGDGGEAAAKEAAAKEAAAKEAAAKGGVPWLTQQPLQLTILVPLQEYQEKILSKTALPEDQKQQLKTLFVKYDNLWQHWENQVGHRKIRPHNIATGDYPPRPQKQYPINPKAKPSIQIVIDDLLKQGVLTPQNSTMNTPVYPVPKPDGRWRMVLDYREVNKTIPLTAAQNQHSAGILATIVRQKYKTTLDLANGFWAHPITPESYWLTAFTWQGKQYCWTRLPQGFLNSPALFNADVVDLLKEIPNVQVYVDDIYLSHDDPKEHVQQLEKVFQILLQAGYVVSLKKSEIGQKTVEFLGFNITKEGRGLTDTFKTKLLNITPPKDLKQLQSILGKLNFARNFIPNFAELVQPLYNLIAPAKGKYIEWSEENTKQLNMVIEALNTASNLEERLPEQRLVIKVNTSPSAGYVRYYNETGKKPIMYLNYVFSKAELKFSMLEKLLTTMHKALIKAMDLAMGQEILVYSPIVSMTKIQKTPLPERKALPIRWITWMTYLEDPRIQFHYDKTLPELKHIPDVYTSSQSPVKHPSQYEGVFYTDGSAIKSPDPTKSNNAGMGIVHATYKPEYQVLNQWSIPLGNHTAQMAEIAAVEFACKKALKIPGPVLVITDSFYVAESANKELPYWKSNGFVNNKKKPLKHISKWKSIAECLSMKPDITIQHEKGISLQIPVFILKGNALADKLATQGSYVVNAGKRTADGSEFEKRTADGSEFESPKKKAKVE

SEQ ID NO: 1314 - protein, 2096 aa, synthetic construct
MPAAKRVKLDGGDKKYSIGLDIGTNSVGWAVITDEYKVPSKKFKVLGNTDRHSIKKNLIGALLFDSGETAEATRLKRTARRRYTRRKNRICYLQEIFSNEMAKVDDSFFHRLEESFLVEEDKKHERHPIFGNIVDEVAYHEKYPTIYHLRKKLVDSTDKADLRLIYLALAHMIKFRGHFLIEGDLNPDNSDVDKLFIQLVQTYNQLFEENPINASGVDAKAILSARLSKSRRLENLIAQLPGEKKNGLFGNLIALSLGLTPNFKSNFDLAEDAKLQLSKDTYDDDLDNLLAQIGDQYADLFLAAKNLSDAILLSDILRVNTEITKAPLSASMIKRYDEHHQDLTLLKALVRQQLPEKYKEIFFDQSKNGYAGYIDGGASQEEFYKFIKPILEKMDGTEELLVKLNREDLLRKQRTFDNGSIPHQIHLGELHAILRRQEDFYPFLKDNREKIEKILTFRIPYYVGPLARGNSRFAWMTRKSEETITPWNFEEVVDKGASAQSFIERMTNFDKNLPNEKVLPKHSLLYEYFTVYNELTKVKYVTEGMRKPAFLSGEQKKAIVDLLFKTNRKVTVKQLKEDYFKKIECFDSVEISGVEDRFNASLGTYHDLLKIIKDKDFLDNEENEDILEDIVLTLTLFEDREMIEERLKTYAHLFDDKVMKQLKRRRYTGWGRLSRKLINGIRDKQSGKTILDFLKSDGFANRNFMQLIHDDSLTFKEDIQKAQVSGQGDSLHEHIANLAGSPAIKKGILQTVKVVDELVKVMGRHKPENIVIEMARENQTTQKGQKNSRERMKRIEEGIKELGSQILKEHPVENTQLQNEKLYLYYLQNGRDMYVDQELDINRLSDYDVDHIVPQSFLKDDSIDNKVLTRSDKARGKSDNVPSEEVVKKMKNYWRQLLNAKLITQRKFDNLTKAERGGLSELDKAGFIKRQLVETRQITKHVAQILDSRMNTKYDENDKLIREVKVITLKSKLVSDFRKDFQFYKVREINNYHHAHDAYLNAVVGTALIKKYPKLESEFVYGDYKVYDVRKMIAKSEQEIGKATAKYFFYSNIMNFFKTEITLANGEIRKRPLIETNGETGEIVWDKGRDFATVRKVLSMPQVNIVKKTEVQTGGFSKESILPKRNSDKLIARKKDWDPKKYGGFDSPTVAYSVLVVAKVEKGKSKKLKSVKELLGITIMERSSFEKNPIDFLEAKGYKEVKKDLIIKLPKYSLFELENGRKRMLASAGELQKGNELALPSKYVNFLYLASHYEKLKGSPEDNEQKQLFVEQHKHYLDEIIEQISEFSKRVILADANLDKVLSAYNKHRDKPIREQAENIIHLFTLTNLGAPAAFKYFDTTIDRKRYTSTKEVLDATLIHQSITGLYETRIDLSQLGGDGGGGGGSGGGGSGGGGSGGGGSGGVPWLTQQPLQLTILVPLQEYQEKILSKTALPEDQKQQLKTLFVKYDNLWQHWENQVGHRKIRPHNIATGDYPPRPQKQYPINPKAKPSIQIVIDDLLKQGVLTPQNSTMNTPVYPVPKPDGRWRMVLDYREVNKTIPLTAAQNQHSAGILATIVRQKYKTTLDLANGFWAHPITPESYWLTAFTWQGKQYCWTRLPQGFLNSPALFNADVVDLLKEIPNVQVYVDDIYLSHDDPKEHVQQLEKVFQILLQAGYVVSLKKSEIGQKTVEFLGFNITKEGRGLTDTFKTKLLNITPPKDLKQLQSILGKLNFARNFIPNFAELVQPLYNLIAPAKGKYIEWSEENTKQLNMVIEALNTASNLEERLPEQRLVIKVNTSPSAGYVRYYNETGKKPIMYLNYVFSKAELKFSMLEKLLTTMHKALIKAMDLAMGQEILVYSPIVSMTKIQKTPLPERKALPIRWITWMTYLEDPRIQFHYDKTLPELKHIPDVYTSSQSPVKHPSQYEGVFYTDGSAIKSPDPTKSNNAGMGIVHATYKPEYQVLNQWSIPLGNHTAQMAEIAAVEFACKKALKIPGPVLVITDSFYVAESANKELPYWKSNGFVNNKKKPLKHISKWKSIAECLSMKPDITIQHEKGISLQIPVFILKGNALADKLATQGSYVVNAGKRTADGSEFEKRTADGSEFESPKKKAKVE

SEQ ID NO: 1315 - protein, 2087 aa, synthetic construct
MPAAKRVKLDGGDKKYSIGLDIGTNSVGWAVITDEYKVPSKKFKVLGNTDRHSIKKNLIGALLFDSGETAEATRLKRTARRRYTRRKNRICYLQEIFSNEMAKVDDSFFHRLEESFLVEEDKKHERHPIFGNIVDEVAYHEKYPTIYHLRKKLVDSTDKADLRLIYLALAHMIKFRGHFLIEGDLNPDNSDVDKLFIQLVQTYNQLFEENPINASGVDAKAILSARLSKSRRLENLIAQLPGEKKNGLFGNLIALSLGLTPNFKSNFDLAEDAKLQLSKDTYDDDLDNLLAQIGDQYADLFLAAKNLSDAILLSDILRVNTEITKAPLSASMIKRYDEHHQDLTLLKALVRQQLPEKYKEIFFDQSKNGYAGYIDGGASQEEFYKFIKPILEKMDGTEELLVKLNREDLLRKQRTFDNGSIPHQIHLGELHAILRRQEDFYPFLKDNREKIEKILTFRIPYYVGPLARGNSRFAWMTRKSEETITPWNFEEVVDKGASAQSFIERMTNFDKNLPNEKVLPKHSLLYEYFTVYNELTKVKYVTEGMRKPAFLSGEQKKAIVDLLFKTNRKVTVKQLKEDYFKKIECFDSVEISGVEDRFNASLGTYHDLLKIIKDKDFLDNEENEDILEDIVLTLTLFEDREMIEERLKTYAHLFDDKVMKQLKRRRYTGWGRLSRKLINGIRDKQSGKTILDFLKSDGFANRNFMQLIHDDSLTFKEDIQKAQVSGQGDSLHEHIANLAGSPAIKKGILQTVKVVDELVKVMGRHKPENIVIEMARENQTTQKGQKNSRERMKRIEEGIKELGSQILKEHPVENTQLQNEKLYLYYLQNGRDMYVDQELDINRLSDYDVDHIVPQSFLKDDSIDNKVLTRSDKARGKSDNVPSEEVVKKMKNYWRQLLNAKLITQRKFDNLTKAERGGLSELDKAGFIKRQLVETRQITKHVAQILDSRMNTKYDENDKLIREVKVITLKSKLVSDFRKDFQFYKVREINNYHHAHDAYLNAVVGTALIKKYPKLESEFVYGDYKVYDVRKMIAKSEQEIGKATAKYFFYSNIMNFFKTEITLANGEIRKRPLIETNGETGEIVWDKGRDFATVRKVLSMPQVNIVKKTEVQTGGFSKESILPKRNSDKLIARKKDWDPKKYGGFDSPTVAYSVLVVAKVEKGKSKKLKSVKELLGITIMERSSFEKNPIDFLEAKGYKEVKKDLIIKLPKYSLFELENGRKRMLASAGELQKGNELALPSKYVNFLYLASHYEKLKGSPEDNEQKQLFVEQHKHYLDEIIEQISEFSKRVILADANLDKVLSAYNKHRDKPIREQAENIIHLFTLTNLGAPAAFKYFDTTIDRKRYTSTKEVLDATLIHQSITGLYETRIDLSQLGGDGGGSSPAPEAAAKGGVPWLTQQPLQLTILVPLQEYQEKILSKTALPEDQKQQLKTLFVKYDNLWQHWENQVGHRKIRPHNIATGDYPPRPQKQYPINPKAKPSIQIVIDDLLKQGVLTPQNSTMNTPVYPVPKPDGRWRMVLDYREVNKTIPLTAAQNQHSAGILATIVRQKYKTTLDLANGFWAHPITPESYWLTAFTWQGKQYCWTRLPQGFLNSPALFNADVVDLLKEIPNVQVYVDDIYLSHDDPKEHVQQLEKVFQILLQAGYVVSLKKSEIGQKTVEFLGFNITKEGRGLTDTFKTKLLNITPPKDLKQLQSILGKLNFARNFIPNFAELVQPLYNLIAPAKGKYIEWSEENTKQLNMVIEALNTASNLEERLPEQRLVIKVNTSPSAGYVRYYNETGKKPIMYLNYVFSKAELKFSMLEKLLTTMHKALIKAMDLAMGQEILVYSPIVSMTKIQKTPLPERKALPIRWITWMTYLEDPRIQFHYDKTLPELKHIPDVYTSSQSPVKHPSQYEGVFYTDGSAIKSPDPTKSNNAGMGIVHATYKPEYQVLNQWSIPLGNHTAQMAEIAAVEFACKKALKIPGPVLVITDSFYVAESANKELPYWKSNGFVNNKKKPLKHISKWKSIAECLSMKPDITIQHEKGISLQIPVFILKGNALADKLATQGSYVVNAGKRTADGSEFEKRTADGSEFESPKKKAKVE

SEQ ID NO: 1316 - protein, 2086 aa, synthetic construct
MPAAKRVKLDGGDKKYSIGLDIGTNSVGWAVITDEYKVPSKKFKVLGNTDRHSIKKNLIGALLFDSGETAEATRLKRTARRRYTRRKNRICYLQEIFSNEMAKVDDSFFHRLEESFLVEEDKKHERHPIFGNIVDEVAYHEKYPTIYHLRKKLVDSTDKADLRLIYLALAHMIKFRGHFLIEGDLNPDNSDVDKLFIQLVQTYNQLFEENPINASGVDAKAILSARLSKSRRLENLIAQLPGEKKNGLFGNLIALSLGLTPNFKSNFDLAEDAKLQLSKDTYDDDLDNLLAQIGDQYADLFLAAKNLSDAILLSDILRVNTEITKAPLSASMIKRYDEHHQDLTLLKALVRQQLPEKYKEIFFDQSKNGYAGYIDGGASQEEFYKFIKPILEKMDGTEELLVKLNREDLLRKQRTFDNGSIPHQIHLGELHAILRRQEDFYPFLKDNREKIEKILTFRIPYYVGPLARGNSRFAWMTRKSEETITPWNFEEVVDKGASAQSFIERMTNFDKNLPNEKVLPKHSLLYEYFTVYNELTKVKYVTEGMRKPAFLSGEQKKAIVDLLFKTNRKVTVKQLKEDYFKKIECFDSVEISGVEDRFNASLGTYHDLLKIIKDKDFLDNEENEDILEDIVLTLTLFEDREMIEERLKTYAHLFDDKVMKQLKRRRYTGWGRLSRKLINGIRDKQSGKTILDFLKSDGFANRNFMQLIHDDSLTFKEDIQKAQVSGQGDSLHEHIANLAGSPAIKKGILQTVKVVDELVKVMGRHKPENIVIEMARENQTTQKGQKNSRERMKRIEEGIKELGSQILKEHPVENTQLQNEKLYLYYLQNGRDMYVDQELDINRLSDYDVDHIVPQSFLKDDSIDNKVLTRSDKARGKSDNVPSEEVVKKMKNYWRQLLNAKLITQRKFDNLTKAERGGLSELDKAGFIKRQLVETRQITKHVAQILDSRMNTKYDENDKLIREVKVITLKSKLVSDFRKDFQFYKVREINNYHHAHDAYLNAVVGTALIKKYPKLESEFVYGDYKVYDVRKMIAKSEQEIGKATAKYFFYSNIMNFFKTEITLANGEIRKRPLIETNGETGEIVWDKGRDFATVRKVLSMPQVNIVKKTEVQTGGFSKESILPKRNSDKLIARKKDWDPKKYGGFDSPTVAYSVLVVAKVEKGKSKKLKSVKELLGITIMERSSFEKNPIDFLEAKGYKEVKKDLIIKLPKYSLFELENGRKRMLASAGELQKGNELALPSKYVNFLYLASHYEKLKGSPEDNEQKQLFVEQHKHYLDEIIEQISEFSKRVILADANLDKVLSAYNKHRDKPIREQAENIIHLFTLTNLGAPAAFKYFDTTIDRKRYTSTKEVLDATLIHQSITGLYETRIDLSQLGGDGGGGGGSGGGGSGGVPWLTQQPLQLTILVPLQEYQEKILSKTALPEDQKQQLKTLFVKYDNLWQHWENQVGHRKIRPHNIATGDYPPRPQKQYPINPKAKPSIQIVIDDLLKQGVLTPQNSTMNTPVYPVPKPDGRWRMVLDYREVNKTIPLTAAQNQHSAGILATIVRQKYKTTLDLANGFWAHPITPESYWLTAFTWQGKQYCWTRLPQGFLNSPALFNADVVDLLKEIPNVQVYVDDIYLSHDDPKEHVQQLEKVFQILLQAGYVVSLKKSEIGQKTVEFLGFNITKEGRGLTDTFKTKLLNITPPKDLKQLQSILGKLNFARNFIPNFAELVQPLYNLIAPAKGKYIEWSEENTKQLNMVIEALNTASNLEERLPEQRLVIKVNTSPSAGYVRYYNETGKKPIMYLNYVFSKAELKFSMLEKLLTTMHKALIKAMDLAMGQEILVYSPIVSMTKIQKTPLPERKALPIRWITWMTYLEDPRIQFHYDKTLPELKHIPDVYTSSQSPVKHPSQYEGVFYTDGSAIKSPDPTKSNNAGMGIVHATYKPEYQVLNQWSIPLGNHTAQMAEIAAVEFACKKALKIPGPVLVITDSFYVAESANKELPYWKSNGFVNNKKKPLKHISKWKSIAECLSMKPDITIQHEKGISLQIPVFILKGNALADKLATQGSYVVNAGKRTADGSEFEKRTADGSEFESPKKKAKVE

SEQ ID NO: 1317 - protein, 2087 aa, synthetic construct
MPAAKRVKLDGGDKKYSIGLDIGTNSVGWAVITDEYKVPSKKFKVLGNTDRHSIKKNLIGALLFDSGETAEATRLKRTARRRYTRRKNRICYLQEIFSNEMAKVDDSFFHRLEESFLVEEDKKHERHPIFGNIVDEVAYHEKYPTIYHLRKKLVDSTDKADLRLIYLALAHMIKFRGHFLIEGDLNPDNSDVDKLFIQLVQTYNQLFEENPINASGVDAKAILSARLSKSRRLENLIAQLPGEKKNGLFGNLIALSLGLTPNFKSNFDLAEDAKLQLSKDTYDDDLDNLLAQIGDQYADLFLAAKNLSDAILLSDILRVNTEITKAPLSASMIKRYDEHHQDLTLLKALVRQQLPEKYKEIFFDQSKNGYAGYIDGGASQEEFYKFIKPILEKMDGTEELLVKLNREDLLRKQRTFDNGSIPHQIHLGELHAILRRQEDFYPFLKDNREKIEKILTFRIPYYVGPLARGNSRFAWMTRKSEETITPWNFEEVVDKGASAQSFIERMTNFDKNLPNEKVLPKHSLLYEYFTVYNELTKVKYVTEGMRKPAFLSGEQKKAIVDLLFKTNRKVTVKQLKEDYFKKIECFDSVEISGVEDRFNASLGTYHDLLKIIKDKDFLDNEENEDILEDIVLTLTLFEDREMIEERLKTYAHLFDDKVMKQLKRRRYTGWGRLSRKLINGIRDKQSGKTILDFLKSDGFANRNFMQLIHDDSLTFKEDIQKAQVSGQGDSLHEHIANLAGSPAIKKGILQTVKVVDELVKVMGRHKPENIVIEMARENQTTQKGQKNSRERMKRIEEGIKELGSQILKEHPVENTQLQNEKLYLYYLQNGRDMYVDQELDINRLSDYDVDHIVPQSFLKDDSIDNKVLTRSDKARGKSDNVPSEEVVKKMKNYWRQLLNAKLITQRKFDNLTKAERGGLSELDKAGFIKRQLVETRQITKHVAQILDSRMNTKYDENDKLIREVKVITLKSKLVSDFRKDFQFYKVREINNYHHAHDAYLNAVVGTALIKKYPKLESEFVYGDYKVYDVRKMIAKSEQEIGKATAKYFFYSNIMNFFKTEITLANGEIRKRPLIETNGETGEIVWDKGRDFATVRKVLSMPQVNIVKKTEVQTGGFSKESILPKRNSDKLIARKKDWDPKKYGGFDSPTVAYSVLVVAKVEKGKSKKLKSVKELLGITIMERSSFEKNPIDFLEAKGYKEVKKDLIIKLPKYSLFELENGRKRMLASAGELQKGNELALPSKYVNFLYLASHYEKLKGSPEDNEQKQLFVEQHKHYLDEIIEQISEFSKRVILADANLDKVLSAYNKHRDKPIREQAENIIHLFTLTNLGAPAAFKYFDTTIDRKRYTSTKEVLDATLIHQSITGLYETRIDLSQLGGDGGPAPGSSEAAAKGGVPWLTQQPLQLTILVPLQEYQEKILSKTALPEDQKQQLKTLFVKYDNLWQHWENQVGHRKIRPHNIATGDYPPRPQKQYPINPKAKPSIQIVIDDLLKQGVLTPQNSTMNTPVYPVPKPDGRWRMVLDYREVNKTIPLTAAQNQHSAGILATIVRQKYKTTLDLANGFWAHPITPESYWLTAFTWQGKQYCWTRLPQGFLNSPALFNADVVDLLKEIPNVQVYVDDIYLSHDDPKEHVQQLEKVFQILLQAGYVVSLKKSEIGQKTVEFLGFNITKEGRGLTDTFKTKLLNITPPKDLKQLQSILGKLNFARNFIPNFAELVQPLYNLIAPAKGKYIEWSEENTKQLNMVIEALNTASNLEERLPEQRLVIKVNTSPSAGYVRYYNETGKKPIMYLNYVFSKAELKFSMLEKLLTTMHKALIKAMDLAMGQEILVYSPIVSMTKIQKTPLPERKALPIRWITWMTYLEDPRIQFHYDKTLPELKHIPDVYTSSQSPVKHPSQYEGVFYTDGSAIKSPDPTKSNNAGMGIVHATYKPEYQVLNQWSIPLGNHTAQMAEIAAVEFACKKALKIPGPVLVITDSFYVAESANKELPYWKSNGFVNNKKKPLKHISKWKSIAECLSMKPDITIQHEKGISLQIPVFILKGNALADKLATQGSYVVNAGKRTADGSEFEKRTADGSEFESPKKKAKVE

SEQ ID NO: 1318 - protein, 2087 aa, synthetic construct
MPAAKRVKLDGGDKKYSIGLDIGTNSVGWAVITDEYKVPSKKFKVLGNTDRHSIKKNLIGALLFDSGETAEATRLKRTARRRYTRRKNRICYLQEIFSNEMAKVDDSFFHRLEESFLVEEDKKHERHPIFGNIVDEVAYHEKYPTIYHLRKKLVDSTDKADLRLIYLALAHMIKFRGHFLIEGDLNPDNSDVDKLFIQLVQTYNQLFEENPINASGVDAKAILSARLSKSRRLENLIAQLPGEKKNGLFGNLIALSLGLTPNFKSNFDLAEDAKLQLSKDTYDDDLDNLLAQIGDQYADLFLAAKNLSDAILLSDILRVNTEITKAPLSASMIKRYDEHHQDLTLLKALVRQQLPEKYKEIFFDQSKNGYAGYIDGGASQEEFYKFIKPILEKMDGTEELLVKLNREDLLRKQRTFDNGSIPHQIHLGELHAILRRQEDFYPFLKDNREKIEKILTFRIPYYVGPLARGNSRFAWMTRKSEETITPWNFEEVVDKGASAQSFIERMTNFDKNLPNEKVLPKHSLLYEYFTVYNELTKVKYVTEGMRKPAFLSGEQKKAIVDLLFKTNRKVTVKQLKEDYFKKIECFDSVEISGVEDRFNASLGTYHDLLKIIKDKDFLDNEENEDILEDIVLTLTLFEDREMIEERLKTYAHLFDDKVMKQLKRRRYTGWGRLSRKLINGIRDKQSGKTILDFLKSDGFANRNFMQLIHDDSLTFKEDIQKAQVSGQGDSLHEHIANLAGSPAIKKGILQTVKVVDELVKVMGRHKPENIVIEMARENQTTQKGQKNSRERMKRIEEGIKELGSQILKEHPVENTQLQNEKLYLYYLQNGRDMYVDQELDINRLSDYDVDHIVPQSFLKDDSIDNKVLTRSDKARGKSDNVPSEEVVKKMKNYWRQLLNAKLITQRKFDNLTKAERGGLSELDKAGFIKRQLVETRQITKHVAQILDSRMNTKYDENDKLIREVKVITLKSKLVSDFRKDFQFYKVREINNYHHAHDAYLNAVVGTALIKKYPKLESEFVYGDYKVYDVRKMIAKSEQEIGKATAKYFFYSNIMNFFKTEITLANGEIRKRPLIETNGETGEIVWDKGRDFATVRKVLSMPQVNIVKKTEVQTGGFSKESILPKRNSDKLIARKKDWDPKKYGGFDSPTVAYSVLVVAKVEKGKSKKLKSVKELLGITIMERSSFEKNPIDFLEAKGYKEVKKDLIIKLPKYSLFELENGRKRMLASAGELQKGNELALPSKYVNFLYLASHYEKLKGSPEDNEQKQLFVEQHKHYLDEIIEQISEFSKRVILADANLDKVLSAYNKHRDKPIREQAENIIHLFTLTNLGAPAAFKYFDTTIDRKRYTSTKEVLDATLIHQSITGLYETRIDLSQLGGDGGPAPAPAPAPAPGGVPWLTQQPLQLTILVPLQEYQEKILSKTALPEDQKQQLKTLFVKYDNLWQHWENQVGHRKIRPHNIATGDYPPRPQKQYPINPKAKPSIQIVIDDLLKQGVLTPQNSTMNTPVYPVPKPDGRWRMVLDYREVNKTIPLTAAQNQHSAGILATIVRQKYKTTLDLANGFWAHPITPESYWLTAFTWQGKQYCWTRLPQGFLNSPALFNADVVDLLKEIPNVQVYVDDIYLSHDDPKEHVQQLEKVFQILLQAGYVVSLKKSEIGQKTVEFLGFNITKEGRGLTDTFKTKLLNITPPKDLKQLQSILGKLNFARNFIPNFAELVQPLYNLIAPAKGKYIEWSEENTKQLNMVIEALNTASNLEERLPEQRLVIKVNTSPSAGYVRYYNETGKKPIMYLNYVFSKAELKFSMLEKLLTTMHKALIKAMDLAMGQEILVYSPIVSMTKIQKTPLPERKALPIRWITWMTYLEDPRIQFHYDKTLPELKHIPDVYTSSQSPVKHPSQYEGVFYTDGSAIKSPDPTKSNNAGMGIVHATYKPEYQVLNQWSIPLGNHTAQMAEIAAVEFACKKALKIPGPVLVITDSFYVAESANKELPYWKSNGFVNNKKKPLKHISKWKSIAECLSMKPDITIQHEKGISLQIPVFILKGNALADKLATQGSYVVNAGKRTADGSEFEKRTADGSEFESPKKKAKVE

SEQ ID NO: 1319 - protein, 2085 aa, synthetic construct
MPAAKRVKLDGGDKKYSIGLDIGTNSVGWAVITDEYKVPSKKFKVLGNTDRHSIKKNLIGALLFDSGETAEATRLKRTARRRYTRRKNRICYLQEIFSNEMAKVDDSFFHRLEESFLVEEDKKHERHPIFGNIVDEVAYHEKYPTIYHLRKKLVDSTDKADLRLIYLALAHMIKFRGHFLIEGDLNPDNSDVDKLFIQLVQTYNQLFEENPINASGVDAKAILSARLSKSRRLENLIAQLPGEKKNGLFGNLIALSLGLTPNFKSNFDLAEDAKLQLSKDTYDDDLDNLLAQIGDQYADLFLAAKNLSDAILLSDILRVNTEITKAPLSASMIKRYDEHHQDLTLLKALVRQQLPEKYKEIFFDQSKNGYAGYIDGGASQEEFYKFIKPILEKMDGTEELLVKLNREDLLRKQRTFDNGSIPHQIHLGELHAILRRQEDFYPFLKDNREKIEKILTFRIPYYVGPLARGNSRFAWMTRKSEETITPWNFEEVVDKGASAQSFIERMTNFDKNLPNEKVLPKHSLLYEYFTVYNELTKVKYVTEGMRKPAFLSGEQKKAIVDLLFKTNRKVTVKQLKEDYFKKIECFDSVEISGVEDRFNASLGTYHDLLKIIKDKDFLDNEENEDILEDIVLTLTLFEDREMIEERLKTYAHLFDDKVMKQLKRRRYTGWGRLSRKLINGIRDKQSGKTILDFLKSDGFANRNFMQLIHDDSLTFKEDIQKAQVSGQGDSLHEHIANLAGSPAIKKGILQTVKVVDELVKVMGRHKPENIVIEMARENQTTQKGQKNSRERMKRIEEGIKELGSQILKEHPVENTQLQNEKLYLYYLQNGRDMYVDQELDINRLSDYDVDHIVPQSFLKDDSIDNKVLTRSDKARGKSDNVPSEEVVKKMKNYWRQLLNAKLITQRKFDNLTKAERGGLSELDKAGFIKRQLVETRQITKHVAQILDSRMNTKYDENDKLIREVKVITLKSKLVSDFRKDFQFYKVREINNYHHAHDAYLNAVVGTALIKKYPKLESEFVYGDYKVYDVRKMIAKSEQEIGKATAKYFFYSNIMNFFKTEITLANGEIRKRPLIETNGETGEIVWDKGRDFATVRKVLSMPQVNIVKKTEVQTGGFSKESILPKRNSDKLIARKKDWDPKKYGGFDSPTVAYSVLVVAKVEKGKSKKLKSVKELLGITIMERSSFEKNPIDFLEAKGYKEVKKDLIIKLPKYSLFELENGRKRMLASAGELQKGNELALPSKYVNFLYLASHYEKLKGSPEDNEQKQLFVEQHKHYLDEIIEQISEFSKRVILADANLDKVLSAYNKHRDKPIREQAENIIHLFTLTNLGAPAAFKYFDTTIDRKRYTSTKEVLDATLIHQSITGLYETRIDLSQLGGDGGPAPGSSGGGGGVPWLTQQPLQLTILVPLQEYQEKILSKTALPEDQKQQLKTLFVKYDNLWQHWENQVGHRKIRPHNIATGDYPPRPQKQYPINPKAKPSIQIVIDDLLKQGVLTPQNSTMNTPVYPVPKPDGRWRMVLDYREVNKTIPLTAAQNQHSAGILATIVRQKYKTTLDLANGFWAHPITPESYWLTAFTWQGKQYCWTRLPQGFLNSPALFNADVVDLLKEIPNVQVYVDDIYLSHDDPKEHVQQLEKVFQILLQAGYVVSLKKSEIGQKTVEFLGFNITKEGRGLTDTFKTKLLNITPPKDLKQLQSILGKLNFARNFIPNFAELVQPLYNLIAPAKGKYIEWSEENTKQLNMVIEALNTASNLEERLPEQRLVIKVNTSPSAGYVRYYNETGKKPIMYLNYVFSKAELKFSMLEKLLTTMHKALIKAMDLAMGQEILVYSPIVSMTKIQKTPLPERKALPIRWITWMTYLEDPRIQFHYDKTLPELKHIPDVYTSSQSPVKHPSQYEGVFYTDGSAIKSPDPTKSNNAGMGIVHATYKPEYQVLNQWSIPLGNHTAQMAEIAAVEFACKKALKIPGPVLVITDSFYVAESANKELPYWKSNGFVNNKKKPLKHISKWKSIAECLSMKPDITIQHEKGISLQIPVFILKGNALADKLATQGSYVVNAGKRTADGSEFEKRTADGSEFESPKKKAKVE

SEQ ID NO: 1320 - protein, 2176 aa, synthetic construct
MPAAKRVKLDGGDKKYSIGLDIGTNSVGWAVITDEYKVPSKKFKVLGNTDRHSIKKNLIGALLFDSGETAEATRLKRTARRRYTRRKNRICYLQEIFSNEMAKVDDSFFHRLEESFLVEEDKKHERHPIFGNIVDEVAYHEKYPTIYHLRKKLVDSTDKADLRLIYLALAHMIKFRGHFLIEGDLNPDNSDVDKLFIQLVQTYNQLFEENPINASGVDAKAILSARLSKSRRLENLIAQLPGEKKNGLFGNLIALSLGLTPNFKSNFDLAEDAKLQLSKDTYDDDLDNLLAQIGDQYADLFLAAKNLSDAILLSDILRVNTEITKAPLSASMIKRYDEHHQDLTLLKALVRQQLPEKYKEIFFDQSKNGYAGYIDGGASQEEFYKFIKPILEKMDGTEELLVKLNREDLLRKQRTFDNGSIPHQIHLGELHAILRRQEDFYPFLKDNREKIEKILTFRIPYYVGPLARGNSRFAWMTRKSEETITPWNFEEVVDKGASAQSFIERMTNFDKNLPNEKVLPKHSLLYEYFTVYNELTKVKYVTEGMRKPAFLSGEQKKAIVDLLFKTNRKVTVKQLKEDYFKKIECFDSVEISGVEDRFNASLGTYHDLLKIIKDKDFLDNEENEDILEDIVLTLTLFEDREMIEERLKTYAHLFDDKVMKQLKRRRYTGWGRLSRKLINGIRDKQSGKTILDFLKSDGFANRNFMQLIHDDSLTFKEDIQKAQVSGQGDSLHEHIANLAGSPAIKKGILQTVKVVDELVKVMGRHKPENIVIEMARENQTTQKGQKNSRERMKRIEEGIKELGSQILKEHPVENTQLQNEKLYLYYLQNGRDMYVDQELDINRLSDYDVDHIVPQSFLKDDSIDNKVLTRSDKARGKSDNVPSEEVVKKMKNYWRQLLNAKLITQRKFDNLTKAERGGLSELDKAGFIKRQLVETRQITKHVAQILDSRMNTKYDENDKLIREVKVITLKSKLVSDFRKDFQFYKVREINNYHHAHDAYLNAVVGTALIKKYPKLESEFVYGDYKVYDVRKMIAKSEQEIGKATAKYFFYSNIMNFFKTEITLANGEIRKRPLIETNGETGEIVWDKGRDFATVRKVLSMPQVNIVKKTEVQTGGFSKESILPKRNSDKLIARKKDWDPKKYGGFDSPTVAYSVLVVAKVEKGKSKKLKSVKELLGITIMERSSFEKNPIDFLEAKGYKEVKKDLIIKLPKYSLFELENGRKRMLASAGELQKGNELALPSKYVNFLYLASHYEKLKGSPEDNEQKQLFVEQHKHYLDEIIEQISEFSKRVILADANLDKVLSAYNKHRDKPIREQAENIIHLFTLTNLGAPAAFKYFDTTIDRKRYTSTKEVLDATLIHQSITGLYETRIDLSQLGGDGGEAAAKPAPGSSGGMNPLQLLQPLPAEIKGTKLLAHWNSGATITCIPESFLEDEQPIKKTLIKTIHGEKQQNVYYVTFKVKGRKVEAEVIASPYEYILLSPTDVPWLTQQPLQLTILVPLQEYQEKILSKTALPEDQKQQLKTLFVKYDNLWQHWENQVGHRKIRPHNIATGDYPPRPQKQYPINPKAKPSIQIVIDDLLKQGVLTPQNSTMNTPVYPVPKPDGRWRMVLDYREVNKTIPLTAAQNQHSAGILATIVRQKYKTTLDLANGFWAHPITPESYWLTAFTWQGKQYCWTRLPQGFLNSPALFNADVVDLLKEIPNVQVYVDDIYLSHDDPKEHVQQLEKVFQILLQAGYVVSLKKSEIGQKTVEFLGFNITKEGRGLTDTFKTKLLNITPPKDLKQLQSILGLLNFARNFIPNFAELVQPLYNLIAPAKGKYIEWSEENTKQLNMVIEALNTASNLEERLPEQRLVIKVNTSPSAGYVRYYNETGKKPIMYLNYVFSKAELKFSMLEKLLTTMHKALIKAMDLAMGQEILVYSPIVSMTKIQKTPLPERKALPIRWITWMTYLEDPRIQFHYDKTLPELKHIPDVYTSSQSPVKHPSQYEGVFYTDGSAIKSPDPTKSNNAGMGIVHATYKPEYQVLNQWSIPLGNHTAQMAEIAAVEFACKKALKIPGPVLVITDSFYVAESANKELPYWKSNGFVNNKKKPLKHISKWKSIAECLSMKPDITIQHEKGISLQIPVFILKGNALADKLATQGSYVVNAGKRTADGSEFEKRTADGSEFESPKKKAKVE

SEQ ID NO: 1321 - protein, 2178 aa, synthetic construct
MPAAKRVKLDGGDKKYSIGLDIGTNSVGWAVITDEYKVPSKKFKVLGNTDRHSIKKNLIGALLFDSGETAEATRLKRTARRRYTRRKNRICYLQEIFSNEMAKVDDSFFHRLEESFLVEEDKKHERHPIFGNIVDEVAYHEKYPTIYHLRKKLVDSTDKADLRLIYLALAHMIKFRGHFLIEGDLNPDNSDVDKLFIQLVQTYNQLFEENPINASGVDAKAILSARLSKSRRLENLIAQLPGEKKNGLFGNLIALSLGLTPNFKSNFDLAEDAKLQLSKDTYDDDLDNLLAQIGDQYADLFLAAKNLSDAILLSDILRVNTEITKAPLSASMIKRYDEHHQDLTLLKALVRQQLPEKYKEIFFDQSKNGYAGYIDGGASQEEFYKFIKPILEKMDGTEELLVKLNREDLLRKQRTFDNGSIPHQIHLGELHAILRRQEDFYPFLKDNREKIEKILTFRIPYYVGPLARGNSRFAWMTRKSEETITPWNFEEVVDKGASAQSFIERMTNFDKNLPNEKVLPKHSLLYEYFTVYNELTKVKYVTEGMRKPAFLSGEQKKAIVDLLFKTNRKVTVKQLKEDYFKKIECFDSVEISGVEDRFNASLGTYHDLLKIIKDKDFLDNEENEDILEDIVLTLTLFEDREMIEERLKTYAHLFDDKVMKQLKRRRYTGWGRLSRKLINGIRDKQSGKTILDFLKSDGFANRNFMQLIHDDSLTFKEDIQKAQVSGQGDSLHEHIANLAGSPAIKKGILQTVKVVDELVKVMGRHKPENIVIEMARENQTTQKGQKNSRERMKRIEEGIKELGSQILKEHPVENTQLQNEKLYLYYLQNGRDMYVDQELDINRLSDYDVDHIVPQSFLKDDSIDNKVLTRSDKARGKSDNVPSEEVVKKMKNYWRQLLNAKLITQRKFDNLTKAERGGLSELDKAGFIKRQLVETRQITKHVAQILDSRMNTKYDENDKLIREVKVITLKSKLVSDFRKDFQFYKVREINNYHHAHDAYLNAVVGTALIKKYPKLESEFVYGDYKVYDVRKMIAKSEQEIGKATAKYFFYSNIMNFFKTEITLANGEIRKRPLIETNGETGEIVWDKGRDFATVRKVLSMPQVNIVKKTEVQTGGFSKESILPKRNSDKLIARKKDWDPKKYGGFDSPTVAYSVLVVAKVEKGKSKKLKSVKELLGITIMERSSFEKNPIDFLEAKGYKEVKKDLIIKLPKYSLFELENGRKRMLASAGELQKGNELALPSKYVNFLYLASHYEKLKGSPEDNEQKQLFVEQHKHYLDEIIEQISEFSKRVILADANLDKVLSAYNKHRDKPIREQAENIIHLFTLTNLGAPAAFKYFDTTIDRKRYTSTKEVLDATLIHQSITGLYETRIDLSQLGGDGGPAPAPAPAPAPAPGGMNPLQLLQPLPAEIKGTKLLAHWNSGATITCIPESFLEDEQPIKKTLIKTIHGEKQQNVYYVTFKVKGRKVEAEVIASPYEYILLSPTDVPWLTQQPLQLTILVPLQEYQEKILSKTALPEDQKQQLKTLFVKYDNLWQHWENQVGHRKIRPHNIATGDYPPRPQKQYPINPKAKPSIQIVIDDLLKQGVLTPQNSTMNTPVYPVPKPDGRWRMVLDYREVNKTIPLTAAQNQHSAGILATIVRQKYKTTLDLANGFWAHPITPESYWLTAFTWQGKQYCWTRLPQGFLNSPALFNADVVDLLKEIPNVQVYVDDIYLSHDDPKEHVQQLEKVFQILLQAGYVVSLKKSEIGQKTVEFLGFNITKEGRGLTDTFKTKLLNITPPKDLKQLQSILGLLNFARNFIPNFAELVQPLYNLIAPAKGKYIEWSEENTKQLNMVIEALNTASNLEERLPEQRLVIKVNTSPSAGYVRYYNETGKKPIMYLNYVFSKAELKFSMLEKLLTTMHKALIKAMDLAMGQEILVYSPIVSMTKIQKTPLPERKALPIRWITWMTYLEDPRIQFHYDKTLPELKHIPDVYTSSQSPVKHPSQYEGVFYTDGSAIKSPDPTKSNNAGMGIVHATYKPEYQVLNQWSIPLGNHTAQMAEIAAVEFACKKALKIPGPVLVITDSFYVAESANKELPYWKSNGFVNNKKKPLKHISKWKSIAECLSMKPDITIQHEKGISLQIPVFILKGNALADKLATQGSYVVNAGKRTADGSEFEKRTADGSEFESPKKKAKVE

SEQ ID NO: 1322 - protein, 2174 aa, synthetic construct
MPAAKRVKLDGGDKKYSIGLDIGTNSVGWAVITDEYKVPSKKFKVLGNTDRHSIKKNLIGALLFDSGETAEATRLKRTARRRYTRRKNRICYLQEIFSNEMAKVDDSFFHRLEESFLVEEDKKHERHPIFGNIVDEVAYHEKYPTIYHLRKKLVDSTDKADLRLIYLALAHMIKFRGHFLIEGDLNPDNSDVDKLFIQLVQTYNQLFEENPINASGVDAKAILSARLSKSRRLENLIAQLPGEKKNGLFGNLIALSLGLTPNFKSNFDLAEDAKLQLSKDTYDDDLDNLLAQIGDQYADLFLAAKNLSDAILLSDILRVNTEITKAPLSASMIKRYDEHHQDLTLLKALVRQQLPEKYKEIFFDQSKNGYAGYIDGGASQEEFYKFIKPILEKMDGTEELLVKLNREDLLRKQRTFDNGSIPHQIHLGELHAILRRQEDFYPFLKDNREKIEKILTFRIPYYVGPLARGNSRFAWMTRKSEETITPWNFEEVVDKGASAQSFIERMTNFDKNLPNEKVLPKHSLLYEYFTVYNELTKVKYVTEGMRKPAFLSGEQKKAIVDLLFKTNRKVTVKQLKEDYFKKIECFDSVEISGVEDRFNASLGTYHDLLKIIKDKDFLDNEENEDILEDIVLTLTLFEDREMIEERLKTYAHLFDDKVMKQLKRRRYTGWGRLSRKLINGIRDKQSGKTILDFLKSDGFANRNFMQLIHDDSLTFKEDIQKAQVSGQGDSLHEHIANLAGSPAIKKGILQTVKVVDELVKVMGRHKPENIVIEMARENQTTQKGQKNSRERMKRIEEGIKELGSQILKEHPVENTQLQNEKLYLYYLQNGRDMYVDQELDINRLSDYDVDHIVPQSFLKDDSIDNKVLTRSDKARGKSDNVPSEEVVKKMKNYWRQLLNAKLITQRKFDNLTKAERGGLSELDKAGFIKRQLVETRQITKHVAQILDSRMNTKYDENDKLIREVKVITLKSKLVSDFRKDFQFYKVREINNYHHAHDAYLNAVVGTALIKKYPKLESEFVYGDYKVYDVRKMIAKSEQEIGKATAKYFFYSNIMNFFKTEITLANGEIRKRPLIETNGETGEIVWDKGRDFATVRKVLSMPQVNIVKKTEVQTGGFSKESILPKRNSDKLIARKKDWDPKKYGGFDSPTVAYSVLVVAKVEKGKSKKLKSVKELLGITIMERSSFEKNPIDFLEAKGYKEVKKDLIIKLPKYSLFELENGRKRMLASAGELQKGNELALPSKYVNFLYLASHYEKLKGSPEDNEQKQLFVEQHKHYLDEIIEQISEFSKRVILADANLDKVLSAYNKHRDKPIREQAENIIHLFTLTNLGAPAAFKYFDTTIDRKRYTSTKEVLDATLIHQSITGLYETRIDLSQLGGDGGGGSGGGPAPGGMNPLQLLQPLPAEIKGTKLLAHWNSGATITCIPESFLEDEQPIKKTLIKTIHGEKQQNVYYVTFKVKGRKVEAEVIASPYEYILLSPTDVPWLTQQPLQLTILVPLQEYQEKILSKTALPEDQKQQLKTLFVKYDNLWQHWENQVGHRKIRPHNIATGDYPPRPQKQYPINPKAKPSIQIVIDDLLKQGVLTPQNSTMNTPVYPVPKPDGRWRMVLDYREVNKTIPLTAAQNQHSAGILATIVRQKYKTTLDLANGFWAHPITPESYWLTAFTWQGKQYCWTRLPQGFLNSPALFNADVVDLLKEIPNVQVYVDDIYLSHDDPKEHVQQLEKVFQILLQAGYVVSLKKSEIGQKTVEFLGFNITKEGRGLTDTFKTKLLNITPPKDLKQLQSILGLLNFARNFIPNFAELVQPLYNLIAPAKGKYIEWSEENTKQLNMVIEALNTASNLEERLPEQRLVIKVNTSPSAGYVRYYNETGKKPIMYLNYVFSKAELKFSMLEKLLTTMHKALIKAMDLAMGQEILVYSPIVSMTKIQKTPLPERKALPIRWITWMTYLEDPRIQFHYDKTLPELKHIPDVYTSSQSPVKHPSQYEGVFYTDGSAIKSPDPTKSNNAGMGIVHATYKPEYQVLNQWSIPLGNHTAQMAEIAAVEFACKKALKIPGPVLVITDSFYVAESANKELPYWKSNGFVNNKKKPLKHISKWKSIAECLSMKPDITIQHEKGISLQIPVFILKGNALADKLATQGSYVVNAGKRTADGSEFEKRTADGSEFESPKKKAKVE

SEQ ID NO: 1323 - protein, 2176 aa, synthetic construct
MPAAKRVKLDGGDKKYSIGLDIGTNSVGWAVITDEYKVPSKKFKVLGNTDRHSIKKNLIGALLFDSGETAEATRLKRTARRRYTRRKNRICYLQEIFSNEMAKVDDSFFHRLEESFLVEEDKKHERHPIFGNIVDEVAYHEKYPTIYHLRKKLVDSTDKADLRLIYLALAHMIKFRGHFLIEGDLNPDNSDVDKLFIQLVQTYNQLFEENPINASGVDAKAILSARLSKSRRLENLIAQLPGEKKNGLFGNLIALSLGLTPNFKSNFDLAEDAKLQLSKDTYDDDLDNLLAQIGDQYADLFLAAKNLSDAILLSDILRVNTEITKAPLSASMIKRYDEHHQDLTLLKALVRQQLPEKYKEIFFDQSKNGYAGYIDGGASQEEFYKFIKPILEKMDGTEELLVKLNREDLLRKQRTFDNGSIPHQIHLGELHAILRRQEDFYPFLKDNREKIEKILTFRIPYYVGPLARGNSRFAWMTRKSEETITPWNFEEVVDKGASAQSFIERMTNFDKNLPNEKVLPKHSLLYEYFTVYNELTKVKYVTEGMRKPAFLSGEQKKAIVDLLFKTNRKVTVKQLKEDYFKKIECFDSVEISGVEDRFNASLGTYHDLLKIIKDKDFLDNEENEDILEDIVLTLTLFEDREMIEERLKTYAHLFDDKVMKQLKRRRYTGWGRLSRKLINGIRDKQSGKTILDFLKSDGFANRNFMQLIHDDSLTFKEDIQKAQVSGQGDSLHEHIANLAGSPAIKKGILQTVKVVDELVKVMGRHKPENIVIEMARENQTTQKGQKNSRERMKRIEEGIKELGSQILKEHPVENTQLQNEKLYLYYLQNGRDMYVDQELDINRLSDYDVDHIVPQSFLKDDSIDNKVLTRSDKARGKSDNVPSEEVVKKMKNYWRQLLNAKLITQRKFDNLTKAERGGLSELDKAGFIKRQLVETRQITKHVAQILDSRMNTKYDENDKLIREVKVITLKSKLVSDFRKDFQFYKVREINNYHHAHDAYLNAVVGTALIKKYPKLESEFVYGDYKVYDVRKMIAKSEQEIGKATAKYFFYSNIMNFFKTEITLANGEIRKRPLIETNGETGEIVWDKGRDFATVRKVLSMPQVNIVKKTEVQTGGFSKESILPKRNSDKLIARKKDWDPKKYGGFDSPTVAYSVLVVAKVEKGKSKKLKSVKELLGITIMERSSFEKNPIDFLEAKGYKEVKKDLIIKLPKYSLFELENGRKRMLASAGELQKGNELALPSKYVNFLYLASHYEKLKGSPEDNEQKQLFVEQHKHYLDEIIEQISEFSKRVILADANLDKVLSAYNKHRDKPIREQAENIIHLFTLTNLGAPAAFKYFDTTIDRKRYTSTKEVLDATLIHQSITGLYETRIDLSQLGGDGGGGSEAAAKGGGGGMNPLQLLQPLPAEIKGTKLLAHWNSGATITCIPESFLEDEQPIKKTLIKTIHGEKQQNVYYVTFKVKGRKVEAEVIASPYEYILLSPTDVPWLTQQPLQLTILVPLQEYQEKILSKTALPEDQKQQLKTLFVKYDNLWQHWENQVGHRKIRPHNIATGDYPPRPQKQYPINPKAKPSIQIVIDDLLKQGVLTPQNSTMNTPVYPVPKPDGRWRMVLDYREVNKTIPLTAAQNQHSAGILATIVRQKYKTTLDLANGFWAHPITPESYWLTAFTWQGKQYCWTRLPQGFLNSPALFNADVVDLLKEIPNVQVYVDDIYLSHDDPKEHVQQLEKVFQILLQAGYVVSLKKSEIGQKTVEFLGFNITKEGRGLTDTFKTKLLNITPPKDLKQLQSILGLLNFARNFIPNFAELVQPLYNLIAPAKGKYIEWSEENTKQLNMVIEALNTASNLEERLPEQRLVIKVNTSPSAGYVRYYNETGKKPIMYLNYVFSKAELKFSMLEKLLTTMHKALIKAMDLAMGQEILVYSPIVSMTKIQKTPLPERKALPIRWITWMTYLEDPRIQFHYDKTLPELKHIPDVYTSSQSPVKHPSQYEGVFYTDGSAIKSPDPTKSNNAGMGIVHATYKPEYQVLNQWSIPLGNHTAQMAEIAAVEFACKKALKIPGPVLVITDSFYVAESANKELPYWKSNGFVNNKKKPLKHISKWKSIAECLSMKPDITIQHEKGISLQIPVFILKGNALADKLATQGSYVVNAGKRTADGSEFEKRTADGSEFESPKKKAKVE

SEQ ID NO: 1324 - protein, 2176 aa, synthetic construct
MPAAKRVKLDGGDKKYSIGLDIGTNSVGWAVITDEYKVPSKKFKVLGNTDRHSIKKNLIGALLFDSGETAEATRLKRTARRRYTRRKNRICYLQEIFSNEMAKVDDSFFHRLEESFLVEEDKKHERHPIFGNIVDEVAYHEKYPTIYHLRKKLVDSTDKADLRLIYLALAHMIKFRGHFLIEGDLNPDNSDVDKLFIQLVQTYNQLFEENPINASGVDAKAILSARLSKSRRLENLIAQLPGEKKNGLFGNLIALSLGLTPNFKSNFDLAEDAKLQLSKDTYDDDLDNLLAQIGDQYADLFLAAKNLSDAILLSDILRVNTEITKAPLSASMIKRYDEHHQDLTLLKALVRQQLPEKYKEIFFDQSKNGYAGYIDGGASQEEFYKFIKPILEKMDGTEELLVKLNREDLLRKQRTFDNGSIPHQIHLGELHAILRRQEDFYPFLKDNREKIEKILTFRIPYYVGPLARGNSRFAWMTRKSEETITPWNFEEVVDKGASAQSFIERMTNFDKNLPNEKVLPKHSLLYEYFTVYNELTKVKYVTEGMRKPAFLSGEQKKAIVDLLFKTNRKVTVKQLKEDYFKKIECFDSVEISGVEDRFNASLGTYHDLLKIIKDKDFLDNEENEDILEDIVLTLTLFEDREMIEERLKTYAHLFDDKVMKQLKRRRYTGWGRLSRKLINGIRDKQSGKTILDFLKSDGFANRNFMQLIHDDSLTFKEDIQKAQVSGQGDSLHEHIANLAGSPAIKKGILQTVKVVDELVKVMGRHKPENIVIEMARENQTTQKGQKNSRERMKRIEEGIKELGSQILKEHPVENTQLQNEKLYLYYLQNGRDMYVDQELDINRLSDYDVDHIVPQSFLKDDSIDNKVLTRSDKARGKSDNVPSEEVVKKMKNYWRQLLNAKLITQRKFDNLTKAERGGLSELDKAGFIKRQLVETRQITKHVAQILDSRMNTKYDENDKLIREVKVITLKSKLVSDFRKDFQFYKVREINNYHHAHDAYLNAVVGTALIKKYPKLESEFVYGDYKVYDVRKMIAKSEQEIGKATAKYFFYSNIMNFFKTEITLANGEIRKRPLIETNGETGEIVWDKGRDFATVRKVLSMPQVNIVKKTEVQTGGFSKESILPKRNSDKLIARKKDWDPKKYGGFDSPTVAYSVLVVAKVEKGKSKKLKSVKELLGITIMERSSFEKNPIDFLEAKGYKEVKKDLIIKLPKYSLFELENGRKRMLASAGELQKGNELALPSKYVNFLYLASHYEKLKGSPEDNEQKQLFVEQHKHYLDEIIEQISEFSKRVILADANLDKVLSAYNKHRDKPIREQAENIIHLFTLTNLGAPAAFKYFDTTIDRKRYTSTKEVLDATLIHQSITGLYETRIDLSQLGGDGGPAPEAAAKGGSGGMNPLQLLQPLPAEIKGTKLLAHWNSGATITCIPESFLEDEQPIKKTLIKTIHGEKQQNVYYVTFKVKGRKVEAEVIASPYEYILLSPTDVPWLTQQPLQLTILVPLQEYQEKILSKTALPEDQKQQLKTLFVKYDNLWQHWENQVGHRKIRPHNIATGDYPPRPQKQYPINPKAKPSIQIVIDDLLKQGVLTPQNSTMNTPVYPVPKPDGRWRMVLDYREVNKTIPLTAAQNQHSAGILATIVRQKYKTTLDLANGFWAHPITPESYWLTAFTWQGKQYCWTRLPQGFLNSPALFNADVVDLLKEIPNVQVYVDDIYLSHDDPKEHVQQLEKVFQILLQAGYVVSLKKSEIGQKTVEFLGFNITKEGRGLTDTFKTKLLNITPPKDLKQLQSILGLLNFARNFIPNFAELVQPLYNLIAPAKGKYIEWSEENTKQLNMVIEALNTASNLEERLPEQRLVIKVNTSPSAGYVRYYNETGKKPIMYLNYVFSKAELKFSMLEKLLTTMHKALIKAMDLAMGQEILVYSPIVSMTKIQKTPLPERKALPIRWITWMTYLEDPRIQFHYDKTLPELKHIPDVYTSSQSPVKHPSQYEGVFYTDGSAIKSPDPTKSNNAGMGIVHATYKPEYQVLNQWSIPLGNHTAQMAEIAAVEFACKKALKIPGPVLVITDSFYVAESANKELPYWKSNGFVNNKKKPLKHISKWKSIAECLSMKPDITIQHEKGISLQIPVFILKGNALADKLATQGSYVVNAGKRTADGSEFEKRTADGSEFESPKKKAKVE

SEQ ID NO: 1325 - protein, 2176 aa, synthetic construct
MPAAKRVKLDGGDKKYSIGLDIGTNSVGWAVITDEYKVPSKKFKVLGNTDRHSIKKNLIGALLFDSGETAEATRLKRTARRRYTRRKNRICYLQEIFSNEMAKVDDSFFHRLEESFLVEEDKKHERHPIFGNIVDEVAYHEKYPTIYHLRKKLVDSTDKADLRLIYLALAHMIKFRGHFLIEGDLNPDNSDVDKLFIQLVQTYNQLFEENPINASGVDAKAILSARLSKSRRLENLIAQLPGEKKNGLFGNLIALSLGLTPNFKSNFDLAEDAKLQLSKDTYDDDLDNLLAQIGDQYADLFLAAKNLSDAILLSDILRVNTEITKAPLSASMIKRYDEHHQDLTLLKALVRQQLPEKYKEIFFDQSKNGYAGYIDGGASQEEFYKFIKPILEKMDGTEELLVKLNREDLLRKQRTFDNGSIPHQIHLGELHAILRRQEDFYPFLKDNREKIEKILTFRIPYYVGPLARGNSRFAWMTRKSEETITPWNFEEVVDKGASAQSFIERMTNFDKNLPNEKVLPKHSLLYEYFTVYNELTKVKYVTEGMRKPAFLSGEQKKAIVDLLFKTNRKVTVKQLKEDYFKKIECFDSVEISGVEDRFNASLGTYHDLLKIIKDKDFLDNEENEDILEDIVLTLTLFEDREMIEERLKTYAHLFDDKVMKQLKRRRYTGWGRLSRKLINGIRDKQSGKTILDFLKSDGFANRNFMQLIHDDSLTFKEDIQKAQVSGQGDSLHEHIANLAGSPAIKKGILQTVKVVDELVKVMGRHKPENIVIEMARENQTTQKGQKNSRERMKRIEEGIKELGSQILKEHPVENTQLQNEKLYLYYLQNGRDMYVDQELDINRLSDYDVDHIVPQSFLKDDSIDNKVLTRSDKARGKSDNVPSEEVVKKMKNYWRQLLNAKLITQRKFDNLTKAERGGLSELDKAGFIKRQLVETRQITKHVAQILDSRMNTKYDENDKLIREVKVITLKSKLVSDFRKDFQFYKVREINNYHHAHDAYLNAVVGTALIKKYPKLESEFVYGDYKVYDVRKMIAKSEQEIGKATAKYFFYSNIMNFFKTEITLANGEIRKRPLIETNGETGEIVWDKGRDFATVRKVLSMPQVNIVKKTEVQTGGFSKESILPKRNSDKLIARKKDWDPKKYGGFDSPTVAYSVLVVAKVEKGKSKKLKSVKELLGITIMERSSFEKNPIDFLEAKGYKEVKKDLIIKLPKYSLFELENGRKRMLASAGELQKGNELALPSKYVNFLYLASHYEKLKGSPEDNEQKQLFVEQHKHYLDEIIEQISEFSKRVILADANLDKVLSAYNKHRDKPIREQAENIIHLFTLTNLGAPAAFKYFDTTIDRKRYTSTKEVLDATLIHQSITGLYETRIDLSQLGGDGGEAAAKGGSPAPGGMNPLQLLQPLPAEIKGTKLLAHWNSGATITCIPESFLEDEQPIKKTLIKTIHGEKQQNVYYVTFKVKGRKVEAEVIASPYEYILLSPTDVPWLTQQPLQLTILVPLQEYQEKILSKTALPEDQKQQLKTLFVKYDNLWQHWENQVGHRKIRPHNIATGDYPPRPQKQYPINPKAKPSIQIVIDDLLKQGVLTPQNSTMNTPVYPVPKPDGRWRMVLDYREVNKTIPLTAAQNQHSAGILATIVRQKYKTTLDLANGFWAHPITPESYWLTAFTWQGKQYCWTRLPQGFLNSPALFNADVVDLLKEIPNVQVYVDDIYLSHDDPKEHVQQLEKVFQILLQAGYVVSLKKSEIGQKTVEFLGFNITKEGRGLTDTFKTKLLNITPPKDLKQLQSILGLLNFARNFIPNFAELVQPLYNLIAPAKGKYIEWSEENTKQLNMVIEALNTASNLEERLPEQRLVIKVNTSPSAGYVRYYNETGKKPIMYLNYVFSKAELKFSMLEKLLTTMHKALIKAMDLAMGQEILVYSPIVSMTKIQKTPLPERKALPIRWITWMTYLEDPRIQFHYDKTLPELKHIPDVYTSSQSPVKHPSQYEGVFYTDGSAIKSPDPTKSNNAGMGIVHATYKPEYQVLNQWSIPLGNHTAQMAEIAAVEFACKKALKIPGPVLVITDSFYVAESANKELPYWKSNGFVNNKKKPLKHISKWKSIAECLSMKPDITIQHEKGISLQIPVFILKGNALADKLATQGSYVVNAGKRTADGSEFEKRTADGSEFESPKKKAKVE

SEQ ID NO: 1326 - protein, 2176 aa, synthetic construct
MPAAKRVKLDGGDKKYSIGLDIGTNSVGWAVITDEYKVPSKKFKVLGNTDRHSIKKNLIGALLFDSGETAEATRLKRTARRRYTRRKNRICYLQEIFSNEMAKVDDSFFHRLEESFLVEEDKKHERHPIFGNIVDEVAYHEKYPTIYHLRKKLVDSTDKADLRLIYLALAHMIKFRGHFLIEGDLNPDNSDVDKLFIQLVQTYNQLFEENPINASGVDAKAILSARLSKSRRLENLIAQLPGEKKNGLFGNLIALSLGLTPNFKSNFDLAEDAKLQLSKDTYDDDLDNLLAQIGDQYADLFLAAKNLSDAILLSDILRVNTEITKAPLSASMIKRYDEHHQDLTLLKALVRQQLPEKYKEIFFDQSKNGYAGYIDGGASQEEFYKFIKPILEKMDGTEELLVKLNREDLLRKQRTFDNGSIPHQIHLGELHAILRRQEDFYPFLKDNREKIEKILTFRIPYYVGPLARGNSRFAWMTRKSEETITPWNFEEVVDKGASAQSFIERMTNFDKNLPNEKVLPKHSLLYEYFTVYNELTKVKYVTEGMRKPAFLSGEQKKAIVDLLFKTNRKVTVKQLKEDYFKKIECFDSVEISGVEDRFNASLGTYHDLLKIIKDKDFLDNEENEDILEDIVLTLTLFEDREMIEERLKTYAHLFDDKVMKQLKRRRYTGWGRLSRKLINGIRDKQSGKTILDFLKSDGFANRNFMQLIHDDSLTFKEDIQKAQVSGQGDSLHEHIANLAGSPAIKKGILQTVKVVDELVKVMGRHKPENIVIEMARENQTTQKGQKNSRERMKRIEEGIKELGSQILKEHPVENTQLQNEKLYLYYLQNGRDMYVDQELDINRLSDYDVDHIVPQSFLKDDSIDNKVLTRSDKARGKSDNVPSEEVVKKMKNYWRQLLNAKLITQRKFDNLTKAERGGLSELDKAGFIKRQLVETRQITKHVAQILDSRMNTKYDENDKLIREVKVITLKSKLVSDFRKDFQFYKVREINNYHHAHDAYLNAVVGTALIKKYPKLESEFVYGDYKVYDVRKMIAKSEQEIGKATAKYFFYSNIMNFFKTEITLANGEIRKRPLIETNGETGEIVWDKGRDFATVRKVLSMPQVNIVKKTEVQTGGFSKESILPKRNSDKLIARKKDWDPKKYGGFDSPTVAYSVLVVAKVEKGKSKKLKSVKELLGITIMERSSFEKNPIDFLEAKGYKEVKKDLIIKLPKYSLFELENGRKRMLASAGELQKGNELALPSKYVNFLYLASHYEKLKGSPEDNEQKQLFVEQHKHYLDEIIEQISEFSKRVILADANLDKVLSAYNKHRDKPIREQAENIIHLFTLTNLGAPAAFKYFDTTIDRKRYTSTKEVLDATLIHQSITGLYETRIDLSQLGGDGGGGGGGSEAAAKGGMNPLQLLQPLPAEIKGTKLLAHWNSGATITCIPESFLEDEQPIKKTLIKTIHGEKQQNVYYVTFKVKGRKVEAEVIASPYEYILLSPTDVPWLTQQPLQLTILVPLQEYQEKILSKTALPEDQKQQLKTLFVKYDNLWQHWENQVGHRKIRPHNIATGDYPPRPQKQYPINPKAKPSIQIVIDDLLKQGVLTPQNSTMNTPVYPVPKPDGRWRMVLDYREVNKTIPLTAAQNQHSAGILATIVRQKYKTTLDLANGFWAHPITPESYWLTAFTWQGKQYCWTRLPQGFLNSPALFNADVVDLLKEIPNVQVYVDDIYLSHDDPKEHVQQLEKVFQILLQAGYVVSLKKSEIGQKTVEFLGFNITKEGRGLTDTFKTKLLNITPPKDLKQLQSILGLLNFARNFIPNFAELVQPLYNLIAPAKGKYIEWSEENTKQLNMVIEALNTASNLEERLPEQRLVIKVNTSPSAGYVRYYNETGKKPIMYLNYVFSKAELKFSMLEKLLTTMHKALIKAMDLAMGQEILVYSPIVSMTKIQKTPLPERKALPIRWITWMTYLEDPRIQFHYDKTLPELKHIPDVYTSSQSPVKHPSQYEGVFYTDGSAIKSPDPTKSNNAGMGIVHATYKPEYQVLNQWSIPLGNHTAQMAEIAAVEFACKKALKIPGPVLVITDSFYVAESANKELPYWKSNGFVNNKKKPLKHISKWKSIAECLSMKPDITIQHEKGISLQIPVFILKGNALADKLATQGSYVVNAGKRTADGSEFEKRTADGSEFESPKKKAKVE

SEQ ID NO: 1327 - protein, 2176 aa, synthetic construct
MPAAKRVKLDGGDKKYSIGLDIGTNSVGWAVITDEYKVPSKKFKVLGNTDRHSIKKNLIGALLFDSGETAEATRLKRTARRRYTRRKNRICYLQEIFSNEMAKVDDSFFHRLEESFLVEEDKKHERHPIFGNIVDEVAYHEKYPTIYHLRKKLVDSTDKADLRLIYLALAHMIKFRGHFLIEGDLNPDNSDVDKLFIQLVQTYNQLFEENPINASGVDAKAILSARLSKSRRLENLIAQLPGEKKNGLFGNLIALSLGLTPNFKSNFDLAEDAKLQLSKDTYDDDLDNLLAQIGDQYADLFLAAKNLSDAILLSDILRVNTEITKAPLSASMIKRYDEHHQDLTLLKALVRQQLPEKYKEIFFDQSKNGYAGYIDGGASQEEFYKFIKPILEKMDGTEELLVKLNREDLLRKQRTFDNGSIPHQIHLGELHAILRRQEDFYPFLKDNREKIEKILTFRIPYYVGPLARGNSRFAWMTRKSEETITPWNFEEVVDKGASAQSFIERMTNFDKNLPNEKVLPKHSLLYEYFTVYNELTKVKYVTEGMRKPAFLSGEQKKAIVDLLFKTNRKVTVKQLKEDYFKKIECFDSVEISGVEDRFNASLGTYHDLLKIIKDKDFLDNEENEDILEDIVLTLTLFEDREMIEERLKTYAHLFDDKVMKQLKRRRYTGWGRLSRKLINGIRDKQSGKTILDFLKSDGFANRNFMQLIHDDSLTFKEDIQKAQVSGQGDSLHEHIANLAGSPAIKKGILQTVKVVDELVKVMGRHKPENIVIEMARENQTTQKGQKNSRERMKRIEEGIKELGSQILKEHPVENTQLQNEKLYLYYLQNGRDMYVDQELDINRLSDYDVDHIVPQSFLKDDSIDNKVLTRSDKARGKSDNVPSEEVVKKMKNYWRQLLNAKLITQRKFDNLTKAERGGLSELDKAGFIKRQLVETRQITKHVAQILDSRMNTKYDENDKLIREVKVITLKSKLVSDFRKDFQFYKVREINNYHHAHDAYLNAVVGTALIKKYPKLESEFVYGDYKVYDVRKMIAKSEQEIGKATAKYFFYSNIMNFFKTEITLANGEIRKRPLIETNGETGEIVWDKGRDFATVRKVLSMPQVNIVKKTEVQTGGFSKESILPKRNSDKLIARKKDWDPKKYGGFDSPTVAYSVLVVAKVEKGKSKKLKSVKELLGITIMERSSFEKNPIDFLEAKGYKEVKKDLIIKLPKYSLFELENGRKRMLASAGELQKGNELALPSKYVNFLYLASHYEKLKGSPEDNEQKQLFVEQHKHYLDEIIEQISEFSKRVILADANLDKVLSAYNKHRDKPIREQAENIIHLFTLTNLGAPAAFKYFDTTIDRKRYTSTKEVLDATLIHQSITGLYETRIDLSQLGGDGGEAAAKGSSPAPGGMNPLQLLQPLPAEIKGTKLLAHWNSGATITCIPESFLEDEQPIKKTLIKTIHGEKQQNVYYVTFKVKGRKVEAEVIASPYEYILLSPTDVPWLTQQPLQLTILVPLQEYQEKILSKTALPEDQKQQLKTLFVKYDNLWQHWENQVGHRKIRPHNIATGDYPPRPQKQYPINPKAKPSIQIVIDDLLKQGVLTPQNSTMNTPVYPVPKPDGRWRMVLDYREVNKTIPLTAAQNQHSAGILATIVRQKYKTTLDLANGFWAHPITPESYWLTAFTWQGKQYCWTRLPQGFLNSPALFNADVVDLLKEIPNVQVYVDDIYLSHDDPKEHVQQLEKVFQILLQAGYVVSLKKSEIGQKTVEFLGFNITKEGRGLTDTFKTKLLNITPPKDLKQLQSILGLLNFARNFIPNFAELVQPLYNLIAPAKGKYIEWSEENTKQLNMVIEALNTASNLEERLPEQRLVIKVNTSPSAGYVRYYNETGKKPIMYLNYVFSKAELKFSMLEKLLTTMHKALIKAMDLAMGQEILVYSPIVSMTKIQKTPLPERKALPIRWITWMTYLEDPRIQFHYDKTLPELKHIPDVYTSSQSPVKHPSQYEGVFYTDGSAIKSPDPTKSNNAGMGIVHATYKPEYQVLNQWSIPLGNHTAQMAEIAAVEFACKKALKIPGPVLVITDSFYVAESANKELPYWKSNGFVNNKKKPLKHISKWKSIAECLSMKPDITIQHEKGISLQIPVFILKGNALADKLATQGSYVVNAGKRTADGSEFEKRTADGSEFESPKKKAKVE

SEQ ID NO: 1328 - protein, 2176 aa, synthetic construct
MPAAKRVKLDGGDKKYSIGLDIGTNSVGWAVITDEYKVPSKKFKVLGNTDRHSIKKNLIGALLFDSGETAEATRLKRTARRRYTRRKNRICYLQEIFSNEMAKVDDSFFHRLEESFLVEEDKKHERHPIFGNIVDEVAYHEKYPTIYHLRKKLVDSTDKADLRLIYLALAHMIKFRGHFLIEGDLNPDNSDVDKLFIQLVQTYNQLFEENPINASGVDAKAILSARLSKSRRLENLIAQLPGEKKNGLFGNLIALSLGLTPNFKSNFDLAEDAKLQLSKDTYDDDLDNLLAQIGDQYADLFLAAKNLSDAILLSDILRVNTEITKAPLSASMIKRYDEHHQDLTLLKALVRQQLPEKYKEIFFDQSKNGYAGYIDGGASQEEFYKFIKPILEKMDGTEELLVKLNREDLLRKQRTFDNGSIPHQIHLGELHAILRRQEDFYPFLKDNREKIEKILTFRIPYYVGPLARGNSRFAWMTRKSEETITPWNFEEVVDKGASAQSFIERMTNFDKNLPNEKVLPKHSLLYEYFTVYNELTKVKYVTEGMRKPAFLSGEQKKAIVDLLFKTNRKVTVKQLKEDYFKKIECFDSVEISGVEDRFNASLGTYHDLLKIIKDKDFLDNEENEDILEDIVLTLTLFEDREMIEERLKTYAHLFDDKVMKQLKRRRYTGWGRLSRKLINGIRDKQSGKTILDFLKSDGFANRNFMQLIHDDSLTFKEDIQKAQVSGQGDSLHEHIANLAGSPAIKKGILQTVKVVDELVKVMGRHKPENIVIEMARENQTTQKGQKNSRERMKRIEEGIKELGSQILKEHPVENTQLQNEKLYLYYLQNGRDMYVDQELDINRLSDYDVDHIVPQSFLKDDSIDNKVLTRSDKARGKSDNVPSEEVVKKMKNYWRQLLNAKLITQRKFDNLTKAERGGLSELDKAGFIKRQLVETRQITKHVAQILDSRMNTKYDENDKLIREVKVITLKSKLVSDFRKDFQFYKVREINNYHHAHDAYLNAVVGTALIKKYPKLESEFVYGDYKVYDVRKMIAKSEQEIGKATAKYFFYSNIMNFFKTEITLANGEIRKRPLIETNGETGEIVWDKGRDFATVRKVLSMPQVNIVKKTEVQTGGFSKESILPKRNSDKLIARKKDWDPKKYGGFDSPTVAYSVLVVAKVEKGKSKKLKSVKELLGITIMERSSFEKNPIDFLEAKGYKEVKKDLIIKLPKYSLFELENGRKRMLASAGELQKGNELALPSKYVNFLYLASHYEKLKGSPEDNEQKQLFVEQHKHYLDEIIEQISEFSKRVILADANLDKVLSAYNKHRDKPIREQAENIIHLFTLTNLGAPAAFKYFDTTIDRKRYTSTKEVLDATLIHQSITGLYETRIDLSQLGGDGGGGSPAPEAAAKGGMNPLQLLQPLPAEIKGTKLLAHWNSGATITCIPESFLEDEQPIKKTLIKTIHGEKQQNVYYVTFKVKGRKVEAEVIASPYEYILLSPTDVPWLTQQPLQLTILVPLQEYQEKILSKTALPEDQKQQLKTLFVKYDNLWQHWENQVGHRKIRPHNIATGDYPPRPQKQYPINPKAKPSIQIVIDDLLKQGVLTPQNSTMNTPVYPVPKPDGRWRMVLDYREVNKTIPLTAAQNQHSAGILATIVRQKYKTTLDLANGFWAHPITPESYWLTAFTWQGKQYCWTRLPQGFLNSPALFNADVVDLLKEIPNVQVYVDDIYLSHDDPKEHVQQLEKVFQILLQAGYVVSLKKSEIGQKTVEFLGFNITKEGRGLTDTFKTKLLNITPPKDLKQLQSILGLLNFARNFIPNFAELVQPLYNLIAPAKGKYIEWSEENTKQLNMVIEALNTASNLEERLPEQRLVIKVNTSPSAGYVRYYNETGKKPIMYLNYVFSKAELKFSMLEKLLTTMHKALIKAMDLAMGQEILVYSPIVSMTKIQKTPLPERKALPIRWITWMTYLEDPRIQFHYDKTLPELKHIPDVYTSSQSPVKHPSQYEGVFYTDGSAIKSPDPTKSNNAGMGIVHATYKPEYQVLNQWSIPLGNHTAQMAEIAAVEFACKKALKIPGPVLVITDSFYVAESANKELPYWKSNGFVNNKKKPLKHISKWKSIAECLSMKPDITIQHEKGISLQIPVFILKGNALADKLATQGSYVVNAGKRTADGSEFEKRTADGSEFESPKKKAKVE

SEQ ID NO: 1329 - protein, 2176 aa, synthetic construct
MPAAKRVKLDGGDKKYSIGLDIGTNSVGWAVITDEYKVPSKKFKVLGNTDRHSIKKNLIGALLFDSGETAEATRLKRTARRRYTRRKNRICYLQEIFSNEMAKVDDSFFHRLEESFLVEEDKKHERHPIFGNIVDEVAYHEKYPTIYHLRKKLVDSTDKADLRLIYLALAHMIKFRGHFLIEGDLNPDNSDVDKLFIQLVQTYNQLFEENPINASGVDAKAILSARLSKSRRLENLIAQLPGEKKNGLFGNLIALSLGLTPNFKSNFDLAEDAKLQLSKDTYDDDLDNLLAQIGDQYADLFLAAKNLSDAILLSDILRVNTEITKAPLSASMIKRYDEHHQDLTLLKALVRQQLPEKYKEIFFDQSKNGYAGYIDGGASQEEFYKFIKPILEKMDGTEELLVKLNREDLLRKQRTFDNGSIPHQIHLGELHAILRRQEDFYPFLKDNREKIEKILTFRIPYYVGPLARGNSRFAWMTRKSEETITPWNFEEVVDKGASAQSFIERMTNFDKNLPNEKVLPKHSLLYEYFTVYNELTKVKYVTEGMRKPAFLSGEQKKAIVDLLFKTNRKVTVKQLKEDYFKKIECFDSVEISGVEDRFNASLGTYHDLLKIIKDKDFLDNEENEDILEDIVLTLTLFEDREMIEERLKTYAHLFDDKVMKQLKRRRYTGWGRLSRKLINGIRDKQSGKTILDFLKSDGFANRNFMQLIHDDSLTFKEDIQKAQVSGQGDSLHEHIANLAGSPAIKKGILQTVKVVDELVKVMGRHKPENIVIEMARENQTTQKGQKNSRERMKRIEEGIKELGSQILKEHPVENTQLQNEKLYLYYLQNGRDMYVDQELDINRLSDYDVDHIVPQSFLKDDSIDNKVLTRSDKARGKSDNVPSEEVVKKMKNYWRQLLNAKLITQRKFDNLTKAERGGLSELDKAGFIKRQLVETRQITKHVAQILDSRMNTKYDENDKLIREVKVITLKSKLVSDFRKDFQFYKVREINNYHHAHDAYLNAVVGTALIKKYPKLESEFVYGDYKVYDVRKMIAKSEQEIGKATAKYFFYSNIMNFFKTEITLANGEIRKRPLIETNGETGEIVWDKGRDFATVRKVLSMPQVNIVKKTEVQTGGFSKESILPKRNSDKLIARKKDWDPKKYGGFDSPTVAYSVLVVAKVEKGKSKKLKSVKELLGITIMERSSFEKNPIDFLEAKGYKEVKKDLIIKLPKYSLFELENGRKRMLASAGELQKGNELALPSKYVNFLYLASHYEKLKGSPEDNEQKQLFVEQHKHYLDEIIEQISEFSKRVILADANLDKVLSAYNKHRDKPIREQAENIIHLFTLTNLGAPAAFKYFDTTIDRKRYTSTKEVLDATLIHQSITGLYETRIDLSQLGGDGGEAAAKGGSGGGGGMNPLQLLQPLPAEIKGTKLLAHWNSGATITCIPESFLEDEQPIKKTLIKTIHGEKQQNVYYVTFKVKGRKVEAEVIASPYEYILLSPTDVPWLTQQPLQLTILVPLQEYQEKILSKTALPEDQKQQLKTLFVKYDNLWQHWENQVGHRKIRPHNIATGDYPPRPQKQYPINPKAKPSIQIVIDDLLKQGVLTPQNSTMNTPVYPVPKPDGRWRMVLDYREVNKTIPLTAAQNQHSAGILATIVRQKYKTTLDLANGFWAHPITPESYWLTAFTWQGKQYCWTRLPQGFLNSPALFNADVVDLLKEIPNVQVYVDDIYLSHDDPKEHVQQLEKVFQILLQAGYVVSLKKSEIGQKTVEFLGFNITKEGRGLTDTFKTKLLNITPPKDLKQLQSILGLLNFARNFIPNFAELVQPLYNLIAPAKGKYIEWSEENTKQLNMVIEALNTASNLEERLPEQRLVIKVNTSPSAGYVRYYNETGKKPIMYLNYVFSKAELKFSMLEKLLTTMHKALIKAMDLAMGQEILVYSPIVSMTKIQKTPLPERKALPIRWITWMTYLEDPRIQFHYDKTLPELKHIPDVYTSSQSPVKHPSQYEGVFYTDGSAIKSPDPTKSNNAGMGIVHATYKPEYQVLNQWSIPLGNHTAQMAEIAAVEFACKKALKIPGPVLVITDSFYVAESANKELPYWKSNGFVNNKKKPLKHISKWKSIAECLSMKPDITIQHEKGISLQIPVFILKGNALADKLATQGSYVVNAGKRTADGSEFEKRTADGSEFESPKKKAKVE

SEQ ID NO: 1330 - protein, 2180 aa, synthetic construct
MPAAKRVKLDGGDKKYSIGLDIGTNSVGWAVITDEYKVPSKKFKVLGNTDRHSIKKNLIGALLFDSGETAEATRLKRTARRRYTRRKNRICYLQEIFSNEMAKVDDSFFHRLEESFLVEEDKKHERHPIFGNIVDEVAYHEKYPTIYHLRKKLVDSTDKADLRLIYLALAHMIKFRGHFLIEGDLNPDNSDVDKLFIQLVQTYNQLFEENPINASGVDAKAILSARLSKSRRLENLIAQLPGEKKNGLFGNLIALSLGLTPNFKSNFDLAEDAKLQLSKDTYDDDLDNLLAQIGDQYADLFLAAKNLSDAILLSDILRVNTEITKAPLSASMIKRYDEHHQDLTLLKALVRQQLPEKYKEIFFDQSKNGYAGYIDGGASQEEFYKFIKPILEKMDGTEELLVKLNREDLLRKQRTFDNGSIPHQIHLGELHAILRRQEDFYPFLKDNREKIEKILTFRIPYYVGPLARGNSRFAWMTRKSEETITPWNFEEVVDKGASAQSFIERMTNFDKNLPNEKVLPKHSLLYEYFTVYNELTKVKYVTEGMRKPAFLSGEQKKAIVDLLFKTNRKVTVKQLKEDYFKKIECFDSVEISGVEDRFNASLGTYHDLLKIIKDKDFLDNEENEDILEDIVLTLTLFEDREMIEERLKTYAHLFDDKVMKQLKRRRYTGWGRLSRKLINGIRDKQSGKTILDFLKSDGFANRNFMQLIHDDSLTFKEDIQKAQVSGQGDSLHEHIANLAGSPAIKKGILQTVKVVDELVKVMGRHKPENIVIEMARENQTTQKGQKNSRERMKRIEEGIKELGSQILKEHPVENTQLQNEKLYLYYLQNGRDMYVDQELDINRLSDYDVDHIVPQSFLKDDSIDNKVLTRSDKARGKSDNVPSEEVVKKMKNYWRQLLNAKLITQRKFDNLTKAERGGLSELDKAGFIKRQLVETRQITKHVAQILDSRMNTKYDENDKLIREVKVITLKSKLVSDFRKDFQFYKVREINNYHHAHDAYLNAVVGTALIKKYPKLESEFVYGDYKVYDVRKMIAKSEQEIGKATAKYFFYSNIMNFFKTEITLANGEIRKRPLIETNGETGEIVWDKGRDFATVRKVLSMPQVNIVKKTEVQTGGFSKESILPKRNSDKLIARKKDWDPKKYGGFDSPTVAYSVLVVAKVEKGKSKKLKSVKELLGITIMERSSFEKNPIDFLEAKGYKEVKKDLIIKLPKYSLFELENGRKRMLASAGELQKGNELALPSKYVNFLYLASHYEKLKGSPEDNEQKQLFVEQHKHYLDEIIEQISEFSKRVILADANLDKVLSAYNKHRDKPIREQAENIIHLFTLTNLGAPAAFKYFDTTIDRKRYTSTKEVLDATLIHQSITGLYETRIDLSQLGGDGGGGGGSEAAAKGGGGSGGMNPLQLLQPLPAEIKGTKLLAHWNSGATITCIPESFLEDEQPIKKTLIKTIHGEKQQNVYYVTFKVKGRKVEAEVIASPYEYILLSPTDVPWLTQQPLQLTILVPLQEYQEKILSKTALPEDQKQQLKTLFVKYDNLWQHWENQVGHRKIRPHNIATGDYPPRPQKQYPINPKAKPSIQIVIDDLLKQGVLTPQNSTMNTPVYPVPKPDGRWRMVLDYREVNKTIPLTAAQNQHSAGILATIVRQKYKTTLDLANGFWAHPITPESYWLTAFTWQGKQYCWTRLPQGFLNSPALFNADVVDLLKEIPNVQVYVDDIYLSHDDPKEHVQQLEKVFQILLQAGYVVSLKKSEIGQKTVEFLGFNITKEGRGLTDTFKTKLLNITPPKDLKQLQSILGLLNFARNFIPNFAELVQPLYNLIAPAKGKYIEWSEENTKQLNMVIEALNTASNLEERLPEQRLVIKVNTSPSAGYVRYYNETGKKPIMYLNYVFSKAELKFSMLEKLLTTMHKALIKAMDLAMGQEILVYSPIVSMTKIQKTPLPERKALPIRWITWMTYLEDPRIQFHYDKTLPELKHIPDVYTSSQSPVKHPSQYEGVFYTDGSAIKSPDPTKSNNAGMGIVHATYKPEYQVLNQWSIPLGNHTAQMAEIAAVEFACKKALKIPGPVLVITDSFYVAESANKELPYWKSNGFVNNKKKPLKHISKWKSIAECLSMKPDITIQHEKGISLQIPVFILKGNALADKLATQGSYVVNAGKRTADGSEFEKRTADGSEFESPKKKAKVE

SEQ ID NO: 1331 - protein, 2174 aa, synthetic construct
MPAAKRVKLDGGDKKYSIGLDIGTNSVGWAVITDEYKVPSKKFKVLGNTDRHSIKKNLIGALLFDSGETAEATRLKRTARRRYTRRKNRICYLQEIFSNEMAKVDDSFFHRLEESFLVEEDKKHERHPIFGNIVDEVAYHEKYPTIYHLRKKLVDSTDKADLRLIYLALAHMIKFRGHFLIEGDLNPDNSDVDKLFIQLVQTYNQLFEENPINASGVDAKAILSARLSKSRRLENLIAQLPGEKKNGLFGNLIALSLGLTPNFKSNFDLAEDAKLQLSKDTYDDDLDNLLAQIGDQYADLFLAAKNLSDAILLSDILRVNTEITKAPLSASMIKRYDEHHQDLTLLKALVRQQLPEKYKEIFFDQSKNGYAGYIDGGASQEEFYKFIKPILEKMDGTEELLVKLNREDLLRKQRTFDNGSIPHQIHLGELHAILRRQEDFYPFLKDNREKIEKILTFRIPYYVGPLARGNSRFAWMTRKSEETITPWNFEEVVDKGASAQSFIERMTNFDKNLPNEKVLPKHSLLYEYFTVYNELTKVKYVTEGMRKPAFLSGEQKKAIVDLLFKTNRKVTVKQLKEDYFKKIECFDSVEISGVEDRFNASLGTYHDLLKIIKDKDFLDNEENEDILEDIVLTLTLFEDREMIEERLKTYAHLFDDKVMKQLKRRRYTGWGRLSRKLINGIRDKQSGKTILDFLKSDGFANRNFMQLIHDDSLTFKEDIQKAQVSGQGDSLHEHIANLAGSPAIKKGILQTVKVVDELVKVMGRHKPENIVIEMARENQTTQKGQKNSRERMKRIEEGIKELGSQILKEHPVENTQLQNEKLYLYYLQNGRDMYVDQELDINRLSDYDVDHIVPQSFLKDDSIDNKVLTRSDKARGKSDNVPSEEVVKKMKNYWRQLLNAKLITQRKFDNLTKAERGGLSELDKAGFIKRQLVETRQITKHVAQILDSRMNTKYDENDKLIREVKVITLKSKLVSDFRKDFQFYKVREINNYHHAHDAYLNAVVGTALIKKYPKLESEFVYGDYKVYDVRKMIAKSEQEIGKATAKYFFYSNIMNFFKTEITLANGEIRKRPLIETNGETGEIVWDKGRDFATVRKVLSMPQVNIVKKTEVQTGGFSKESILPKRNSDKLIARKKDWDPKKYGGFDSPTVAYSVLVVAKVEKGKSKKLKSVKELLGITIMERSSFEKNPIDFLEAKGYKEVKKDLIIKLPKYSLFELENGRKRMLASAGELQKGNELALPSKYVNFLYLASHYEKLKGSPEDNEQKQLFVEQHKHYLDEIIEQISEFSKRVILADANLDKVLSAYNKHRDKPIREQAENIIHLFTLTNLGAPAAFKYFDTTIDRKRYTSTKEVLDATLIHQSITGLYETRIDLSQLGGDGGGGSPAPGSSGGMNPLQLLQPLPAEIKGTKLLAHWNSGATITCIPESFLEDEQPIKKTLIKTIHGEKQQNVYYVTFKVKGRKVEAEVIASPYEYILLSPTDVPWLTQQPLQLTILVPLQEYQEKILSKTALPEDQKQQLKTLFVKYDNLWQHWENQVGHRKIRPHNIATGDYPPRPQKQYPINPKAKPSIQIVIDDLLKQGVLTPQNSTMNTPVYPVPKPDGRWRMVLDYREVNKTIPLTAAQNQHSAGILATIVRQKYKTTLDLANGFWAHPITPESYWLTAFTWQGKQYCWTRLPQGFLNSPALFNADVVDLLKEIPNVQVYVDDIYLSHDDPKEHVQQLEKVFQILLQAGYVVSLKKSEIGQKTVEFLGFNITKEGRGLTDTFKTKLLNITPPKDLKQLQSILGLLNFARNFIPNFAELVQPLYNLIAPAKGKYIEWSEENTKQLNMVIEALNTASNLEERLPEQRLVIKVNTSPSAGYVRYYNETGKKPIMYLNYVFSKAELKFSMLEKLLTTMHKALIKAMDLAMGQEILVYSPIVSMTKIQKTPLPERKALPIRWITWMTYLEDPRIQFHYDKTLPELKHIPDVYTSSQSPVKHPSQYEGVFYTDGSAIKSPDPTKSNNAGMGIVHATYKPEYQVLNQWSIPLGNHTAQMAEIAAVEFACKKALKIPGPVLVITDSFYVAESANKELPYWKSNGFVNNKKKPLKHISKWKSIAECLSMKPDITIQHEKGISLQIPVFILKGNALADKLATQGSYVVNAGKRTADGSEFEKRTADGSEFESPKKKAKVE

SEQ ID NO: 1332 - protein, 2177 aa, synthetic construct
MPAAKRVKLDGGDKKYSIGLDIGTNSVGWAVITDEYKVPSKKFKVLGNTDRHSIKKNLIGALLFDSGETAEATRLKRTARRRYTRRKNRICYLQEIFSNEMAKVDDSFFHRLEESFLVEEDKKHERHPIFGNIVDEVAYHEKYPTIYHLRKKLVDSTDKADLRLIYLALAHMIKFRGHFLIEGDLNPDNSDVDKLFIQLVQTYNQLFEENPINASGVDAKAILSARLSKSRRLENLIAQLPGEKKNGLFGNLIALSLGLTPNFKSNFDLAEDAKLQLSKDTYDDDLDNLLAQIGDQYADLFLAAKNLSDAILLSDILRVNTEITKAPLSASMIKRYDEHHQDLTLLKALVRQQLPEKYKEIFFDQSKNGYAGYIDGGASQEEFYKFIKPILEKMDGTEELLVKLNREDLLRKQRTFDNGSIPHQIHLGELHAILRRQEDFYPFLKDNREKIEKILTFRIPYYVGPLARGNSRFAWMTRKSEETITPWNFEEVVDKGASAQSFIERMTNFDKNLPNEKVLPKHSLLYEYFTVYNELTKVKYVTEGMRKPAFLSGEQKKAIVDLLFKTNRKVTVKQLKEDYFKKIECFDSVEISGVEDRFNASLGTYHDLLKIIKDKDFLDNEENEDILEDIVLTLTLFEDREMIEERLKTYAHLFDDKVMKQLKRRRYTGWGRLSRKLINGIRDKQSGKTILDFLKSDGFANRNFMQLIHDDSLTFKEDIQKAQVSGQGDSLHEHIANLAGSPAIKKGILQTVKVVDELVKVMGRHKPENIVIEMARENQTTQKGQKNSRERMKRIEEGIKELGSQILKEHPVENTQLQNEKLYLYYLQNGRDMYVDQELDINRLSDYDVDHIVPQSFLKDDSIDNKVLTRSDKARGKSDNVPSEEVVKKMKNYWRQLLNAKLITQRKFDNLTKAERGGLSELDKAGFIKRQLVETRQITKHVAQILDSRMNTKYDENDKLIREVKVITLKSKLVSDFRKDFQFYKVREINNYHHAHDAYLNAVVGTALIKKYPKLESEFVYGDYKVYDVRKMIAKSEQEIGKATAKYFFYSNIMNFFKTEITLANGEIRKRPLIETNGETGEIVWDKGRDFATVRKVLSMPQVNIVKKTEVQTGGFSKESILPKRNSDKLIARKKDWDPKKYGGFDSPTVAYSVLVVAKVEKGKSKKLKSVKELLGITIMERSSFEKNPIDFLEAKGYKEVKKDLIIKLPKYSLFELENGRKRMLASAGELQKGNELALPSKYVNFLYLASHYEKLKGSPEDNEQKQLFVEQHKHYLDEIIEQISEFSKRVILADANLDKVLSAYNKHRDKPIREQAENIIHLFTLTNLGAPAAFKYFDTTIDRKRYTSTKEVLDATLIHQSITGLYETRIDLSQLGGDGGGSSGSSGSSGSSGGMNPLQLLQPLPAEIKGTKLLAHWNSGATITCIPESFLEDEQPIKKTLIKTIHGEKQQNVYYVTFKVKGRKVEAEVIASPYEYILLSPTDVPWLTQQPLQLTILVPLQEYQEKILSKTALPEDQKQQLKTLFVKYDNLWQHWENQVGHRKIRPHNIATGDYPPRPQKQYPINPKAKPSIQIVIDDLLKQGVLTPQNSTMNTPVYPVPKPDGRWRMVLDYREVNKTIPLTAAQNQHSAGILATIVRQKYKTTLDLANGFWAHPITPESYWLTAFTWQGKQYCWTRLPQGFLNSPALFNADVVDLLKEIPNVQVYVDDIYLSHDDPKEHVQQLEKVFQILLQAGYVVSLKKSEIGQKTVEFLGFNITKEGRGLTDTFKTKLLNITPPKDLKQLQSILGLLNFARNFIPNFAELVQPLYNLIAPAKGKYIEWSEENTKQLNMVIEALNTASNLEERLPEQRLVIKVNTSPSAGYVRYYNETGKKPIMYLNYVFSKAELKFSMLEKLLTTMHKALIKAMDLAMGQEILVYSPIVSMTKIQKTPLPERKALPIRWITWMTYLEDPRIQFHYDKTLPELKHIPDVYTSSQSPVKHPSQYEGVFYTDGSAIKSPDPTKSNNAGMGIVHATYKPEYQVLNQWSIPLGNHTAQMAEIAAVEFACKKALKIPGPVLVITDSFYVAESANKELPYWKSNGFVNNKKKPLKHISKWKSIAECLSMKPDITIQHEKGISLQIPVFILKGNALADKLATQGSYVVNAGKRTADGSEFEKRTADGSEFESPKKKAKVE

SEQ ID NO: 1333 - protein, 2174 aa, synthetic construct
MPAAKRVKLDGGDKKYSIGLDIGTNSVGWAVITDEYKVPSKKFKVLGNTDRHSIKKNLIGALLFDSGETAEATRLKRTARRRYTRRKNRICYLQEIFSNEMAKVDDSFFHRLEESFLVEEDKKHERHPIFGNIVDEVAYHEKYPTIYHLRKKLVDSTDKADLRLIYLALAHMIKFRGHFLIEGDLNPDNSDVDKLFIQLVQTYNQLFEENPINASGVDAKAILSARLSKSRRLENLIAQLPGEKKNGLFGNLIALSLGLTPNFKSNFDLAEDAKLQLSKDTYDDDLDNLLAQIGDQYADLFLAAKNLSDAILLSDILRVNTEITKAPLSASMIKRYDEHHQDLTLLKALVRQQLPEKYKEIFFDQSKNGYAGYIDGGASQEEFYKFIKPILEKMDGTEELLVKLNREDLLRKQRTFDNGSIPHQIHLGELHAILRRQEDFYPFLKDNREKIEKILTFRIPYYVGPLARGNSRFAWMTRKSEETITPWNFEEVVDKGASAQSFIERMTNFDKNLPNEKVLPKHSLLYEYFTVYNELTKVKYVTEGMRKPAFLSGEQKKAIVDLLFKTNRKVTVKQLKEDYFKKIECFDSVEISGVEDRFNASLGTYHDLLKIIKDKDFLDNEENEDILEDIVLTLTLFEDREMIEERLKTYAHLFDDKVMKQLKRRRYTGWGRLSRKLINGIRDKQSGKTILDFLKSDGFANRNFMQLIHDDSLTFKEDIQKAQVSGQGDSLHEHIANLAGSPAIKKGILQTVKVVDELVKVMGRHKPENIVIEMARENQTTQKGQKNSRERMKRIEEGIKELGSQILKEHPVENTQLQNEKLYLYYLQNGRDMYVDQELDINRLSDYDVDHIVPQSFLKDDSIDNKVLTRSDKARGKSDNVPSEEVVKKMKNYWRQLLNAKLITQRKFDNLTKAERGGLSELDKAGFIKRQLVETRQITKHVAQILDSRMNTKYDENDKLIREVKVITLKSKLVSDFRKDFQFYKVREINNYHHAHDAYLNAVVGTALIKKYPKLESEFVYGDYKVYDVRKMIAKSEQEIGKATAKYFFYSNIMNFFKTEITLANGEIRKRPLIETNGETGEIVWDKGRDFATVRKVLSMPQVNIVKKTEVQTGGFSKESILPKRNSDKLIARKKDWDPKKYGGFDSPTVAYSVLVVAKVEKGKSKKLKSVKELLGITIMERSSFEKNPIDFLEAKGYKEVKKDLIIKLPKYSLFELENGRKRMLASAGELQKGNELALPSKYVNFLYLASHYEKLKGSPEDNEQKQLFVEQHKHYLDEIIEQISEFSKRVILADANLDKVLSAYNKHRDKPIREQAENIIHLFTLTNLGAPAAFKYFDTTIDRKRYTSTKEVLDATLIHQSITGLYETRIDLSQLGGDGGPAPGSSGGSGGMNPLQLLQPLPAEIKGTKLLAHWNSGATITCIPESFLEDEQPIKKTLIKTIHGEKQQNVYYVTFKVKGRKVEAEVIASPYEYILLSPTDVPWLTQQPLQLTILVPLQEYQEKILSKTALPEDQKQQLKTLFVKYDNLWQHWENQVGHRKIRPHNIATGDYPPRPQKQYPINPKAKPSIQIVIDDLLKQGVLTPQNSTMNTPVYPVPKPDGRWRMVLDYREVNKTIPLTAAQNQHSAGILATIVRQKYKTTLDLANGFWAHPITPESYWLTAFTWQGKQYCWTRLPQGFLNSPALFNADVVDLLKEIPNVQVYVDDIYLSHDDPKEHVQQLEKVFQILLQAGYVVSLKKSEIGQKTVEFLGFNITKEGRGLTDTFKTKLLNITPPKDLKQLQSILGLLNFARNFIPNFAELVQPLYNLIAPAKGKYIEWSEENTKQLNMVIEALNTASNLEERLPEQRLVIKVNTSPSAGYVRYYNETGKKPIMYLNYVFSKAELKFSMLEKLLTTMHKALIKAMDLAMGQEILVYSPIVSMTKIQKTPLPERKALPIRWITWMTYLEDPRIQFHYDKTLPELKHIPDVYTSSQSPVKHPSQYEGVFYTDGSAIKSPDPTKSNNAGMGIVHATYKPEYQVLNQWSIPLGNHTAQMAEIAAVEFACKKALKIPGPVLVITDSFYVAESANKELPYWKSNGFVNNKKKPLKHISKWKSIAECLSMKPDITIQHEKGISLQIPVFILKGNALADKLATQGSYVVNAGKRTADGSEFEKRTADGSEFESPKKKAKVE

SEQ ID NO: 1334 - protein, 2176 aa, synthetic construct
MPAAKRVKLDGGDKKYSIGLDIGTNSVGWAVITDEYKVPSKKFKVLGNTDRHSIKKNLIGALLFDSGETAEATRLKRTARRRYTRRKNRICYLQEIFSNEMAKVDDSFFHRLEESFLVEEDKKHERHPIFGNIVDEVAYHEKYPTIYHLRKKLVDSTDKADLRLIYLALAHMIKFRGHFLIEGDLNPDNSDVDKLFIQLVQTYNQLFEENPINASGVDAKAILSARLSKSRRLENLIAQLPGEKKNGLFGNLIALSLGLTPNFKSNFDLAEDAKLQLSKDTYDDDLDNLLAQIGDQYADLFLAAKNLSDAILLSDILRVNTEITKAPLSASMIKRYDEHHQDLTLLKALVRQQLPEKYKEIFFDQSKNGYAGYIDGGASQEEFYKFIKPILEKMDGTEELLVKLNREDLLRKQRTFDNGSIPHQIHLGELHAILRRQEDFYPFLKDNREKIEKILTFRIPYYVGPLARGNSRFAWMTRKSEETITPWNFEEVVDKGASAQSFIERMTNFDKNLPNEKVLPKHSLLYEYFTVYNELTKVKYVTEGMRKPAFLSGEQKKAIVDLLFKTNRKVTVKQLKEDYFKKIECFDSVEISGVEDRFNASLGTYHDLLKIIKDKDFLDNEENEDILEDIVLTLTLFEDREMIEERLKTYAHLFDDKVMKQLKRRRYTGWGRLSRKLINGIRDKQSGKTILDFLKSDGFANRNFMQLIHDDSLTFKEDIQKAQVSGQGDSLHEHIANLAGSPAIKKGILQTVKVVDELVKVMGRHKPENIVIEMARENQTTQKGQKNSRERMKRIEEGIKELGSQILKEHPVENTQLQNEKLYLYYLQNGRDMYVDQELDINRLSDYDVDHIVPQSFLKDDSIDNKVLTRSDKARGKSDNVPSEEVVKKMKNYWRQLLNAKLITQRKFDNLTKAERGGLSELDKAGFIKRQLVETRQITKHVAQILDSRMNTKYDENDKLIREVKVITLKSKLVSDFRKDFQFYKVREINNYHHAHDAYLNAVVGTALIKKYPKLESEFVYGDYKVYDVRKMIAKSEQEIGKATAKYFFYSNIMNFFKTEITLANGEIRKRPLIETNGETGEIVWDKGRDFATVRKVLSMPQVNIVKKTEVQTGGFSKESILPKRNSDKLIARKKDWDPKKYGGFDSPTVAYSVLVVAKVEKGKSKKLKSVKELLGITIMERSSFEKNPIDFLEAKGYKEVKKDLIIKLPKYSLFELENGRKRMLASAGELQKGNELALPSKYVNFLYLASHYEKLKGSPEDNEQKQLFVEQHKHYLDEIIEQISEFSKRVILADANLDKVLSAYNKHRDKPIREQAENIIHLFTLTNLGAPAAFKYFDTTIDRKRYTSTKEVLDATLIHQSITGLYETRIDLSQLGGDGGEAAAKGGGGGSGGMNPLQLLQPLPAEIKGTKLLAHWNSGATITCIPESFLEDEQPIKKTLIKTIHGEKQQNVYYVTFKVKGRKVEAEVIASPYEYILLSPTDVPWLTQQPLQLTILVPLQEYQEKILSKTALPEDQKQQLKTLFVKYDNLWQHWENQVGHRKIRPHNIATGDYPPRPQKQYPINPKAKPSIQIVIDDLLKQGVLTPQNSTMNTPVYPVPKPDGRWRMVLDYREVNKTIPLTAAQNQHSAGILATIVRQKYKTTLDLANGFWAHPITPESYWLTAFTWQGKQYCWTRLPQGFLNSPALFNADVVDLLKEIPNVQVYVDDIYLSHDDPKEHVQQLEKVFQILLQAGYVVSLKKSEIGQKTVEFLGFNITKEGRGLTDTFKTKLLNITPPKDLKQLQSILGLLNFARNFIPNFAELVQPLYNLIAPAKGKYIEWSEENTKQLNMVIEALNTASNLEERLPEQRLVIKVNTSPSAGYVRYYNETGKKPIMYLNYVFSKAELKFSMLEKLLTTMHKALIKAMDLAMGQEILVYSPIVSMTKIQKTPLPERKALPIRWITWMTYLEDPRIQFHYDKTLPELKHIPDVYTSSQSPVKHPSQYEGVFYTDGSAIKSPDPTKSNNAGMGIVHATYKPEYQVLNQWSIPLGNHTAQMAEIAAVEFACKKALKIPGPVLVITDSFYVAESANKELPYWKSNGFVNNKKKPLKHISKWKSIAECLSMKPDITIQHEKGISLQIPVFILKGNALADKLATQGSYVVNAGKRTADGSEFEKRTADGSEFESPKKKAKVE

SEQ ID NO: 1335 - protein, 2176 aa, synthetic construct
MPAAKRVKLDGGDKKYSIGLDIGTNSVGWAVITDEYKVPSKKFKVLGNTDRHSIKKNLIGALLFDSGETAEATRLKRTARRRYTRRKNRICYLQEIFSNEMAKVDDSFFHRLEESFLVEEDKKHERHPIFGNIVDEVAYHEKYPTIYHLRKKLVDSTDKADLRLIYLALAHMIKFRGHFLIEGDLNPDNSDVDKLFIQLVQTYNQLFEENPINASGVDAKAILSARLSKSRRLENLIAQLPGEKKNGLFGNLIALSLGLTPNFKSNFDLAEDAKLQLSKDTYDDDLDNLLAQIGDQYADLFLAAKNLSDAILLSDILRVNTEITKAPLSASMIKRYDEHHQDLTLLKALVRQQLPEKYKEIFFDQSKNGYAGYIDGGASQEEFYKFIKPILEKMDGTEELLVKLNREDLLRKQRTFDNGSIPHQIHLGELHAILRRQEDFYPFLKDNREKIEKILTFRIPYYVGPLARGNSRFAWMTRKSEETITPWNFEEVVDKGASAQSFIERMTNFDKNLPNEKVLPKHSLLYEYFTVYNELTKVKYVTEGMRKPAFLSGEQKKAIVDLLFKTNRKVTVKQLKEDYFKKIECFDSVEISGVEDRFNASLGTYHDLLKIIKDKDFLDNEENEDILEDIVLTLTLFEDREMIEERLKTYAHLFDDKVMKQLKRRRYTGWGRLSRKLINGIRDKQSGKTILDFLKSDGFANRNFMQLIHDDSLTFKEDIQKAQVSGQGDSLHEHIANLAGSPAIKKGILQTVKVVDELVKVMGRHKPENIVIEMARENQTTQKGQKNSRERMKRIEEGIKELGSQILKEHPVENTQLQNEKLYLYYLQNGRDMYVDQELDINRLSDYDVDHIVPQSFLKDDSIDNKVLTRSDKARGKSDNVPSEEVVKKMKNYWRQLLNAKLITQRKFDNLTKAERGGLSELDKAGFIKRQLVETRQITKHVAQILDSRMNTKYDENDKLIREVKVITLKSKLVSDFRKDFQFYKVREINNYHHAHDAYLNAVVGTALIKKYPKLESEFVYGDYKVYDVRKMIAKSEQEIGKATAKYFFYSNIMNFFKTEITLANGEIRKRPLIETNGETGEIVWDKGRDFATVRKVLSMPQVNIVKKTEVQTGGFSKESILPKRNSDKLIARKKDWDPKKYGGFDSPTVAYSVLVVAKVEKGKSKKLKSVKELLGITIMERSSFEKNPIDFLEAKGYKEVKKDLIIKLPKYSLFELENGRKRMLASAGELQKGNELALPSKYVNFLYLASHYEKLKGSPEDNEQKQLFVEQHKHYLDEIIEQISEFSKRVILADANLDKVLSAYNKHRDKPIREQAENIIHLFTLTNLGAPAAFKYFDTTIDRKRYTSTKEVLDATLIHQSITGLYETRIDLSQLGGDGGEAAAKGGGGSSGGMNPLQLLQPLPAEIKGTKLLAHWNSGATITCIPESFLEDEQPIKKTLIKTIHGEKQQNVYYVTFKVKGRKVEAEVIASPYEYILLSPTDVPWLTQQPLQLTILVPLQEYQEKILSKTALPEDQKQQLKTLFVKYDNLWQHWENQVGHRKIRPHNIATGDYPPRPQKQYPINPKAKPSIQIVIDDLLKQGVLTPQNSTMNTPVYPVPKPDGRWRMVLDYREVNKTIPLTAAQNQHSAGILATIVRQKYKTTLDLANGFWAHPITPESYWLTAFTWQGKQYCWTRLPQGFLNSPALFNADVVDLLKEIPNVQVYVDDIYLSHDDPKEHVQQLEKVFQILLQAGYVVSLKKSEIGQKTVEFLGFNITKEGRGLTDTFKTKLLNITPPKDLKQLQSILGLLNFARNFIPNFAELVQPLYNLIAPAKGKYIEWSEENTKQLNMVIEALNTASNLEERLPEQRLVIKVNTSPSAGYVRYYNETGKKPIMYLNYVFSKAELKFSMLEKLLTTMHKALIKAMDLAMGQEILVYSPIVSMTKIQKTPLPERKALPIRWITWMTYLEDPRIQFHYDKTLPELKHIPDVYTSSQSPVKHPSQYEGVFYTDGSAIKSPDPTKSNNAGMGIVHATYKPEYQVLNQWSIPLGNHTAQMAEIAAVEFACKKALKIPGPVLVITDSFYVAESANKELPYWKSNGFVNNKKKPLKHISKWKSIAECLSMKPDITIQHEKGISLQIPVFILKGNALADKLATQGSYVVNAGKRTADGSEFEKRTADGSEFESPKKKAKVE

SEQ ID NO: 1336 - protein, 2174 aa, synthetic construct
MPAAKRVKLDGGDKKYSIGLDIGTNSVGWAVITDEYKVPSKKFKVLGNTDRHSIKKNLIGALLFDSGETAEATRLKRTARRRYTRRKNRICYLQEIFSNEMAKVDDSFFHRLEESFLVEEDKKHERHPIFGNIVDEVAYHEKYPTIYHLRKKLVDSTDKADLRLIYLALAHMIKFRGHFLIEGDLNPDNSDVDKLFIQLVQTYNQLFEENPINASGVDAKAILSARLSKSRRLENLIAQLPGEKKNGLFGNLIALSLGLTPNFKSNFDLAEDAKLQLSKDTYDDDLDNLLAQIGDQYADLFLAAKNLSDAILLSDILRVNTEITKAPLSASMIKRYDEHHQDLTLLKALVRQQLPEKYKEIFFDQSKNGYAGYIDGGASQEEFYKFIKPILEKMDGTEELLVKLNREDLLRKQRTFDNGSIPHQIHLGELHAILRRQEDFYPFLKDNREKIEKILTFRIPYYVGPLARGNSRFAWMTRKSEETITPWNFEEVVDKGASAQSFIERMTNFDKNLPNEKVLPKHSLLYEYFTVYNELTKVKYVTEGMRKPAFLSGEQKKAIVDLLFKTNRKVTVKQLKEDYFKKIECFDSVEISGVEDRFNASLGTYHDLLKIIKDKDFLDNEENEDILEDIVLTLTLFEDREMIEERLKTYAHLFDDKVMKQLKRRRYTGWGRLSRKLINGIRDKQSGKTILDFLKSDGFANRNFMQLIHDDSLTFKEDIQKAQVSGQGDSLHEHIANLAGSPAIKKGILQTVKVVDELVKVMGRHKPENIVIEMARENQTTQKGQKNSRERMKRIEEGIKELGSQILKEHPVENTQLQNEKLYLYYLQNGRDMYVDQELDINRLSDYDVDHIVPQSFLKDDSIDNKVLTRSDKARGKSDNVPSEEVVKKMKNYWRQLLNAKLITQRKFDNLTKAERGGLSELDKAGFIKRQLVETRQITKHVAQILDSRMNTKYDENDKLIREVKVITLKSKLVSDFRKDFQFYKVREINNYHHAHDAYLNAVVGTALIKKYPKLESEFVYGDYKVYDVRKMIAKSEQEIGKATAKYFFYSNIMNFFKTEITLANGEIRKRPLIETNGETGEIVWDKGRDFATVRKVLSMPQVNIVKKTEVQTGGFSKESILPKRNSDKLIARKKDWDPKKYGGFDSPTVAYSVLVVAKVEKGKSKKLKSVKELLGITIMERSSFEKNPIDFLEAKGYKEVKKDLIIKLPKYSLFELENGRKRMLASAGELQKGNELALPSKYVNFLYLASHYEKLKGSPEDNEQKQLFVEQHKHYLDEIIEQISEFSKRVILADANLDKVLSAYNKHRDKPIREQAENIIHLFTLTNLGAPAAFKYFDTTIDRKRYTSTKEVLDATLIHQSITGLYETRIDLSQLGGDGGGGGGSSPAPGGMNPLQLLQPLPAEIKGTKLLAHWNSGATITCIPESFLEDEQPIKKTLIKTIHGEKQQNVYYVTFKVKGRKVEAEVIASPYEYILLSPTDVPWLTQQPLQLTILVPLQEYQEKILSKTALPEDQKQQLKTLFVKYDNLWQHWENQVGHRKIRPHNIATGDYPPRPQKQYPINPKAKPSIQIVIDDLLKQGVLTPQNSTMNTPVYPVPKPDGRWRMVLDYREVNKTIPLTAAQNQHSAGILATIVRQKYKTTLDLANGFWAHPITPESYWLTAFTWQGKQYCWTRLPQGFLNSPALFNADVVDLLKEIPNVQVYVDDIYLSHDDPKEHVQQLEKVFQILLQAGYVVSLKKSEIGQKTVEFLGFNITKEGRGLTDTFKTKLLNITPPKDLKQLQSILGLLNFARNFIPNFAELVQPLYNLIAPAKGKYIEWSEENTKQLNMVIEALNTASNLEERLPEQRLVIKVNTSPSAGYVRYYNETGKKPIMYLNYVFSKAELKFSMLEKLLTTMHKALIKAMDLAMGQEILVYSPIVSMTKIQKTPLPERKALPIRWITWMTYLEDPRIQFHYDKTLPELKHIPDVYTSSQSPVKHPSQYEGVFYTDGSAIKSPDPTKSNNAGMGIVHATYKPEYQVLNQWSIPLGNHTAQMAEIAAVEFACKKALKIPGPVLVITDSFYVAESANKELPYWKSNGFVNNKKKPLKHISKWKSIAECLSMKPDITIQHEKGISLQIPVFILKGNALADKLATQGSYVVNAGKRTADGSEFEKRTADGSEFESPKKKAKVE

SEQ ID NO: 1337 - protein, 2176 aa, synthetic construct
MPAAKRVKLDGGDKKYSIGLDIGTNSVGWAVITDEYKVPSKKFKVLGNTDRHSIKKNLIGALLFDSGETAEATRLKRTARRRYTRRKNRICYLQEIFSNEMAKVDDSFFHRLEESFLVEEDKKHERHPIFGNIVDEVAYHEKYPTIYHLRKKLVDSTDKADLRLIYLALAHMIKFRGHFLIEGDLNPDNSDVDKLFIQLVQTYNQLFEENPINASGVDAKAILSARLSKSRRLENLIAQLPGEKKNGLFGNLIALSLGLTPNFKSNFDLAEDAKLQLSKDTYDDDLDNLLAQIGDQYADLFLAAKNLSDAILLSDILRVNTEITKAPLSASMIKRYDEHHQDLTLLKALVRQQLPEKYKEIFFDQSKNGYAGYIDGGASQEEFYKFIKPILEKMDGTEELLVKLNREDLLRKQRTFDNGSIPHQIHLGELHAILRRQEDFYPFLKDNREKIEKILTFRIPYYVGPLARGNSRFAWMTRKSEETITPWNFEEVVDKGASAQSFIERMTNFDKNLPNEKVLPKHSLLYEYFTVYNELTKVKYVTEGMRKPAFLSGEQKKAIVDLLFKTNRKVTVKQLKEDYFKKIECFDSVEISGVEDRFNASLGTYHDLLKIIKDKDFLDNEENEDILEDIVLTLTLFEDREMIEERLKTYAHLFDDKVMKQLKRRRYTGWGRLSRKLINGIRDKQSGKTILDFLKSDGFANRNFMQLIHDDSLTFKEDIQKAQVSGQGDSLHEHIANLAGSPAIKKGILQTVKVVDELVKVMGRHKPENIVIEMARENQTTQKGQKNSRERMKRIEEGIKELGSQILKEHPVENTQLQNEKLYLYYLQNGRDMYVDQELDINRLSDYDVDHIVPQSFLKDDSIDNKVLTRSDKARGKSDNVPSEEVVKKMKNYWRQLLNAKLITQRKFDNLTKAERGGLSELDKAGFIKRQLVETRQITKHVAQILDSRMNTKYDENDKLIREVKVITLKSKLVSDFRKDFQFYKVREINNYHHAHDAYLNAVVGTALIKKYPKLESEFVYGDYKVYDVRKMIAKSEQEIGKATAKYFFYSNIMNFFKTEITLANGEIRKRPLIETNGETGEIVWDKGRDFATVRKVLSMPQVNIVKKTEVQTGGFSKESILPKRNSDKLIARKKDWDPKKYGGFDSPTVAYSVLVVAKVEKGKSKKLKSVKELLGITIMERSSFEKNPIDFLEAKGYKEVKKDLIIKLPKYSLFELENGRKRMLASAGELQKGNELALPSKYVNFLYLASHYEKLKGSPEDNEQKQLFVEQHKHYLDEIIEQISEFSKRVILADANLDKVLSAYNKHRDKPIREQAENIIHLFTLTNLGAPAAFKYFDTTIDRKRYTSTKEVLDATLIHQSITGLYETRIDLSQLGGDGGGGGGSSEAAAKGGMNPLQLLQPLPAEIKGTKLLAHWNSGATITCIPESFLEDEQPIKKTLIKTIHGEKQQNVYYVTFKVKGRKVEAEVIASPYEYILLSPTDVPWLTQQPLQLTILVPLQEYQEKILSKTALPEDQKQQLKTLFVKYDNLWQHWENQVGHRKIRPHNIATGDYPPRPQKQYPINPKAKPSIQIVIDDLLKQGVLTPQNSTMNTPVYPVPKPDGRWRMVLDYREVNKTIPLTAAQNQHSAGILATIVRQKYKTTLDLANGFWAHPITPESYWLTAFTWQGKQYCWTRLPQGFLNSPALFNADVVDLLKEIPNVQVYVDDIYLSHDDPKEHVQQLEKVFQILLQAGYVVSLKKSEIGQKTVEFLGFNITKEGRGLTDTFKTKLLNITPPKDLKQLQSILGLLNFARNFIPNFAELVQPLYNLIAPAKGKYIEWSEENTKQLNMVIEALNTASNLEERLPEQRLVIKVNTSPSAGYVRYYNETGKKPIMYLNYVFSKAELKFSMLEKLLTTMHKALIKAMDLAMGQEILVYSPIVSMTKIQKTPLPERKALPIRWITWMTYLEDPRIQFHYDKTLPELKHIPDVYTSSQSPVKHPSQYEGVFYTDGSAIKSPDPTKSNNAGMGIVHATYKPEYQVLNQWSIPLGNHTAQMAEIAAVEFACKKALKIPGPVLVITDSFYVAESANKELPYWKSNGFVNNKKKPLKHISKWKSIAECLSMKPDITIQHEKGISLQIPVFILKGNALADKLATQGSYVVNAGKRTADGSEFEKRTADGSEFESPKKKAKVE

SEQ ID NO: 1338 - protein, 2174 aa, synthetic construct
MPAAKRVKLDGGDKKYSIGLDIGTNSVGWAVITDEYKVPSKKFKVLGNTDRHSIKKNLIGALLFDSGETAEATRLKRTARRRYTRRKNRICYLQEIFSNEMAKVDDSFFHRLEESFLVEEDKKHERHPIFGNIVDEVAYHEKYPTIYHLRKKLVDSTDKADLRLIYLALAHMIKFRGHFLIEGDLNPDNSDVDKLFIQLVQTYNQLFEENPINASGVDAKAILSARLSKSRRLENLIAQLPGEKKNGLFGNLIALSLGLTPNFKSNFDLAEDAKLQLSKDTYDDDLDNLLAQIGDQYADLFLAAKNLSDAILLSDILRVNTEITKAPLSASMIKRYDEHHQDLTLLKALVRQQLPEKYKEIFFDQSKNGYAGYIDGGASQEEFYKFIKPILEKMDGTEELLVKLNREDLLRKQRTFDNGSIPHQIHLGELHAILRRQEDFYPFLKDNREKIEKILTFRIPYYVGPLARGNSRFAWMTRKSEETITPWNFEEVVDKGASAQSFIERMTNFDKNLPNEKVLPKHSLLYEYFTVYNELTKVKYVTEGMRKPAFLSGEQKKAIVDLLFKTNRKVTVKQLKEDYFKKIECFDSVEISGVEDRFNASLGTYHDLLKIIKDKDFLDNEENEDILEDIVLTLTLFEDREMIEERLKTYAHLFDDKVMKQLKRRRYTGWGRLSRKLINGIRDKQSGKTILDFLKSDGFANRNFMQLIHDDSLTFKEDIQKAQVSGQGDSLHEHIANLAGSPAIKKGILQTVKVVDELVKVMGRHKPENIVIEMARENQTTQKGQKNSRERMKRIEEGIKELGSQILKEHPVENTQLQNEKLYLYYLQNGRDMYVDQELDINRLSDYDVDHIVPQSFLKDDSIDNKVLTRSDKARGKSDNVPSEEVVKKMKNYWRQLLNAKLITQRKFDNLTKAERGGLSELDKAGFIKRQLVETRQITKHVAQILDSRMNTKYDENDKLIREVKVITLKSKLVSDFRKDFQFYKVREINNYHHAHDAYLNAVVGTALIKKYPKLESEFVYGDYKVYDVRKMIAKSEQEIGKATAKYFFYSNIMNFFKTEITLANGEIRKRPLIETNGETGEIVWDKGRDFATVRKVLSMPQVNIVKKTEVQTGGFSKESILPKRNSDKLIARKKDWDPKKYGGFDSPTVAYSVLVVAKVEKGKSKKLKSVKELLGITIMERSSFEKNPIDFLEAKGYKEVKKDLIIKLPKYSLFELENGRKRMLASAGELQKGNELALPSKYVNFLYLASHYEKLKGSPEDNEQKQLFVEQHKHYLDEIIEQISEFSKRVILADANLDKVLSAYNKHRDKPIREQAENIIHLFTLTNLGAPAAFKYFDTTIDRKRYTSTKEVLDATLIHQSITGLYETRIDLSQLGGDGGGGGGGSGSSGGMNPLQLLQPLPAEIKGTKLLAHWNSGATITCIPESFLEDEQPIKKTLIKTIHGEKQQNVYYVTFKVKGRKVEAEVIASPYEYILLSPTDVPWLTQQPLQLTILVPLQEYQEKILSKTALPEDQKQQLKTLFVKYDNLWQHWENQVGHRKIRPHNIATGDYPPRPQKQYPINPKAKPSIQIVIDDLLKQGVLTPQNSTMNTPVYPVPKPDGRWRMVLDYREVNKTIPLTAAQNQHSAGILATIVRQKYKTTLDLANGFWAHPITPESYWLTAFTWQGKQYCWTRLPQGFLNSPALFNADVVDLLKEIPNVQVYVDDIYLSHDDPKEHVQQLEKVFQILLQAGYVVSLKKSEIGQKTVEFLGFNITKEGRGLTDTFKTKLLNITPPKDLKQLQSILGLLNFARNFIPNFAELVQPLYNLIAPAKGKYIEWSEENTKQLNMVIEALNTASNLEERLPEQRLVIKVNTSPSAGYVRYYNETGKKPIMYLNYVFSKAELKFSMLEKLLTTMHKALIKAMDLAMGQEILVYSPIVSMTKIQKTPLPERKALPIRWITWMTYLEDPRIQFHYDKTLPELKHIPDVYTSSQSPVKHPSQYEGVFYTDGSAIKSPDPTKSNNAGMGIVHATYKPEYQVLNQWSIPLGNHTAQMAEIAAVEFACKKALKIPGPVLVITDSFYVAESANKELPYWKSNGFVNNKKKPLKHISKWKSIAECLSMKPDITIQHEKGISLQIPVFILKGNALADKLATQGSYVVNAGKRTADGSEFEKRTADGSEFESPKKKAKVE

SEQ ID NO: 1339 - protein, 2176 aa, synthetic construct
MPAAKRVKLDGGDKKYSIGLDIGTNSVGWAVITDEYKVPSKKFKVLGNTDRHSIKKNLIGALLFDSGETAEATRLKRTARRRYTRRKNRICYLQEIFSNEMAKVDDSFFHRLEESFLVEEDKKHERHPIFGNIVDEVAYHEKYPTIYHLRKKLVDSTDKADLRLIYLALAHMIKFRGHFLIEGDLNPDNSDVDKLFIQLVQTYNQLFEENPINASGVDAKAILSARLSKSRRLENLIAQLPGEKKNGLFGNLIALSLGLTPNFKSNFDLAEDAKLQLSKDTYDDDLDNLLAQIGDQYADLFLAAKNLSDAILLSDILRVNTEITKAPLSASMIKRYDEHHQDLTLLKALVRQQLPEKYKEIFFDQSKNGYAGYIDGGASQEEFYKFIKPILEKMDGTEELLVKLNREDLLRKQRTFDNGSIPHQIHLGELHAILRRQEDFYPFLKDNREKIEKILTFRIPYYVGPLARGNSRFAWMTRKSEETITPWNFEEVVDKGASAQSFIERMTNFDKNLPNEKVLPKHSLLYEYFTVYNELTKVKYVTEGMRKPAFLSGEQKKAIVDLLFKTNRKVTVKQLKEDYFKKIECFDSVEISGVEDRFNASLGTYHDLLKIIKDKDFLDNEENEDILEDIVLTLTLFEDREMIEERLKTYAHLFDDKVMKQLKRRRYTGWGRLSRKLINGIRDKQSGKTILDFLKSDGFANRNFMQLIHDDSLTFKEDIQKAQVSGQGDSLHEHIANLAGSPAIKKGILQTVKVVDELVKVMGRHKPENIVIEMARENQTTQKGQKNSRERMKRIEEGIKELGSQILKEHPVENTQLQNEKLYLYYLQNGRDMYVDQELDINRLSDYDVDHIVPQSFLKDDSIDNKVLTRSDKARGKSDNVPSEEVVKKMKNYWRQLLNAKLITQRKFDNLTKAERGGLSELDKAGFIKRQLVETRQITKHVAQILDSRMNTKYDENDKLIREVKVITLKSKLVSDFRKDFQFYKVREINNYHHAHDAYLNAVVGTALIKKYPKLESEFVYGDYKVYDVRKMIAKSEQEIGKATAKYFFYSNIMNFFKTEITLANGEIRKRPLIETNGETGEIVWDKGRDFATVRKVLSMPQVNIVKKTEVQTGGFSKESILPKRNSDKLIARKKDWDPKKYGGFDSPTVAYSVLVVAKVEKGKSKKLKSVKELLGITIMERSSFEKNPIDFLEAKGYKEVKKDLIIKLPKYSLFELENGRKRMLASAGELQKGNELALPSKYVNFLYLASHYEKLKGSPEDNEQKQLFVEQHKHYLDEIIEQISEFSKRVILADANLDKVLSAYNKHRDKPIREQAENIIHLFTLTNLGAPAAFKYFDTTIDRKRYTSTKEVLDATLIHQSITGLYETRIDLSQLGGDGGGGGEAAAKGSSGGMNPLQLLQPLPAEIKGTKLLAHWNSGATITCIPESFLEDEQPIKKTLIKTIHGEKQQNVYYVTFKVKGRKVEAEVIASPYEYILLSPTDVPWLTQQPLQLTILVPLQEYQEKILSKTALPEDQKQQLKTLFVKYDNLWQHWENQVGHRKIRPHNIATGDYPPRPQKQYPINPKAKPSIQIVIDDLLKQGVLTPQNSTMNTPVYPVPKPDGRWRMVLDYREVNKTIPLTAAQNQHSAGILATIVRQKYKTTLDLANGFWAHPITPESYWLTAFTWQGKQYCWTRLPQGFLNSPALFNADVVDLLKEIPNVQVYVDDIYLSHDDPKEHVQQLEKVFQILLQAGYVVSLKKSEIGQKTVEFLGFNITKEGRGLTDTFKTKLLNITPPKDLKQLQSILGLLNFARNFIPNFAELVQPLYNLIAPAKGKYIEWSEENTKQLNMVIEALNTASNLEERLPEQRLVIKVNTSPSAGYVRYYNETGKKPIMYLNYVFSKAELKFSMLEKLLTTMHKALIKAMDLAMGQEILVYSPIVSMTKIQKTPLPERKALPIRWITWMTYLEDPRIQFHYDKTLPELKHIPDVYTSSQSPVKHPSQYEGVFYTDGSAIKSPDPTKSNNAGMGIVHATYKPEYQVLNQWSIPLGNHTAQMAEIAAVEFACKKALKIPGPVLVITDSFYVAESANKELPYWKSNGFVNNKKKPLKHISKWKSIAECLSMKPDITIQHEKGISLQIPVFILKGNALADKLATQGSYVVNAGKRTADGSEFEKRTADGSEFESPKKKAKVE

SEQ ID NO: 1340 - protein, 2171 aa, synthetic construct
MPAAKRVKLDGGDKKYSIGLDIGTNSVGWAVITDEYKVPSKKFKVLGNTDRHSIKKNLIGALLFDSGETAEATRLKRTARRRYTRRKNRICYLQEIFSNEMAKVDDSFFHRLEESFLVEEDKKHERHPIFGNIVDEVAYHEKYPTIYHLRKKLVDSTDKADLRLIYLALAHMIKFRGHFLIEGDLNPDNSDVDKLFIQLVQTYNQLFEENPINASGVDAKAILSARLSKSRRLENLIAQLPGEKKNGLFGNLIALSLGLTPNFKSNFDLAEDAKLQLSKDTYDDDLDNLLAQIGDQYADLFLAAKNLSDAILLSDILRVNTEITKAPLSASMIKRYDEHHQDLTLLKALVRQQLPEKYKEIFFDQSKNGYAGYIDGGASQEEFYKFIKPILEKMDGTEELLVKLNREDLLRKQRTFDNGSIPHQIHLGELHAILRRQEDFYPFLKDNREKIEKILTFRIPYYVGPLARGNSRFAWMTRKSEETITPWNFEEVVDKGASAQSFIERMTNFDKNLPNEKVLPKHSLLYEYFTVYNELTKVKYVTEGMRKPAFLSGEQKKAIVDLLFKTNRKVTVKQLKEDYFKKIECFDSVEISGVEDRFNASLGTYHDLLKIIKDKDFLDNEENEDILEDIVLTLTLFEDREMIEERLKTYAHLFDDKVMKQLKRRRYTGWGRLSRKLINGIRDKQSGKTILDFLKSDGFANRNFMQLIHDDSLTFKEDIQKAQVSGQGDSLHEHIANLAGSPAIKKGILQTVKVVDELVKVMGRHKPENIVIEMARENQTTQKGQKNSRERMKRIEEGIKELGSQILKEHPVENTQLQNEKLYLYYLQNGRDMYVDQELDINRLSDYDVDHIVPQSFLKDDSIDNKVLTRSDKARGKSDNVPSEEVVKKMKNYWRQLLNAKLITQRKFDNLTKAERGGLSELDKAGFIKRQLVETRQITKHVAQILDSRMNTKYDENDKLIREVKVITLKSKLVSDFRKDFQFYKVREINNYHHAHDAYLNAVVGTALIKKYPKLESEFVYGDYKVYDVRKMIAKSEQEIGKATAKYFFYSNIMNFFKTEITLANGEIRKRPLIETNGETGEIVWDKGRDFATVRKVLSMPQVNIVKKTEVQTGGFSKESILPKRNSDKLIARKKDWDPKKYGGFDSPTVAYSVLVVAKVEKGKSKKLKSVKELLGITIMERSSFEKNPIDFLEAKGYKEVKKDLIIKLPKYSLFELENGRKRMLASAGELQKGNELALPSKYVNFLYLASHYEKLKGSPEDNEQKQLFVEQHKHYLDEIIEQISEFSKRVILADANLDKVLSAYNKHRDKPIREQAENIIHLFTLTNLGAPAAFKYFDTTIDRKRYTSTKEVLDATLIHQSITGLYETRIDLSQLGGDGGGSSGGGGGMNPLQLLQPLPAEIKGTKLLAHWNSGATITCIPESFLEDEQPIKKTLIKTIHGEKQQNVYYVTFKVKGRKVEAEVIASPYEYILLSPTDVPWLTQQPLQLTILVPLQEYQEKILSKTALPEDQKQQLKTLFVKYDNLWQHWENQVGHRKIRPHNIATGDYPPRPQKQYPINPKAKPSIQIVIDDLLKQGVLTPQNSTMNTPVYPVPKPDGRWRMVLDYREVNKTIPLTAAQNQHSAGILATIVRQKYKTTLDLANGFWAHPITPESYWLTAFTWQGKQYCWTRLPQGFLNSPALFNADVVDLLKEIPNVQVYVDDIYLSHDDPKEHVQQLEKVFQILLQAGYVVSLKKSEIGQKTVEFLGFNITKEGRGLTDTFKTKLLNITPPKDLKQLQSILGLLNFARNFIPNFAELVQPLYNLIAPAKGKYIEWSEENTKQLNMVIEALNTASNLEERLPEQRLVIKVNTSPSAGYVRYYNETGKKPIMYLNYVFSKAELKFSMLEKLLTTMHKALIKAMDLAMGQEILVYSPIVSMTKIQKTPLPERKALPIRWITWMTYLEDPRIQFHYDKTLPELKHIPDVYTSSQSPVKHPSQYEGVFYTDGSAIKSPDPTKSNNAGMGIVHATYKPEYQVLNQWSIPLGNHTAQMAEIAAVEFACKKALKIPGPVLVITDSFYVAESANKELPYWKSNGFVNNKKKPLKHISKWKSIAECLSMKPDITIQHEKGISLQIPVFILKGNALADKLATQGSYVVNAGKRTADGSEFEKRTADGSEFESPKKKAKVE

SEQ ID NO: 1341 - protein, 2171 aa, synthetic construct
MPAAKRVKLDGGDKKYSIGLDIGTNSVGWAVITDEYKVPSKKFKVLGNTDRHSIKKNLIGALLFDSGETAEATRLKRTARRRYTRRKNRICYLQEIFSNEMAKVDDSFFHRLEESFLVEEDKKHERHPIFGNIVDEVAYHEKYPTIYHLRKKLVDSTDKADLRLIYLALAHMIKFRGHFLIEGDLNPDNSDVDKLFIQLVQTYNQLFEENPINASGVDAKAILSARLSKSRRLENLIAQLPGEKKNGLFGNLIALSLGLTPNFKSNFDLAEDAKLQLSKDTYDDDLDNLLAQIGDQYADLFLAAKNLSDAILLSDILRVNTEITKAPLSASMIKRYDEHHQDLTLLKALVRQQLPEKYKEIFFDQSKNGYAGYIDGGASQEEFYKFIKPILEKMDGTEELLVKLNREDLLRKQRTFDNGSIPHQIHLGELHAILRRQEDFYPFLKDNREKIEKILTFRIPYYVGPLARGNSRFAWMTRKSEETITPWNFEEVVDKGASAQSFIERMTNFDKNLPNEKVLPKHSLLYEYFTVYNELTKVKYVTEGMRKPAFLSGEQKKAIVDLLFKTNRKVTVKQLKEDYFKKIECFDSVEISGVEDRFNASLGTYHDLLKIIKDKDFLDNEENEDILEDIVLTLTLFEDREMIEERLKTYAHLFDDKVMKQLKRRRYTGWGRLSRKLINGIRDKQSGKTILDFLKSDGFANRNFMQLIHDDSLTFKEDIQKAQVSGQGDSLHEHIANLAGSPAIKKGILQTVKVVDELVKVMGRHKPENIVIEMARENQTTQKGQKNSRERMKRIEEGIKELGSQILKEHPVENTQLQNEKLYLYYLQNGRDMYVDQELDINRLSDYDVDHIVPQSFLKDDSIDNKVLTRSDKARGKSDNVPSEEVVKKMKNYWRQLLNAKLITQRKFDNLTKAERGGLSELDKAGFIKRQLVETRQITKHVAQILDSRMNTKYDENDKLIREVKVITLKSKLVSDFRKDFQFYKVREINNYHHAHDAYLNAVVGTALIKKYPKLESEFVYGDYKVYDVRKMIAKSEQEIGKATAKYFFYSNIMNFFKTEITLANGEIRKRPLIETNGETGEIVWDKGRDFATVRKVLSMPQVNIVKKTEVQTGGFSKESILPKRNSDKLIARKKDWDPKKYGGFDSPTVAYSVLVVAKVEKGKSKKLKSVKELLGITIMERSSFEKNPIDFLEAKGYKEVKKDLIIKLPKYSLFELENGRKRMLASAGELQKGNELALPSKYVNFLYLASHYEKLKGSPEDNEQKQLFVEQHKHYLDEIIEQISEFSKRVILADANLDKVLSAYNKHRDKPIREQAENIIHLFTLTNLGAPAAFKYFDTTIDRKRYTSTKEVLDATLIHQSITGLYETRIDLSQLGGDGGGGGGGSGGMNPLQLLQPLPAEIKGTKLLAHWNSGATITCIPESFLEDEQPIKKTLIKTIHGEKQQNVYYVTFKVKGRKVEAEVIASPYEYILLSPTDVPWLTQQPLQLTILVPLQEYQEKILSKTALPEDQKQQLKTLFVKYDNLWQHWENQVGHRKIRPHNIATGDYPPRPQKQYPINPKAKPSIQIVIDDLLKQGVLTPQNSTMNTPVYPVPKPDGRWRMVLDYREVNKTIPLTAAQNQHSAGILATIVRQKYKTTLDLANGFWAHPITPESYWLTAFTWQGKQYCWTRLPQGFLNSPALFNADVVDLLKEIPNVQVYVDDIYLSHDDPKEHVQQLEKVFQILLQAGYVVSLKKSEIGQKTVEFLGFNITKEGRGLTDTFKTKLLNITPPKDLKQLQSILGLLNFARNFIPNFAELVQPLYNLIAPAKGKYIEWSEENTKQLNMVIEALNTASNLEERLPEQRLVIKVNTSPSAGYVRYYNETGKKPIMYLNYVFSKAELKFSMLEKLLTTMHKALIKAMDLAMGQEILVYSPIVSMTKIQKTPLPERKALPIRWITWMTYLEDPRIQFHYDKTLPELKHIPDVYTSSQSPVKHPSQYEGVFYTDGSAIKSPDPTKSNNAGMGIVHATYKPEYQVLNQWSIPLGNHTAQMAEIAAVEFACKKALKIPGPVLVITDSFYVAESANKELPYWKSNGFVNNKKKPLKHISKWKSIAECLSMKPDITIQHEKGISLQIPVFILKGNALADKLATQGSYVVNAGKRTADGSEFEKRTADGSEFESPKKKAKVE

SEQ ID NO: 1342 - protein, 2176 aa, synthetic construct
MPAAKRVKLDGGDKKYSIGLDIGTNSVGWAVITDEYKVPSKKFKVLGNTDRHSIKKNLIGALLFDSGETAEATRLKRTARRRYTRRKNRICYLQEIFSNEMAKVDDSFFHRLEESFLVEEDKKHERHPIFGNIVDEVAYHEKYPTIYHLRKKLVDSTDKADLRLIYLALAHMIKFRGHFLIEGDLNPDNSDVDKLFIQLVQTYNQLFEENPINASGVDAKAILSARLSKSRRLENLIAQLPGEKKNGLFGNLIALSLGLTPNFKSNFDLAEDAKLQLSKDTYDDDLDNLLAQIGDQYADLFLAAKNLSDAILLSDILRVNTEITKAPLSASMIKRYDEHHQDLTLLKALVRQQLPEKYKEIFFDQSKNGYAGYIDGGASQEEFYKFIKPILEKMDGTEELLVKLNREDLLRKQRTFDNGSIPHQIHLGELHAILRRQEDFYPFLKDNREKIEKILTFRIPYYVGPLARGNSRFAWMTRKSEETITPWNFEEVVDKGASAQSFIERMTNFDKNLPNEKVLPKHSLLYEYFTVYNELTKVKYVTEGMRKPAFLSGEQKKAIVDLLFKTNRKVTVKQLKEDYFKKIECFDSVEISGVEDRFNASLGTYHDLLKIIKDKDFLDNEENEDILEDIVLTLTLFEDREMIEERLKTYAHLFDDKVMKQLKRRRYTGWGRLSRKLINGIRDKQSGKTILDFLKSDGFANRNFMQLIHDDSLTFKEDIQKAQVSGQGDSLHEHIANLAGSPAIKKGILQTVKVVDELVKVMGRHKPENIVIEMARENQTTQKGQKNSRERMKRIEEGIKELGSQILKEHPVENTQLQNEKLYLYYLQNGRDMYVDQELDINRLSDYDVDHIVPQSFLKDDSIDNKVLTRSDKARGKSDNVPSEEVVKKMKNYWRQLLNAKLITQRKFDNLTKAERGGLSELDKAGFIKRQLVETRQITKHVAQILDSRMNTKYDENDKLIREVKVITLKSKLVSDFRKDFQFYKVREINNYHHAHDAYLNAVVGTALIKKYPKLESEFVYGDYKVYDVRKMIAKSEQEIGKATAKYFFYSNIMNFFKTEITLANGEIRKRPLIETNGETGEIVWDKGRDFATVRKVLSMPQVNIVKKTEVQTGGFSKESILPKRNSDKLIARKKDWDPKKYGGFDSPTVAYSVLVVAKVEKGKSKKLKSVKELLGITIMERSSFEKNPIDFLEAKGYKEVKKDLIIKLPKYSLFELENGRKRMLASAGELQKGNELALPSKYVNFLYLASHYEKLKGSPEDNEQKQLFVEQHKHYLDEIIEQISEFSKRVILADANLDKVLSAYNKHRDKPIREQAENIIHLFTLTNLGAPAAFKYFDTTIDRKRYTSTKEVLDATLIHQSITGLYETRIDLSQLGGDGGEAAAKGGGPAPGGMNPLQLLQPLPAEIKGTKLLAHWNSGATITCIPESFLEDEQPIKKTLIKTIHGEKQQNVYYVTFKVKGRKVEAEVIASPYEYILLSPTDVPWLTQQPLQLTILVPLQEYQEKILSKTALPEDQKQQLKTLFVKYDNLWQHWENQVGHRKIRPHNIATGDYPPRPQKQYPINPKAKPSIQIVIDDLLKQGVLTPQNSTMNTPVYPVPKPDGRWRMVLDYREVNKTIPLTAAQNQHSAGILATIVRQKYKTTLDLANGFWAHPITPESYWLTAFTWQGKQYCWTRLPQGFLNSPALFNADVVDLLKEIPNVQVYVDDIYLSHDDPKEHVQQLEKVFQILLQAGYVVSLKKSEIGQKTVEFLGFNITKEGRGLTDTFKTKLLNITPPKDLKQLQSILGLLNFARNFIPNFAELVQPLYNLIAPAKGKYIEWSEENTKQLNMVIEALNTASNLEERLPEQRLVIKVNTSPSAGYVRYYNETGKKPIMYLNYVFSKAELKFSMLEKLLTTMHKALIKAMDLAMGQEILVYSPIVSMTKIQKTPLPERKALPIRWITWMTYLEDPRIQFHYDKTLPELKHIPDVYTSSQSPVKHPSQYEGVFYTDGSAIKSPDPTKSNNAGMGIVHATYKPEYQVLNQWSIPLGNHTAQMAEIAAVEFACKKALKIPGPVLVITDSFYVAESANKELPYWKSNGFVNNKKKPLKHISKWKSIAECLSMKPDITIQHEKGISLQIPVFILKGNALADKLATQGSYVVNAGKRTADGSEFEKRTADGSEFESPKKKAKVE

SEQ ID NO: 1343 - protein, 2171 aa, synthetic construct
MPAAKRVKLDGGDKKYSIGLDIGTNSVGWAVITDEYKVPSKKFKVLGNTDRHSIKKNLIGALLFDSGETAEATRLKRTARRRYTRRKNRICYLQEIFSNEMAKVDDSFFHRLEESFLVEEDKKHERHPIFGNIVDEVAYHEKYPTIYHLRKKLVDSTDKADLRLIYLALAHMIKFRGHFLIEGDLNPDNSDVDKLFIQLVQTYNQLFEENPINASGVDAKAILSARLSKSRRLENLIAQLPGEKKNGLFGNLIALSLGLTPNFKSNFDLAEDAKLQLSKDTYDDDLDNLLAQIGDQYADLFLAAKNLSDAILLSDILRVNTEITKAPLSASMIKRYDEHHQDLTLLKALVRQQLPEKYKEIFFDQSKNGYAGYIDGGASQEEFYKFIKPILEKMDGTEELLVKLNREDLLRKQRTFDNGSIPHQIHLGELHAILRRQEDFYPFLKDNREKIEKILTFRIPYYVGPLARGNSRFAWMTRKSEETITPWNFEEVVDKGASAQSFIERMTNFDKNLPNEKVLPKHSLLYEYFTVYNELTKVKYVTEGMRKPAFLSGEQKKAIVDLLFKTNRKVTVKQLKEDYFKKIECFDSVEISGVEDRFNASLGTYHDLLKIIKDKDFLDNEENEDILEDIVLTLTLFEDREMIEERLKTYAHLFDDKVMKQLKRRRYTGWGRLSRKLINGIRDKQSGKTILDFLKSDGFANRNFMQLIHDDSLTFKEDIQKAQVSGQGDSLHEHIANLAGSPAIKKGILQTVKVVDELVKVMGRHKPENIVIEMARENQTTQKGQKNSRERMKRIEEGIKELGSQILKEHPVENTQLQNEKLYLYYLQNGRDMYVDQELDINRLSDYDVDHIVPQSFLKDDSIDNKVLTRSDKARGKSDNVPSEEVVKKMKNYWRQLLNAKLITQRKFDNLTKAERGGLSELDKAGFIKRQLVETRQITKHVAQILDSRMNTKYDENDKLIREVKVITLKSKLVSDFRKDFQFYKVREINNYHHAHDAYLNAVVGTALIKKYPKLESEFVYGDYKVYDVRKMIAKSEQEIGKATAKYFFYSNIMNFFKTEITLANGEIRKRPLIETNGETGEIVWDKGRDFATVRKVLSMPQVNIVKKTEVQTGGFSKESILPKRNSDKLIARKKDWDPKKYGGFDSPTVAYSVLVVAKVEKGKSKKLKSVKELLGITIMERSSFEKNPIDFLEAKGYKEVKKDLIIKLPKYSLFELENGRKRMLASAGELQKGNELALPSKYVNFLYLASHYEKLKGSPEDNEQKQLFVEQHKHYLDEIIEQISEFSKRVILADANLDKVLSAYNKHRDKPIREQAENIIHLFTLTNLGAPAAFKYFDTTIDRKRYTSTKEVLDATLIHQSITGLYETRIDLSQLGGDGGGGGGSSGGMNPLQLLQPLPAEIKGTKLLAHWNSGATITCIPESFLEDEQPIKKTLIKTIHGEKQQNVYYVTFKVKGRKVEAEVIASPYEYILLSPTDVPWLTQQPLQLTILVPLQEYQEKILSKTALPEDQKQQLKTLFVKYDNLWQHWENQVGHRKIRPHNIATGDYPPRPQKQYPINPKAKPSIQIVIDDLLKQGVLTPQNSTMNTPVYPVPKPDGRWRMVLDYREVNKTIPLTAAQNQHSAGILATIVRQKYKTTLDLANGFWAHPITPESYWLTAFTWQGKQYCWTRLPQGFLNSPALFNADVVDLLKEIPNVQVYVDDIYLSHDDPKEHVQQLEKVFQILLQAGYVVSLKKSEIGQKTVEFLGFNITKEGRGLTDTFKTKLLNITPPKDLKQLQSILGLLNFARNFIPNFAELVQPLYNLIAPAKGKYIEWSEENTKQLNMVIEALNTASNLEERLPEQRLVIKVNTSPSAGYVRYYNETGKKPIMYLNYVFSKAELKFSMLEKLLTTMHKALIKAMDLAMGQEILVYSPIVSMTKIQKTPLPERKALPIRWITWMTYLEDPRIQFHYDKTLPELKHIPDVYTSSQSPVKHPSQYEGVFYTDGSAIKSPDPTKSNNAGMGIVHATYKPEYQVLNQWSIPLGNHTAQMAEIAAVEFACKKALKIPGPVLVITDSFYVAESANKELPYWKSNGFVNNKKKPLKHISKWKSIAECLSMKPDITIQHEKGISLQIPVFILKGNALADKLATQGSYVVNAGKRTADGSEFEKRTADGSEFESPKKKAKVE

SEQ ID NO: 1344 - protein, 2174 aa, synthetic construct
MPAAKRVKLDGGDKKYSIGLDIGTNSVGWAVITDEYKVPSKKFKVLGNTDRHSIKKNLIGALLFDSGETAEATRLKRTARRRYTRRKNRICYLQEIFSNEMAKVDDSFFHRLEESFLVEEDKKHERHPIFGNIVDEVAYHEKYPTIYHLRKKLVDSTDKADLRLIYLALAHMIKFRGHFLIEGDLNPDNSDVDKLFIQLVQTYNQLFEENPINASGVDAKAILSARLSKSRRLENLIAQLPGEKKNGLFGNLIALSLGLTPNFKSNFDLAEDAKLQLSKDTYDDDLDNLLAQIGDQYADLFLAAKNLSDAILLSDILRVNTEITKAPLSASMIKRYDEHHQDLTLLKALVRQQLPEKYKEIFFDQSKNGYAGYIDGGASQEEFYKFIKPILEKMDGTEELLVKLNREDLLRKQRTFDNGSIPHQIHLGELHAILRRQEDFYPFLKDNREKIEKILTFRIPYYVGPLARGNSRFAWMTRKSEETITPWNFEEVVDKGASAQSFIERMTNFDKNLPNEKVLPKHSLLYEYFTVYNELTKVKYVTEGMRKPAFLSGEQKKAIVDLLFKTNRKVTVKQLKEDYFKKIECFDSVEISGVEDRFNASLGTYHDLLKIIKDKDFLDNEENEDILEDIVLTLTLFEDREMIEERLKTYAHLFDDKVMKQLKRRRYTGWGRLSRKLINGIRDKQSGKTILDFLKSDGFANRNFMQLIHDDSLTFKEDIQKAQVSGQGDSLHEHIANLAGSPAIKKGILQTVKVVDELVKVMGRHKPENIVIEMARENQTTQKGQKNSRERMKRIEEGIKELGSQILKEHPVENTQLQNEKLYLYYLQNGRDMYVDQELDINRLSDYDVDHIVPQSFLKDDSIDNKVLTRSDKARGKSDNVPSEEVVKKMKNYWRQLLNAKLITQRKFDNLTKAERGGLSELDKAGFIKRQLVETRQITKHVAQILDSRMNTKYDENDKLIREVKVITLKSKLVSDFRKDFQFYKVREINNYHHAHDAYLNAVVGTALIKKYPKLESEFVYGDYKVYDVRKMIAKSEQEIGKATAKYFFYSNIMNFFKTEITLANGEIRKRPLIETNGETGEIVWDKGRDFATVRKVLSMPQVNIVKKTEVQTGGFSKESILPKRNSDKLIARKKDWDPKKYGGFDSPTVAYSVLVVAKVEKGKSKKLKSVKELLGITIMERSSFEKNPIDFLEAKGYKEVKKDLIIKLPKYSLFELENGRKRMLASAGELQKGNELALPSKYVNFLYLASHYEKLKGSPEDNEQKQLFVEQHKHYLDEIIEQISEFSKRVILADANLDKVLSAYNKHRDKPIREQAENIIHLFTLTNLGAPAAFKYFDTTIDRKRYTSTKEVLDATLIHQSITGLYETRIDLSQLGGDGGGSSGSSGSSGGMNPLQLLQPLPAEIKGTKLLAHWNSGATITCIPESFLEDEQPIKKTLIKTIHGEKQQNVYYVTFKVKGRKVEAEVIASPYEYILLSPTDVPWLTQQPLQLTILVPLQEYQEKILSKTALPEDQKQQLKTLFVKYDNLWQHWENQVGHRKIRPHNIATGDYPPRPQKQYPINPKAKPSIQIVIDDLLKQGVLTPQNSTMNTPVYPVPKPDGRWRMVLDYREVNKTIPLTAAQNQHSAGILATIVRQKYKTTLDLANGFWAHPITPESYWLTAFTWQGKQYCWTRLPQGFLNSPALFNADVVDLLKEIPNVQVYVDDIYLSHDDPKEHVQQLEKVFQILLQAGYVVSLKKSEIGQKTVEFLGFNITKEGRGLTDTFKTKLLNITPPKDLKQLQSILGLLNFARNFIPNFAELVQPLYNLIAPAKGKYIEWSEENTKQLNMVIEALNTASNLEERLPEQRLVIKVNTSPSAGYVRYYNETGKKPIMYLNYVFSKAELKFSMLEKLLTTMHKALIKAMDLAMGQEILVYSPIVSMTKIQKTPLPERKALPIRWITWMTYLEDPRIQFHYDKTLPELKHIPDVYTSSQSPVKHPSQYEGVFYTDGSAIKSPDPTKSNNAGMGIVHATYKPEYQVLNQWSIPLGNHTAQMAEIAAVEFACKKALKIPGPVLVITDSFYVAESANKELPYWKSNGFVNNKKKPLKHISKWKSIAECLSMKPDITIQHEKGISLQIPVFILKGNALADKLATQGSYVVNAGKRTADGSEFEKRTADGSEFESPKKKAKVE

SEQ ID NO: 1345 - protein, 2171 aa, synthetic construct
MPAAKRVKLDGGDKKYSIGLDIGTNSVGWAVITDEYKVPSKKFKVLGNTDRHSIKKNLIGALLFDSGETAEATRLKRTARRRYTRRKNRICYLQEIFSNEMAKVDDSFFHRLEESFLVEEDKKHERHPIFGNIVDEVAYHEKYPTIYHLRKKLVDSTDKADLRLIYLALAHMIKFRGHFLIEGDLNPDNSDVDKLFIQLVQTYNQLFEENPINASGVDAKAILSARLSKSRRLENLIAQLPGEKKNGLFGNLIALSLGLTPNFKSNFDLAEDAKLQLSKDTYDDDLDNLLAQIGDQYADLFLAAKNLSDAILLSDILRVNTEITKAPLSASMIKRYDEHHQDLTLLKALVRQQLPEKYKEIFFDQSKNGYAGYIDGGASQEEFYKFIKPILEKMDGTEELLVKLNREDLLRKQRTFDNGSIPHQIHLGELHAILRRQEDFYPFLKDNREKIEKILTFRIPYYVGPLARGNSRFAWMTRKSEETITPWNFEEVVDKGASAQSFIERMTNFDKNLPNEKVLPKHSLLYEYFTVYNELTKVKYVTEGMRKPAFLSGEQKKAIVDLLFKTNRKVTVKQLKEDYFKKIECFDSVEISGVEDRFNASLGTYHDLLKIIKDKDFLDNEENEDILEDIVLTLTLFEDREMIEERLKTYAHLFDDKVMKQLKRRRYTGWGRLSRKLINGIRDKQSGKTILDFLKSDGFANRNFMQLIHDDSLTFKEDIQKAQVSGQGDSLHEHIANLAGSPAIKKGILQTVKVVDELVKVMGRHKPENIVIEMARENQTTQKGQKNSRERMKRIEEGIKELGSQILKEHPVENTQLQNEKLYLYYLQNGRDMYVDQELDINRLSDYDVDHIVPQSFLKDDSIDNKVLTRSDKARGKSDNVPSEEVVKKMKNYWRQLLNAKLITQRKFDNLTKAERGGLSELDKAGFIKRQLVETRQITKHVAQILDSRMNTKYDENDKLIREVKVITLKSKLVSDFRKDFQFYKVREINNYHHAHDAYLNAVVGTALIKKYPKLESEFVYGDYKVYDVRKMIAKSEQEIGKATAKYFFYSNIMNFFKTEITLANGEIRKRPLIETNGETGEIVWDKGRDFATVRKVLSMPQVNIVKKTEVQTGGFSKESILPKRNSDKLIARKKDWDPKKYGGFDSPTVAYSVLVVAKVEKGKSKKLKSVKELLGITIMERSSFEKNPIDFLEAKGYKEVKKDLIIKLPKYSLFELENGRKRMLASAGELQKGNELALPSKYVNFLYLASHYEKLKGSPEDNEQKQLFVEQHKHYLDEIIEQISEFSKRVILADANLDKVLSAYNKHRDKPIREQAENIIHLFTLTNLGAPAAFKYFDTTIDRKRYTSTKEVLDATLIHQSITGLYETRIDLSQLGGDGGPAPGGGGGMNPLQLLQPLPAEIKGTKLLAHWNSGATITCIPESFLEDEQPIKKTLIKTIHGEKQQNVYYVTFKVKGRKVEAEVIASPYEYILLSPTDVPWLTQQPLQLTILVPLQEYQEKILSKTALPEDQKQQLKTLFVKYDNLWQHWENQVGHRKIRPHNIATGDYPPRPQKQYPINPKAKPSIQIVIDDLLKQGVLTPQNSTMNTPVYPVPKPDGRWRMVLDYREVNKTIPLTAAQNQHSAGILATIVRQKYKTTLDLANGFWAHPITPESYWLTAFTWQGKQYCWTRLPQGFLNSPALFNADVVDLLKEIPNVQVYVDDIYLSHDDPKEHVQQLEKVFQILLQAGYVVSLKKSEIGQKTVEFLGFNITKEGRGLTDTFKTKLLNITPPKDLKQLQSILGLLNFARNFIPNFAELVQPLYNLIAPAKGKYIEWSEENTKQLNMVIEALNTASNLEERLPEQRLVIKVNTSPSAGYVRYYNETGKKPIMYLNYVFSKAELKFSMLEKLLTTMHKALIKAMDLAMGQEILVYSPIVSMTKIQKTPLPERKALPIRWITWMTYLEDPRIQFHYDKTLPELKHIPDVYTSSQSPVKHPSQYEGVFYTDGSAIKSPDPTKSNNAGMGIVHATYKPEYQVLNQWSIPLGNHTAQMAEIAAVEFACKKALKIPGPVLVITDSFYVAESANKELPYWKSNGFVNNKKKPLKHISKWKSIAECLSMKPDITIQHEKGISLQIPVFILKGNALADKLATQGSYVVNAGKRTADGSEFEKRTADGSEFESPKKKAKVE

SEQ ID NO: 1346 - protein, 2195 aa, synthetic construct
MPAAKRVKLDGGDKKYSIGLDIGTNSVGWAVITDEYKVPSKKFKVLGNTDRHSIKKNLIGALLFDSGETAEATRLKRTARRRYTRRKNRICYLQEIFSNEMAKVDDSFFHRLEESFLVEEDKKHERHPIFGNIVDEVAYHEKYPTIYHLRKKLVDSTDKADLRLIYLALAHMIKFRGHFLIEGDLNPDNSDVDKLFIQLVQTYNQLFEENPINASGVDAKAILSARLSKSRRLENLIAQLPGEKKNGLFGNLIALSLGLTPNFKSNFDLAEDAKLQLSKDTYDDDLDNLLAQIGDQYADLFLAAKNLSDAILLSDILRVNTEITKAPLSASMIKRYDEHHQDLTLLKALVRQQLPEKYKEIFFDQSKNGYAGYIDGGASQEEFYKFIKPILEKMDGTEELLVKLNREDLLRKQRTFDNGSIPHQIHLGELHAILRRQEDFYPFLKDNREKIEKILTFRIPYYVGPLARGNSRFAWMTRKSEETITPWNFEEVVDKGASAQSFIERMTNFDKNLPNEKVLPKHSLLYEYFTVYNELTKVKYVTEGMRKPAFLSGEQKKAIVDLLFKTNRKVTVKQLKEDYFKKIECFDSVEISGVEDRFNASLGTYHDLLKIIKDKDFLDNEENEDILEDIVLTLTLFEDREMIEERLKTYAHLFDDKVMKQLKRRRYTGWGRLSRKLINGIRDKQSGKTILDFLKSDGFANRNFMQLIHDDSLTFKEDIQKAQVSGQGDSLHEHIANLAGSPAIKKGILQTVKVVDELVKVMGRHKPENIVIEMARENQTTQKGQKNSRERMKRIEEGIKELGSQILKEHPVENTQLQNEKLYLYYLQNGRDMYVDQELDINRLSDYDVDHIVPQSFLKDDSIDNKVLTRSDKARGKSDNVPSEEVVKKMKNYWRQLLNAKLITQRKFDNLTKAERGGLSELDKAGFIKRQLVETRQITKHVAQILDSRMNTKYDENDKLIREVKVITLKSKLVSDFRKDFQFYKVREINNYHHAHDAYLNAVVGTALIKKYPKLESEFVYGDYKVYDVRKMIAKSEQEIGKATAKYFFYSNIMNFFKTEITLANGEIRKRPLIETNGETGEIVWDKGRDFATVRKVLSMPQVNIVKKTEVQTGGFSKESILPKRNSDKLIARKKDWDPKKYGGFDSPTVAYSVLVVAKVEKGKSKKLKSVKELLGITIMERSSFEKNPIDFLEAKGYKEVKKDLIIKLPKYSLFELENGRKRMLASAGELQKGNELALPSKYVNFLYLASHYEKLKGSPEDNEQKQLFVEQHKHYLDEIIEQISEFSKRVILADANLDKVLSAYNKHRDKPIREQAENIIHLFTLTNLGAPAAFKYFDTTIDRKRYTSTKEVLDATLIHQSITGLYETRIDLSQLGGDGGEAAAKEAAAKEAAAKEAAAKEAAAKEAAAKGGMNPLQLLQPLPAEIKGTKLLAHWNSGATITCIPESFLEDEQPIKKTLIKTIHGEKQQNVYYVTFKVKGRKVEAEVIASPYEYILLSPTDVPWLTQQPLQLTILVPLQEYQEKILSKTALPEDQKQQLKTLFVKYDNLWQHWENQVGHRKIRPHNIATGDYPPRPQKQYPINPKAKPSIQIVIDDLLKQGVLTPQNSTMNTPVYPVPKPDGRWRMVLDYREVNKTIPLTAAQNQHSAGILATIVRQKYKTTLDLANGFWAHPITPESYWLTAFTWQGKQYCWTRLPQGFLNSPALFNADVVDLLKEIPNVQVYVDDIYLSHDDPKEHVQQLEKVFQILLQAGYVVSLKKSEIGQKTVEFLGFNITKEGRGLTDTFKTKLLNITPPKDLKQLQSILGKLNFARNFIPNFAELVQPLYNLIAPAKGKYIEWSEENTKQLNMVIEALNTASNLEERLPEQRLVIKVNTSPSAGYVRYYNETGKKPIMYLNYVFSKAELKFSMLEKLLTTMHKALIKAMDLAMGQEILVYSPIVSMTKIQKTPLPERKALPIRWITWMTYLEDPRIQFHYDKTLPELKHIPDVYTSSQSPVKHPSQYEGVFYTDGSAIKSPDPTKSNNAGMGIVHATYKPEYQVLNQWSIPLGNHTAQMAEIAAVEFACKKALKIPGPVLVITDSFYVAESANKELPYWKSNGFVNNKKKPLKHISKWKSIAECLSMKPDITIQHEKGISLQIPVFILKGNALADKLATQGSYVVNAGKRTADGSEFEKRTADGSEFESPKKKAKVE

SEQ ID NO: 1347 - protein, 2185 aa, synthetic construct
MPAAKRVKLDGGDKKYSIGLDIGTNSVGWAVITDEYKVPSKKFKVLGNTDRHSIKKNLIGALLFDSGETAEATRLKRTARRRYTRRKNRICYLQEIFSNEMAKVDDSFFHRLEESFLVEEDKKHERHPIFGNIVDEVAYHEKYPTIYHLRKKLVDSTDKADLRLIYLALAHMIKFRGHFLIEGDLNPDNSDVDKLFIQLVQTYNQLFEENPINASGVDAKAILSARLSKSRRLENLIAQLPGEKKNGLFGNLIALSLGLTPNFKSNFDLAEDAKLQLSKDTYDDDLDNLLAQIGDQYADLFLAAKNLSDAILLSDILRVNTEITKAPLSASMIKRYDEHHQDLTLLKALVRQQLPEKYKEIFFDQSKNGYAGYIDGGASQEEFYKFIKPILEKMDGTEELLVKLNREDLLRKQRTFDNGSIPHQIHLGELHAILRRQEDFYPFLKDNREKIEKILTFRIPYYVGPLARGNSRFAWMTRKSEETITPWNFEEVVDKGASAQSFIERMTNFDKNLPNEKVLPKHSLLYEYFTVYNELTKVKYVTEGMRKPAFLSGEQKKAIVDLLFKTNRKVTVKQLKEDYFKKIECFDSVEISGVEDRFNASLGTYHDLLKIIKDKDFLDNEENEDILEDIVLTLTLFEDREMIEERLKTYAHLFDDKVMKQLKRRRYTGWGRLSRKLINGIRDKQSGKTILDFLKSDGFANRNFMQLIHDDSLTFKEDIQKAQVSGQGDSLHEHIANLAGSPAIKKGILQTVKVVDELVKVMGRHKPENIVIEMARENQTTQKGQKNSRERMKRIEEGIKELGSQILKEHPVENTQLQNEKLYLYYLQNGRDMYVDQELDINRLSDYDVDHIVPQSFLKDDSIDNKVLTRSDKARGKSDNVPSEEVVKKMKNYWRQLLNAKLITQRKFDNLTKAERGGLSELDKAGFIKRQLVETRQITKHVAQILDSRMNTKYDENDKLIREVKVITLKSKLVSDFRKDFQFYKVREINNYHHAHDAYLNAVVGTALIKKYPKLESEFVYGDYKVYDVRKMIAKSEQEIGKATAKYFFYSNIMNFFKTEITLANGEIRKRPLIETNGETGEIVWDKGRDFATVRKVLSMPQVNIVKKTEVQTGGFSKESILPKRNSDKLIARKKDWDPKKYGGFDSPTVAYSVLVVAKVEKGKSKKLKSVKELLGITIMERSSFEKNPIDFLEAKGYKEVKKDLIIKLPKYSLFELENGRKRMLASAGELQKGNELALPSKYVNFLYLASHYEKLKGSPEDNEQKQLFVEQHKHYLDEIIEQISEFSKRVILADANLDKVLSAYNKHRDKPIREQAENIIHLFTLTNLGAPAAFKYFDTTIDRKRYTSTKEVLDATLIHQSITGLYETRIDLSQLGGDGGEAAAKEAAAKEAAAKEAAAKGGMNPLQLLQPLPAEIKGTKLLAHWNSGATITCIPESFLEDEQPIKKTLIKTIHGEKQQNVYYVTFKVKGRKVEAEVIASPYEYILLSPTDVPWLTQQPLQLTILVPLQEYQEKILSKTALPEDQKQQLKTLFVKYDNLWQHWENQVGHRKIRPHNIATGDYPPRPQKQYPINPKAKPSIQIVIDDLLKQGVLTPQNSTMNTPVYPVPKPDGRWRMVLDYREVNKTIPLTAAQNQHSAGILATIVRQKYKTTLDLANGFWAHPITPESYWLTAFTWQGKQYCWTRLPQGFLNSPALFNADVVDLLKEIPNVQVYVDDIYLSHDDPKEHVQQLEKVFQILLQAGYVVSLKKSEIGQKTVEFLGFNITKEGRGLTDTFKTKLLNITPPKDLKQLQSILGKLNFARNFIPNFAELVQPLYNLIAPAKGKYIEWSEENTKQLNMVIEALNTASNLEERLPEQRLVIKVNTSPSAGYVRYYNETGKKPIMYLNYVFSKAELKFSMLEKLLTTMHKALIKAMDLAMGQEILVYSPIVSMTKIQKTPLPERKALPIRWITWMTYLEDPRIQFHYDKTLPELKHIPDVYTSSQSPVKHPSQYEGVFYTDGSAIKSPDPTKSNNAGMGIVHATYKPEYQVLNQWSIPLGNHTAQMAEIAAVEFACKKALKIPGPVLVITDSFYVAESANKELPYWKSNGFVNNKKKPLKHISKWKSIAECLSMKPDITIQHEKGISLQIPVFILKGNALADKLATQGSYVVNAGKRTADGSEFEKRTADGSEFESPKKKAKVE

SEQ ID NO: 1348 - protein, 2176 aa, synthetic construct
MPAAKRVKLDGGDKKYSIGLDIGTNSVGWAVITDEYKVPSKKFKVLGNTDRHSIKKNLIGALLFDSGETAEATRLKRTARRRYTRRKNRICYLQEIFSNEMAKVDDSFFHRLEESFLVEEDKKHERHPIFGNIVDEVAYHEKYPTIYHLRKKLVDSTDKADLRLIYLALAHMIKFRGHFLIEGDLNPDNSDVDKLFIQLVQTYNQLFEENPINASGVDAKAILSARLSKSRRLENLIAQLPGEKKNGLFGNLIALSLGLTPNFKSNFDLAEDAKLQLSKDTYDDDLDNLLAQIGDQYADLFLAAKNLSDAILLSDILRVNTEITKAPLSASMIKRYDEHHQDLTLLKALVRQQLPEKYKEIFFDQSKNGYAGYIDGGASQEEFYKFIKPILEKMDGTEELLVKLNREDLLRKQRTFDNGSIPHQIHLGELHAILRRQEDFYPFLKDNREKIEKILTFRIPYYVGPLARGNSRFAWMTRKSEETITPWNFEEVVDKGASAQSFIERMTNFDKNLPNEKVLPKHSLLYEYFTVYNELTKVKYVTEGMRKPAFLSGEQKKAIVDLLFKTNRKVTVKQLKEDYFKKIECFDSVEISGVEDRFNASLGTYHDLLKIIKDKDFLDNEENEDILEDIVLTLTLFEDREMIEERLKTYAHLFDDKVMKQLKRRRYTGWGRLSRKLINGIRDKQSGKTILDFLKSDGFANRNFMQLIHDDSLTFKEDIQKAQVSGQGDSLHEHIANLAGSPAIKKGILQTVKVVDELVKVMGRHKPENIVIEMARENQTTQKGQKNSRERMKRIEEGIKELGSQILKEHPVENTQLQNEKLYLYYLQNGRDMYVDQELDINRLSDYDVDHIVPQSFLKDDSIDNKVLTRSDKARGKSDNVPSEEVVKKMKNYWRQLLNAKLITQRKFDNLTKAERGGLSELDKAGFIKRQLVETRQITKHVAQILDSRMNTKYDENDKLIREVKVITLKSKLVSDFRKDFQFYKVREINNYHHAHDAYLNAVVGTALIKKYPKLESEFVYGDYKVYDVRKMIAKSEQEIGKATAKYFFYSNIMNFFKTEITLANGEIRKRPLIETNGETGEIVWDKGRDFATVRKVLSMPQVNIVKKTEVQTGGFSKESILPKRNSDKLIARKKDWDPKKYGGFDSPTVAYSVLVVAKVEKGKSKKLKSVKELLGITIMERSSFEKNPIDFLEAKGYKEVKKDLIIKLPKYSLFELENGRKRMLASAGELQKGNELALPSKYVNFLYLASHYEKLKGSPEDNEQKQLFVEQHKHYLDEIIEQISEFSKRVILADANLDKVLSAYNKHRDKPIREQAENIIHLFTLTNLGAPAAFKYFDTTIDRKRYTSTKEVLDATLIHQSITGLYETRIDLSQLGGDGGGGSPAPEAAAKGGMNPLQLLQPLPAEIKGTKLLAHWNSGATITCIPESFLEDEQPIKKTLIKTIHGEKQQNVYYVTFKVKGRKVEAEVIASPYEYILLSPTDVPWLTQQPLQLTILVPLQEYQEKILSKTALPEDQKQQLKTLFVKYDNLWQHWENQVGHRKIRPHNIATGDYPPRPQKQYPINPKAKPSIQIVIDDLLKQGVLTPQNSTMNTPVYPVPKPDGRWRMVLDYREVNKTIPLTAAQNQHSAGILATIVRQKYKTTLDLANGFWAHPITPESYWLTAFTWQGKQYCWTRLPQGFLNSPALFNADVVDLLKEIPNVQVYVDDIYLSHDDPKEHVQQLEKVFQILLQAGYVVSLKKSEIGQKTVEFLGFNITKEGRGLTDTFKTKLLNITPPKDLKQLQSILGKLNFARNFIPNFAELVQPLYNLIAPAKGKYIEWSEENTKQLNMVIEALNTASNLEERLPEQRLVIKVNTSPSAGYVRYYNETGKKPIMYLNYVFSKAELKFSMLEKLLTTMHKALIKAMDLAMGQEILVYSPIVSMTKIQKTPLPERKALPIRWITWMTYLEDPRIQFHYDKTLPELKHIPDVYTSSQSPVKHPSQYEGVFYTDGSAIKSPDPTKSNNAGMGIVHATYKPEYQVLNQWSIPLGNHTAQMAEIAAVEFACKKALKIPGPVLVITDSFYVAESANKELPYWKSNGFVNNKKKPLKHISKWKSIAECLSMKPDITIQHEKGISLQIPVFILKGNALADKLATQGSYVVNAGKRTADGSEFEKRTADGSEFESPKKKAKVE

SEQ ID NO: 1349 - protein, 2177 aa, synthetic construct
MPAAKRVKLDGGDKKYSIGLDIGTNSVGWAVITDEYKVPSKKFKVLGNTDRHSIKKNLIGALLFDSGETAEATRLKRTARRRYTRRKNRICYLQEIFSNEMAKVDDSFFHRLEESFLVEEDKKHERHPIFGNIVDEVAYHEKYPTIYHLRKKLVDSTDKADLRLIYLALAHMIKFRGHFLIEGDLNPDNSDVDKLFIQLVQTYNQLFEENPINASGVDAKAILSARLSKSRRLENLIAQLPGEKKNGLFGNLIALSLGLTPNFKSNFDLAEDAKLQLSKDTYDDDLDNLLAQIGDQYADLFLAAKNLSDAILLSDILRVNTEITKAPLSASMIKRYDEHHQDLTLLKALVRQQLPEKYKEIFFDQSKNGYAGYIDGGASQEEFYKFIKPILEKMDGTEELLVKLNREDLLRKQRTFDNGSIPHQIHLGELHAILRRQEDFYPFLKDNREKIEKILTFRIPYYVGPLARGNSRFAWMTRKSEETITPWNFEEVVDKGASAQSFIERMTNFDKNLPNEKVLPKHSLLYEYFTVYNELTKVKYVTEGMRKPAFLSGEQKKAIVDLLFKTNRKVTVKQLKEDYFKKIECFDSVEISGVEDRFNASLGTYHDLLKIIKDKDFLDNEENEDILEDIVLTLTLFEDREMIEERLKTYAHLFDDKVMKQLKRRRYTGWGRLSRKLINGIRDKQSGKTILDFLKSDGFANRNFMQLIHDDSLTFKEDIQKAQVSGQGDSLHEHIANLAGSPAIKKGILQTVKVVDELVKVMGRHKPENIVIEMARENQTTQKGQKNSRERMKRIEEGIKELGSQILKEHPVENTQLQNEKLYLYYLQNGRDMYVDQELDINRLSDYDVDHIVPQSFLKDDSIDNKVLTRSDKARGKSDNVPSEEVVKKMKNYWRQLLNAKLITQRKFDNLTKAERGGLSELDKAGFIKRQLVETRQITKHVAQILDSRMNTKYDENDKLIREVKVITLKSKLVSDFRKDFQFYKVREINNYHHAHDAYLNAVVGTALIKKYPKLESEFVYGDYKVYDVRKMIAKSEQEIGKATAKYFFYSNIMNFFKTEITLANGEIRKRPLIETNGETGEIVWDKGRDFATVRKVLSMPQVNIVKKTEVQTGGFSKESILPKRNSDKLIARKKDWDPKKYGGFDSPTVAYSVLVVAKVEKGKSKKLKSVKELLGITIMERSSFEKNPIDFLEAKGYKEVKKDLIIKLPKYSLFELENGRKRMLASAGELQKGNELALPSKYVNFLYLASHYEKLKGSPEDNEQKQLFVEQHKHYLDEIIEQISEFSKRVILADANLDKVLSAYNKHRDKPIREQAENIIHLFTLTNLGAPAAFKYFDTTIDRKRYTSTKEVLDATLIHQSITGLYETRIDLSQLGGDGGGSAGSAAGSGEFGGMNPLQLLQPLPAEIKGTKLLAHWNSGATITCIPESFLEDEQPIKKTLIKTIHGEKQQNVYYVTFKVKGRKVEAEVIASPYEYILLSPTDVPWLTQQPLQLTILVPLQEYQEKILSKTALPEDQKQQLKTLFVKYDNLWQHWENQVGHRKIRPHNIATGDYPPRPQKQYPINPKAKPSIQIVIDDLLKQGVLTPQNSTMNTPVYPVPKPDGRWRMVLDYREVNKTIPLTAAQNQHSAGILATIVRQKYKTTLDLANGFWAHPITPESYWLTAFTWQGKQYCWTRLPQGFLNSPALFNADVVDLLKEIPNVQVYVDDIYLSHDDPKEHVQQLEKVFQILLQAGYVVSLKKSEIGQKTVEFLGFNITKEGRGLTDTFKTKLLNITPPKDLKQLQSILGKLNFARNFIPNFAELVQPLYNLIAPAKGKYIEWSEENTKQLNMVIEALNTASNLEERLPEQRLVIKVNTSPSAGYVRYYNETGKKPIMYLNYVFSKAELKFSMLEKLLTTMHKALIKAMDLAMGQEILVYSPIVSMTKIQKTPLPERKALPIRWITWMTYLEDPRIQFHYDKTLPELKHIPDVYTSSQSPVKHPSQYEGVFYTDGSAIKSPDPTKSNNAGMGIVHATYKPEYQVLNQWSIPLGNHTAQMAEIAAVEFACKKALKIPGPVLVITDSFYVAESANKELPYWKSNGFVNNKKKPLKHISKWKSIAECLSMKPDITIQHEKGISLQIPVFILKGNALADKLATQGSYVVNAGKRTADGSEFEKRTADGSEFESPKKKAKVE

SEQ ID NO: 1350 - protein, 2173 aa, synthetic construct
MPAAKRVKLDGGDKKYSIGLDIGTNSVGWAVITDEYKVPSKKFKVLGNTDRHSIKKNLIGALLFDSGETAEATRLKRTARRRYTRRKNRICYLQEIFSNEMAKVDDSFFHRLEESFLVEEDKKHERHPIFGNIVDEVAYHEKYPTIYHLRKKLVDSTDKADLRLIYLALAHMIKFRGHFLIEGDLNPDNSDVDKLFIQLVQTYNQLFEENPINASGVDAKAILSARLSKSRRLENLIAQLPGEKKNGLFGNLIALSLGLTPNFKSNFDLAEDAKLQLSKDTYDDDLDNLLAQIGDQYADLFLAAKNLSDAILLSDILRVNTEITKAPLSASMIKRYDEHHQDLTLLKALVRQQLPEKYKEIFFDQSKNGYAGYIDGGASQEEFYKFIKPILEKMDGTEELLVKLNREDLLRKQRTFDNGSIPHQIHLGELHAILRRQEDFYPFLKDNREKIEKILTFRIPYYVGPLARGNSRFAWMTRKSEETITPWNFEEVVDKGASAQSFIERMTNFDKNLPNEKVLPKHSLLYEYFTVYNELTKVKYVTEGMRKPAFLSGEQKKAIVDLLFKTNRKVTVKQLKEDYFKKIECFDSVEISGVEDRFNASLGTYHDLLKIIKDKDFLDNEENEDILEDIVLTLTLFEDREMIEERLKTYAHLFDDKVMKQLKRRRYTGWGRLSRKLINGIRDKQSGKTILDFLKSDGFANRNFMQLIHDDSLTFKEDIQKAQVSGQGDSLHEHIANLAGSPAIKKGILQTVKVVDELVKVMGRHKPENIVIEMARENQTTQKGQKNSRERMKRIEEGIKELGSQILKEHPVENTQLQNEKLYLYYLQNGRDMYVDQELDINRLSDYDVDHIVPQSFLKDDSIDNKVLTRSDKARGKSDNVPSEEVVKKMKNYWRQLLNAKLITQRKFDNLTKAERGGLSELDKAGFIKRQLVETRQITKHVAQILDSRMNTKYDENDKLIREVKVITLKSKLVSDFRKDFQFYKVREINNYHHAHDAYLNAVVGTALIKKYPKLESEFVYGDYKVYDVRKMIAKSEQEIGKATAKYFFYSNIMNFFKTEITLANGEIRKRPLIETNGETGEIVWDKGRDFATVRKVLSMPQVNIVKKTEVQTGGFSKESILPKRNSDKLIARKKDWDPKKYGGFDSPTVAYSVLVVAKVEKGKSKKLKSVKELLGITIMERSSFEKNPIDFLEAKGYKEVKKDLIIKLPKYSLFELENGRKRMLASAGELQKGNELALPSKYVNFLYLASHYEKLKGSPEDNEQKQLFVEQHKHYLDEIIEQISEFSKRVILADANLDKVLSAYNKHRDKPIREQAENIIHLFTLTNLGAPAAFKYFDTTIDRKRYTSTKEVLDATLIHQSITGLYETRIDLSQLGGDGGGGGEAAAKGGMNPLQLLQPLPAEIKGTKLLAHWNSGATITCIPESFLEDEQPIKKTLIKTIHGEKQQNVYYVTFKVKGRKVEAEVIASPYEYILLSPTDVPWLTQQPLQLTILVPLQEYQEKILSKTALPEDQKQQLKTLFVKYDNLWQHWENQVGHRKIRPHNIATGDYPPRPQKQYPINPKAKPSIQIVIDDLLKQGVLTPQNSTMNTPVYPVPKPDGRWRMVLDYREVNKTIPLTAAQNQHSAGILATIVRQKYKTTLDLANGFWAHPITPESYWLTAFTWQGKQYCWTRLPQGFLNSPALFNADVVDLLKEIPNVQVYVDDIYLSHDDPKEHVQQLEKVFQILLQAGYVVSLKKSEIGQKTVEFLGFNITKEGRGLTDTFKTKLLNITPPKDLKQLQSILGKLNFARNFIPNFAELVQPLYNLIAPAKGKYIEWSEENTKQLNMVIEALNTASNLEERLPEQRLVIKVNTSPSAGYVRYYNETGKKPIMYLNYVFSKAELKFSMLEKLLTTMHKALIKAMDLAMGQEILVYSPIVSMTKIQKTPLPERKALPIRWITWMTYLEDPRIQFHYDKTLPELKHIPDVYTSSQSPVKHPSQYEGVFYTDGSAIKSPDPTKSNNAGMGIVHATYKPEYQVLNQWSIPLGNHTAQMAEIAAVEFACKKALKIPGPVLVITDSFYVAESANKELPYWKSNGFVNNKKKPLKHISKWKSIAECLSMKPDITIQHEKGISLQIPVFILKGNALADKLATQGSYVVNAGKRTADGSEFEKRTADGSEFESPKKKAKVE

SEQ ID NO: 1351 - protein, 2176 aa, synthetic construct
MPAAKRVKLDGGDKKYSIGLDIGTNSVGWAVITDEYKVPSKKFKVLGNTDRHSIKKNLIGALLFDSGETAEATRLKRTARRRYTRRKNRICYLQEIFSNEMAKVDDSFFHRLEESFLVEEDKKHERHPIFGNIVDEVAYHEKYPTIYHLRKKLVDSTDKADLRLIYLALAHMIKFRGHFLIEGDLNPDNSDVDKLFIQLVQTYNQLFEENPINASGVDAKAILSARLSKSRRLENLIAQLPGEKKNGLFGNLIALSLGLTPNFKSNFDLAEDAKLQLSKDTYDDDLDNLLAQIGDQYADLFLAAKNLSDAILLSDILRVNTEITKAPLSASMIKRYDEHHQDLTLLKALVRQQLPEKYKEIFFDQSKNGYAGYIDGGASQEEFYKFIKPILEKMDGTEELLVKLNREDLLRKQRTFDNGSIPHQIHLGELHAILRRQEDFYPFLKDNREKIEKILTFRIPYYVGPLARGNSRFAWMTRKSEETITPWNFEEVVDKGASAQSFIERMTNFDKNLPNEKVLPKHSLLYEYFTVYNELTKVKYVTEGMRKPAFLSGEQKKAIVDLLFKTNRKVTVKQLKEDYFKKIECFDSVEISGVEDRFNASLGTYHDLLKIIKDKDFLDNEENEDILEDIVLTLTLFEDREMIEERLKTYAHLFDDKVMKQLKRRRYTGWGRLSRKLINGIRDKQSGKTILDFLKSDGFANRNFMQLIHDDSLTFKEDIQKAQVSGQGDSLHEHIANLAGSPAIKKGILQTVKVVDELVKVMGRHKPENIVIEMARENQTTQKGQKNSRERMKRIEEGIKELGSQILKEHPVENTQLQNEKLYLYYLQNGRDMYVDQELDINRLSDYDVDHIVPQSFLKDDSIDNKVLTRSDKARGKSDNVPSEEVVKKMKNYWRQLLNAKLITQRKFDNLTKAERGGLSELDKAGFIKRQLVETRQITKHVAQILDSRMNTKYDENDKLIREVKVITLKSKLVSDFRKDFQFYKVREINNYHHAHDAYLNAVVGTALIKKYPKLESEFVYGDYKVYDVRKMIAKSEQEIGKATAKYFFYSNIMNFFKTEITLANGEIRKRPLIETNGETGEIVWDKGRDFATVRKVLSMPQVNIVKKTEVQTGGFSKESILPKRNSDKLIARKKDWDPKKYGGFDSPTVAYSVLVVAKVEKGKSKKLKSVKELLGITIMERSSFEKNPIDFLEAKGYKEVKKDLIIKLPKYSLFELENGRKRMLASAGELQKGNELALPSKYVNFLYLASHYEKLKGSPEDNEQKQLFVEQHKHYLDEIIEQISEFSKRVILADANLDKVLSAYNKHRDKPIREQAENIIHLFTLTNLGAPAAFKYFDTTIDRKRYTSTKEVLDATLIHQSITGLYETRIDLSQLGGDGGGSSGGSEAAAKGGMNPLQLLQPLPAEIKGTKLLAHWNSGATITCIPESFLEDEQPIKKTLIKTIHGEKQQNVYYVTFKVKGRKVEAEVIASPYEYILLSPTDVPWLTQQPLQLTILVPLQEYQEKILSKTALPEDQKQQLKTLFVKYDNLWQHWENQVGHRKIRPHNIATGDYPPRPQKQYPINPKAKPSIQIVIDDLLKQGVLTPQNSTMNTPVYPVPKPDGRWRMVLDYREVNKTIPLTAAQNQHSAGILATIVRQKYKTTLDLANGFWAHPITPESYWLTAFTWQGKQYCWTRLPQGFLNSPALFNADVVDLLKEIPNVQVYVDDIYLSHDDPKEHVQQLEKVFQILLQAGYVVSLKKSEIGQKTVEFLGFNITKEGRGLTDTFKTKLLNITPPKDLKQLQSILGKLNFARNFIPNFAELVQPLYNLIAPAKGKYIEWSEENTKQLNMVIEALNTASNLEERLPEQRLVIKVNTSPSAGYVRYYNETGKKPIMYLNYVFSKAELKFSMLEKLLTTMHKALIKAMDLAMGQEILVYSPIVSMTKIQKTPLPERKALPIRWITWMTYLEDPRIQFHYDKTLPELKHIPDVYTSSQSPVKHPSQYEGVFYTDGSAIKSPDPTKSNNAGMGIVHATYKPEYQVLNQWSIPLGNHTAQMAEIAAVEFACKKALKIPGPVLVITDSFYVAESANKELPYWKSNGFVNNKKKPLKHISKWKSIAECLSMKPDITIQHEKGISLQIPVFILKGNALADKLATQGSYVVNAGKRTADGSEFEKRTADGSEFESPKKKAKVE

SEQ ID NO: 1352 - protein, 2174 aa, synthetic construct
MPAAKRVKLDGGDKKYSIGLDIGTNSVGWAVITDEYKVPSKKFKVLGNTDRHSIKKNLIGALLFDSGETAEATRLKRTARRRYTRRKNRICYLQEIFSNEMAKVDDSFFHRLEESFLVEEDKKHERHPIFGNIVDEVAYHEKYPTIYHLRKKLVDSTDKADLRLIYLALAHMIKFRGHFLIEGDLNPDNSDVDKLFIQLVQTYNQLFEENPINASGVDAKAILSARLSKSRRLENLIAQLPGEKKNGLFGNLIALSLGLTPNFKSNFDLAEDAKLQLSKDTYDDDLDNLLAQIGDQYADLFLAAKNLSDAILLSDILRVNTEITKAPLSASMIKRYDEHHQDLTLLKALVRQQLPEKYKEIFFDQSKNGYAGYIDGGASQEEFYKFIKPILEKMDGTEELLVKLNREDLLRKQRTFDNGSIPHQIHLGELHAILRRQEDFYPFLKDNREKIEKILTFRIPYYVGPLARGNSRFAWMTRKSEETITPWNFEEVVDKGASAQSFIERMTNFDKNLPNEKVLPKHSLLYEYFTVYNELTKVKYVTEGMRKPAFLSGEQKKAIVDLLFKTNRKVTVKQLKEDYFKKIECFDSVEISGVEDRFNASLGTYHDLLKIIKDKDFLDNEENEDILEDIVLTLTLFEDREMIEERLKTYAHLFDDKVMKQLKRRRYTGWGRLSRKLINGIRDKQSGKTILDFLKSDGFANRNFMQLIHDDSLTFKEDIQKAQVSGQGDSLHEHIANLAGSPAIKKGILQTVKVVDELVKVMGRHKPENIVIEMARENQTTQKGQKNSRERMKRIEEGIKELGSQILKEHPVENTQLQNEKLYLYYLQNGRDMYVDQELDINRLSDYDVDHIVPQSFLKDDSIDNKVLTRSDKARGKSDNVPSEEVVKKMKNYWRQLLNAKLITQRKFDNLTKAERGGLSELDKAGFIKRQLVETRQITKHVAQILDSRMNTKYDENDKLIREVKVITLKSKLVSDFRKDFQFYKVREINNYHHAHDAYLNAVVGTALIKKYPKLESEFVYGDYKVYDVRKMIAKSEQEIGKATAKYFFYSNIMNFFKTEITLANGEIRKRPLIETNGETGEIVWDKGRDFATVRKVLSMPQVNIVKKTEVQTGGFSKESILPKRNSDKLIARKKDWDPKKYGGFDSPTVAYSVLVVAKVEKGKSKKLKSVKELLGITIMERSSFEKNPIDFLEAKGYKEVKKDLIIKLPKYSLFELENGRKRMLASAGELQKGNELALPSKYVNFLYLASHYEKLKGSPEDNEQKQLFVEQHKHYLDEIIEQISEFSKRVILADANLDKVLSAYNKHRDKPIREQAENIIHLFTLTNLGAPAAFKYFDTTIDRKRYTSTKEVLDATLIHQSITGLYETRIDLSQLGGDGGGSSPAPGGSGGMNPLQLLQPLPAEIKGTKLLAHWNSGATITCIPESFLEDEQPIKKTLIKTIHGEKQQNVYYVTFKVKGRKVEAEVIASPYEYILLSPTDVPWLTQQPLQLTILVPLQEYQEKILSKTALPEDQKQQLKTLFVKYDNLWQHWENQVGHRKIRPHNIATGDYPPRPQKQYPINPKAKPSIQIVIDDLLKQGVLTPQNSTMNTPVYPVPKPDGRWRMVLDYREVNKTIPLTAAQNQHSAGILATIVRQKYKTTLDLANGFWAHPITPESYWLTAFTWQGKQYCWTRLPQGFLNSPALFNADVVDLLKEIPNVQVYVDDIYLSHDDPKEHVQQLEKVFQILLQAGYVVSLKKSEIGQKTVEFLGFNITKEGRGLTDTFKTKLLNITPPKDLKQLQSILGKLNFARNFIPNFAELVQPLYNLIAPAKGKYIEWSEENTKQLNMVIEALNTASNLEERLPEQRLVIKVNTSPSAGYVRYYNETGKKPIMYLNYVFSKAELKFSMLEKLLTTMHKALIKAMDLAMGQEILVYSPIVSMTKIQKTPLPERKALPIRWITWMTYLEDPRIQFHYDKTLPELKHIPDVYTSSQSPVKHPSQYEGVFYTDGSAIKSPDPTKSNNAGMGIVHATYKPEYQVLNQWSIPLGNHTAQMAEIAAVEFACKKALKIPGPVLVITDSFYVAESANKELPYWKSNGFVNNKKKPLKHISKWKSIAECLSMKPDITIQHEKGISLQIPVFILKGNALADKLATQGSYVVNAGKRTADGSEFEKRTADGSEFESPKKKAKVE

SEQ ID NO: 1353 - protein, 2176 aa, synthetic construct
MPAAKRVKLDGGDKKYSIGLDIGTNSVGWAVITDEYKVPSKKFKVLGNTDRHSIKKNLIGALLFDSGETAEATRLKRTARRRYTRRKNRICYLQEIFSNEMAKVDDSFFHRLEESFLVEEDKKHERHPIFGNIVDEVAYHEKYPTIYHLRKKLVDSTDKADLRLIYLALAHMIKFRGHFLIEGDLNPDNSDVDKLFIQLVQTYNQLFEENPINASGVDAKAILSARLSKSRRLENLIAQLPGEKKNGLFGNLIALSLGLTPNFKSNFDLAEDAKLQLSKDTYDDDLDNLLAQIGDQYADLFLAAKNLSDAILLSDILRVNTEITKAPLSASMIKRYDEHHQDLTLLKALVRQQLPEKYKEIFFDQSKNGYAGYIDGGASQEEFYKFIKPILEKMDGTEELLVKLNREDLLRKQRTFDNGSIPHQIHLGELHAILRRQEDFYPFLKDNREKIEKILTFRIPYYVGPLARGNSRFAWMTRKSEETITPWNFEEVVDKGASAQSFIERMTNFDKNLPNEKVLPKHSLLYEYFTVYNELTKVKYVTEGMRKPAFLSGEQKKAIVDLLFKTNRKVTVKQLKEDYFKKIECFDSVEISGVEDRFNASLGTYHDLLKIIKDKDFLDNEENEDILEDIVLTLTLFEDREMIEERLKTYAHLFDDKVMKQLKRRRYTGWGRLSRKLINGIRDKQSGKTILDFLKSDGFANRNFMQLIHDDSLTFKEDIQKAQVSGQGDSLHEHIANLAGSPAIKKGILQTVKVVDELVKVMGRHKPENIVIEMARENQTTQKGQKNSRERMKRIEEGIKELGSQILKEHPVENTQLQNEKLYLYYLQNGRDMYVDQELDINRLSDYDVDHIVPQSFLKDDSIDNKVLTRSDKARGKSDNVPSEEVVKKMKNYWRQLLNAKLITQRKFDNLTKAERGGLSELDKAGFIKRQLVETRQITKHVAQILDSRMNTKYDENDKLIREVKVITLKSKLVSDFRKDFQFYKVREINNYHHAHDAYLNAVVGTALIKKYPKLESEFVYGDYKVYDVRKMIAKSEQEIGKATAKYFFYSNIMNFFKTEITLANGEIRKRPLIETNGETGEIVWDKGRDFATVRKVLSMPQVNIVKKTEVQTGGFSKESILPKRNSDKLIARKKDWDPKKYGGFDSPTVAYSVLVVAKVEKGKSKKLKSVKELLGITIMERSSFEKNPIDFLEAKGYKEVKKDLIIKLPKYSLFELENGRKRMLASAGELQKGNELALPSKYVNFLYLASHYEKLKGSPEDNEQKQLFVEQHKHYLDEIIEQISEFSKRVILADANLDKVLSAYNKHRDKPIREQAENIIHLFTLTNLGAPAAFKYFDTTIDRKRYTSTKEVLDATLIHQSITGLYETRIDLSQLGGDGGGSSPAPEAAAKGGMNPLQLLQPLPAEIKGTKLLAHWNSGATITCIPESFLEDEQPIKKTLIKTIHGEKQQNVYYVTFKVKGRKVEAEVIASPYEYILLSPTDVPWLTQQPLQLTILVPLQEYQEKILSKTALPEDQKQQLKTLFVKYDNLWQHWENQVGHRKIRPHNIATGDYPPRPQKQYPINPKAKPSIQIVIDDLLKQGVLTPQNSTMNTPVYPVPKPDGRWRMVLDYREVNKTIPLTAAQNQHSAGILATIVRQKYKTTLDLANGFWAHPITPESYWLTAFTWQGKQYCWTRLPQGFLNSPALFNADVVDLLKEIPNVQVYVDDIYLSHDDPKEHVQQLEKVFQILLQAGYVVSLKKSEIGQKTVEFLGFNITKEGRGLTDTFKTKLLNITPPKDLKQLQSILGKLNFARNFIPNFAELVQPLYNLIAPAKGKYIEWSEENTKQLNMVIEALNTASNLEERLPEQRLVIKVNTSPSAGYVRYYNETGKKPIMYLNYVFSKAELKFSMLEKLLTTMHKALIKAMDLAMGQEILVYSPIVSMTKIQKTPLPERKALPIRWITWMTYLEDPRIQFHYDKTLPELKHIPDVYTSSQSPVKHPSQYEGVFYTDGSAIKSPDPTKSNNAGMGIVHATYKPEYQVLNQWSIPLGNHTAQMAEIAAVEFACKKALKIPGPVLVITDSFYVAESANKELPYWKSNGFVNNKKKPLKHISKWKSIAECLSMKPDITIQHEKGISLQIPVFILKGNALADKLATQGSYVVNAGKRTADGSEFEKRTADGSEFESPKKKAKVE

SEQ ID NO: 1354 - protein, 2174 aa, synthetic construct
MPAAKRVKLDGGDKKYSIGLDIGTNSVGWAVITDEYKVPSKKFKVLGNTDRHSIKKNLIGALLFDSGETAEATRLKRTARRRYTRRKNRICYLQEIFSNEMAKVDDSFFHRLEESFLVEEDKKHERHPIFGNIVDEVAYHEKYPTIYHLRKKLVDSTDKADLRLIYLALAHMIKFRGHFLIEGDLNPDNSDVDKLFIQLVQTYNQLFEENPINASGVDAKAILSARLSKSRRLENLIAQLPGEKKNGLFGNLIALSLGLTPNFKSNFDLAEDAKLQLSKDTYDDDLDNLLAQIGDQYADLFLAAKNLSDAILLSDILRVNTEITKAPLSASMIKRYDEHHQDLTLLKALVRQQLPEKYKEIFFDQSKNGYAGYIDGGASQEEFYKFIKPILEKMDGTEELLVKLNREDLLRKQRTFDNGSIPHQIHLGELHAILRRQEDFYPFLKDNREKIEKILTFRIPYYVGPLARGNSRFAWMTRKSEETITPWNFEEVVDKGASAQSFIERMTNFDKNLPNEKVLPKHSLLYEYFTVYNELTKVKYVTEGMRKPAFLSGEQKKAIVDLLFKTNRKVTVKQLKEDYFKKIECFDSVEISGVEDRFNASLGTYHDLLKIIKDKDFLDNEENEDILEDIVLTLTLFEDREMIEERLKTYAHLFDDKVMKQLKRRRYTGWGRLSRKLINGIRDKQSGKTILDFLKSDGFANRNFMQLIHDDSLTFKEDIQKAQVSGQGDSLHEHIANLAGSPAIKKGILQTVKVVDELVKVMGRHKPENIVIEMARENQTTQKGQKNSRERMKRIEEGIKELGSQILKEHPVENTQLQNEKLYLYYLQNGRDMYVDQELDINRLSDYDVDHIVPQSFLKDDSIDNKVLTRSDKARGKSDNVPSEEVVKKMKNYWRQLLNAKLITQRKFDNLTKAERGGLSELDKAGFIKRQLVETRQITKHVAQILDSRMNTKYDENDKLIREVKVITLKSKLVSDFRKDFQFYKVREINNYHHAHDAYLNAVVGTALIKKYPKLESEFVYGDYKVYDVRKMIAKSEQEIGKATAKYFFYSNIMNFFKTEITLANGEIRKRPLIETNGETGEIVWDKGRDFATVRKVLSMPQVNIVKKTEVQTGGFSKESILPKRNSDKLIARKKDWDPKKYGGFDSPTVAYSVLVVAKVEKGKSKKLKSVKELLGITIMERSSFEKNPIDFLEAKGYKEVKKDLIIKLPKYSLFELENGRKRMLASAGELQKGNELALPSKYVNFLYLASHYEKLKGSPEDNEQKQLFVEQHKHYLDEIIEQISEFSKRVILADANLDKVLSAYNKHRDKPIREQAENIIHLFTLTNLGAPAAFKYFDTTIDRKRYTSTKEVLDATLIHQSITGLYETRIDLSQLGGDGGGGSGGGPAPGGMNPLQLLQPLPAEIKGTKLLAHWNSGATITCIPESFLEDEQPIKKTLIKTIHGEKQQNVYYVTFKVKGRKVEAEVIASPYEYILLSPTDVPWLTQQPLQLTILVPLQEYQEKILSKTALPEDQKQQLKTLFVKYDNLWQHWENQVGHRKIRPHNIATGDYPPRPQKQYPINPKAKPSIQIVIDDLLKQGVLTPQNSTMNTPVYPVPKPDGRWRMVLDYREVNKTIPLTAAQNQHSAGILATIVRQKYKTTLDLANGFWAHPITPESYWLTAFTWQGKQYCWTRLPQGFLNSPALFNADVVDLLKEIPNVQVYVDDIYLSHDDPKEHVQQLEKVFQILLQAGYVVSLKKSEIGQKTVEFLGFNITKEGRGLTDTFKTKLLNITPPKDLKQLQSILGKLNFARNFIPNFAELVQPLYNLIAPAKGKYIEWSEENTKQLNMVIEALNTASNLEERLPEQRLVIKVNTSPSAGYVRYYNETGKKPIMYLNYVFSKAELKFSMLEKLLTTMHKALIKAMDLAMGQEILVYSPIVSMTKIQKTPLPERKALPIRWITWMTYLEDPRIQFHYDKTLPELKHIPDVYTSSQSPVKHPSQYEGVFYTDGSAIKSPDPTKSNNAGMGIVHATYKPEYQVLNQWSIPLGNHTAQMAEIAAVEFACKKALKIPGPVLVITDSFYVAESANKELPYWKSNGFVNNKKKPLKHISKWKSIAECLSMKPDITIQHEKGISLQIPVFILKGNALADKLATQGSYVVNAGKRTADGSEFEKRTADGSEFESPKKKAKVE

SEQ ID NO: 1355 - protein, 2176 aa, synthetic construct
MPAAKRVKLDGGDKKYSIGLDIGTNSVGWAVITDEYKVPSKKFKVLGNTDRHSIKKNLIGALLFDSGETAEATRLKRTARRRYTRRKNRICYLQEIFSNEMAKVDDSFFHRLEESFLVEEDKKHERHPIFGNIVDEVAYHEKYPTIYHLRKKLVDSTDKADLRLIYLALAHMIKFRGHFLIEGDLNPDNSDVDKLFIQLVQTYNQLFEENPINASGVDAKAILSARLSKSRRLENLIAQLPGEKKNGLFGNLIALSLGLTPNFKSNFDLAEDAKLQLSKDTYDDDLDNLLAQIGDQYADLFLAAKNLSDAILLSDILRVNTEITKAPLSASMIKRYDEHHQDLTLLKALVRQQLPEKYKEIFFDQSKNGYAGYIDGGASQEEFYKFIKPILEKMDGTEELLVKLNREDLLRKQRTFDNGSIPHQIHLGELHAILRRQEDFYPFLKDNREKIEKILTFRIPYYVGPLARGNSRFAWMTRKSEETITPWNFEEVVDKGASAQSFIERMTNFDKNLPNEKVLPKHSLLYEYFTVYNELTKVKYVTEGMRKPAFLSGEQKKAIVDLLFKTNRKVTVKQLKEDYFKKIECFDSVEISGVEDRFNASLGTYHDLLKIIKDKDFLDNEENEDILEDIVLTLTLFEDREMIEERLKTYAHLFDDKVMKQLKRRRYTGWGRLSRKLINGIRDKQSGKTILDFLKSDGFANRNFMQLIHDDSLTFKEDIQKAQVSGQGDSLHEHIANLAGSPAIKKGILQTVKVVDELVKVMGRHKPENIVIEMARENQTTQKGQKNSRERMKRIEEGIKELGSQILKEHPVENTQLQNEKLYLYYLQNGRDMYVDQELDINRLSDYDVDHIVPQSFLKDDSIDNKVLTRSDKARGKSDNVPSEEVVKKMKNYWRQLLNAKLITQRKFDNLTKAERGGLSELDKAGFIKRQLVETRQITKHVAQILDSRMNTKYDENDKLIREVKVITLKSKLVSDFRKDFQFYKVREINNYHHAHDAYLNAVVGTALIKKYPKLESEFVYGDYKVYDVRKMIAKSEQEIGKATAKYFFYSNIMNFFKTEITLANGEIRKRPLIETNGETGEIVWDKGRDFATVRKVLSMPQVNIVKKTEVQTGGFSKESILPKRNSDKLIARKKDWDPKKYGGFDSPTVAYSVLVVAKVEKGKSKKLKSVKELLGITIMERSSFEKNPIDFLEAKGYKEVKKDLIIKLPKYSLFELENGRKRMLASAGELQKGNELALPSKYVNFLYLASHYEKLKGSPEDNEQKQLFVEQHKHYLDEIIEQISEFSKRVILADANLDKVLSAYNKHRDKPIREQAENIIHLFTLTNLGAPAAFKYFDTTIDRKRYTSTKEVLDATLIHQSITGLYETRIDLSQLGGDGGEAAAKGSSGGSGGMNPLQLLQPLPAEIKGTKLLAHWNSGATITCIPESFLEDEQPIKKTLIKTIHGEKQQNVYYVTFKVKGRKVEAEVIASPYEYILLSPTDVPWLTQQPLQLTILVPLQEYQEKILSKTALPEDQKQQLKTLFVKYDNLWQHWENQVGHRKIRPHNIATGDYPPRPQKQYPINPKAKPSIQIVIDDLLKQGVLTPQNSTMNTPVYPVPKPDGRWRMVLDYREVNKTIPLTAAQNQHSAGILATIVRQKYKTTLDLANGFWAHPITPESYWLTAFTWQGKQYCWTRLPQGFLNSPALFNADVVDLLKEIPNVQVYVDDIYLSHDDPKEHVQQLEKVFQILLQAGYVVSLKKSEIGQKTVEFLGFNITKEGRGLTDTFKTKLLNITPPKDLKQLQSILGKLNFARNFIPNFAELVQPLYNLIAPAKGKYIEWSEENTKQLNMVIEALNTASNLEERLPEQRLVIKVNTSPSAGYVRYYNETGKKPIMYLNYVFSKAELKFSMLEKLLTTMHKALIKAMDLAMGQEILVYSPIVSMTKIQKTPLPERKALPIRWITWMTYLEDPRIQFHYDKTLPELKHIPDVYTSSQSPVKHPSQYEGVFYTDGSAIKSPDPTKSNNAGMGIVHATYKPEYQVLNQWSIPLGNHTAQMAEIAAVEFACKKALKIPGPVLVITDSFYVAESANKELPYWKSNGFVNNKKKPLKHISKWKSIAECLSMKPDITIQHEKGISLQIPVFILKGNALADKLATQGSYVVNAGKRTADGSEFEKRTADGSEFESPKKKAKVE

SEQ ID NO: 1356 - protein, 2172 aa, synthetic construct
MPAAKRVKLDGGDKKYSIGLDIGTNSVGWAVITDEYKVPSKKFKVLGNTDRHSIKKNLIGALLFDSGETAEATRLKRTARRRYTRRKNRICYLQEIFSNEMAKVDDSFFHRLEESFLVEEDKKHERHPIFGNIVDEVAYHEKYPTIYHLRKKLVDSTDKADLRLIYLALAHMIKFRGHFLIEGDLNPDNSDVDKLFIQLVQTYNQLFEENPINASGVDAKAILSARLSKSRRLENLIAQLPGEKKNGLFGNLIALSLGLTPNFKSNFDLAEDAKLQLSKDTYDDDLDNLLAQIGDQYADLFLAAKNLSDAILLSDILRVNTEITKAPLSASMIKRYDEHHQDLTLLKALVRQQLPEKYKEIFFDQSKNGYAGYIDGGASQEEFYKFIKPILEKMDGTEELLVKLNREDLLRKQRTFDNGSIPHQIHLGELHAILRRQEDFYPFLKDNREKIEKILTFRIPYYVGPLARGNSRFAWMTRKSEETITPWNFEEVVDKGASAQSFIERMTNFDKNLPNEKVLPKHSLLYEYFTVYNELTKVKYVTEGMRKPAFLSGEQKKAIVDLLFKTNRKVTVKQLKEDYFKKIECFDSVEISGVEDRFNASLGTYHDLLKIIKDKDFLDNEENEDILEDIVLTLTLFEDREMIEERLKTYAHLFDDKVMKQLKRRRYTGWGRLSRKLINGIRDKQSGKTILDFLKSDGFANRNFMQLIHDDSLTFKEDIQKAQVSGQGDSLHEHIANLAGSPAIKKGILQTVKVVDELVKVMGRHKPENIVIEMARENQTTQKGQKNSRERMKRIEEGIKELGSQILKEHPVENTQLQNEKLYLYYLQNGRDMYVDQELDINRLSDYDVDHIVPQSFLKDDSIDNKVLTRSDKARGKSDNVPSEEVVKKMKNYWRQLLNAKLITQRKFDNLTKAERGGLSELDKAGFIKRQLVETRQITKHVAQILDSRMNTKYDENDKLIREVKVITLKSKLVSDFRKDFQFYKVREINNYHHAHDAYLNAVVGTALIKKYPKLESEFVYGDYKVYDVRKMIAKSEQEIGKATAKYFFYSNIMNFFKTEITLANGEIRKRPLIETNGETGEIVWDKGRDFATVRKVLSMPQVNIVKKTEVQTGGFSKESILPKRNSDKLIARKKDWDPKKYGGFDSPTVAYSVLVVAKVEKGKSKKLKSVKELLGITIMERSSFEKNPIDFLEAKGYKEVKKDLIIKLPKYSLFELENGRKRMLASAGELQKGNELALPSKYVNFLYLASHYEKLKGSPEDNEQKQLFVEQHKHYLDEIIEQISEFSKRVILADANLDKVLSAYNKHRDKPIREQAENIIHLFTLTNLGAPAAFKYFDTTIDRKRYTSTKEVLDATLIHQSITGLYETRIDLSQLGGDGGGGGGGGGGGMNPLQLLQPLPAEIKGTKLLAHWNSGATITCIPESFLEDEQPIKKTLIKTIHGEKQQNVYYVTFKVKGRKVEAEVIASPYEYILLSPTDVPWLTQQPLQLTILVPLQEYQEKILSKTALPEDQKQQLKTLFVKYDNLWQHWENQVGHRKIRPHNIATGDYPPRPQKQYPINPKAKPSIQIVIDDLLKQGVLTPQNSTMNTPVYPVPKPDGRWRMVLDYREVNKTIPLTAAQNQHSAGILATIVRQKYKTTLDLANGFWAHPITPESYWLTAFTWQGKQYCWTRLPQGFLNSPALFNADVVDLLKEIPNVQVYVDDIYLSHDDPKEHVQQLEKVFQILLQAGYVVSLKKSEIGQKTVEFLGFNITKEGRGLTDTFKTKLLNITPPKDLKQLQSILGKLNFARNFIPNFAELVQPLYNLIAPAKGKYIEWSEENTKQLNMVIEALNTASNLEERLPEQRLVIKVNTSPSAGYVRYYNETGKKPIMYLNYVFSKAELKFSMLEKLLTTMHKALIKAMDLAMGQEILVYSPIVSMTKIQKTPLPERKALPIRWITWMTYLEDPRIQFHYDKTLPELKHIPDVYTSSQSPVKHPSQYEGVFYTDGSAIKSPDPTKSNNAGMGIVHATYKPEYQVLNQWSIPLGNHTAQMAEIAAVEFACKKALKIPGPVLVITDSFYVAESANKELPYWKSNGFVNNKKKPLKHISKWKSIAECLSMKPDITIQHEKGISLQIPVFILKGNALADKLATQGSYVVNAGKRTADGSEFEKRTADGSEFESPKKKAKVE

SEQ ID NO: 1357 - protein, 2176 aa, synthetic construct
MPAAKRVKLDGGDKKYSIGLDIGTNSVGWAVITDEYKVPSKKFKVLGNTDRHSIKKNLIGALLFDSGETAEATRLKRTARRRYTRRKNRICYLQEIFSNEMAKVDDSFFHRLEESFLVEEDKKHERHPIFGNIVDEVAYHEKYPTIYHLRKKLVDSTDKADLRLIYLALAHMIKFRGHFLIEGDLNPDNSDVDKLFIQLVQTYNQLFEENPINASGVDAKAILSARLSKSRRLENLIAQLPGEKKNGLFGNLIALSLGLTPNFKSNFDLAEDAKLQLSKDTYDDDLDNLLAQIGDQYADLFLAAKNLSDAILLSDILRVNTEITKAPLSASMIKRYDEHHQDLTLLKALVRQQLPEKYKEIFFDQSKNGYAGYIDGGASQEEFYKFIKPILEKMDGTEELLVKLNREDLLRKQRTFDNGSIPHQIHLGELHAILRRQEDFYPFLKDNREKIEKILTFRIPYYVGPLARGNSRFAWMTRKSEETITPWNFEEVVDKGASAQSFIERMTNFDKNLPNEKVLPKHSLLYEYFTVYNELTKVKYVTEGMRKPAFLSGEQKKAIVDLLFKTNRKVTVKQLKEDYFKKIECFDSVEISGVEDRFNASLGTYHDLLKIIKDKDFLDNEENEDILEDIVLTLTLFEDREMIEERLKTYAHLFDDKVMKQLKRRRYTGWGRLSRKLINGIRDKQSGKTILDFLKSDGFANRNFMQLIHDDSLTFKEDIQKAQVSGQGDSLHEHIANLAGSPAIKKGILQTVKVVDELVKVMGRHKPENIVIEMARENQTTQKGQKNSRERMKRIEEGIKELGSQILKEHPVENTQLQNEKLYLYYLQNGRDMYVDQELDINRLSDYDVDHIVPQSFLKDDSIDNKVLTRSDKARGKSDNVPSEEVVKKMKNYWRQLLNAKLITQRKFDNLTKAERGGLSELDKAGFIKRQLVETRQITKHVAQILDSRMNTKYDENDKLIREVKVITLKSKLVSDFRKDFQFYKVREINNYHHAHDAYLNAVVGTALIKKYPKLESEFVYGDYKVYDVRKMIAKSEQEIGKATAKYFFYSNIMNFFKTEITLANGEIRKRPLIETNGETGEIVWDKGRDFATVRKVLSMPQVNIVKKTEVQTGGFSKESILPKRNSDKLIARKKDWDPKKYGGFDSPTVAYSVLVVAKVEKGKSKKLKSVKELLGITIMERSSFEKNPIDFLEAKGYKEVKKDLIIKLPKYSLFELENGRKRMLASAGELQKGNELALPSKYVNFLYLASHYEKLKGSPEDNEQKQLFVEQHKHYLDEIIEQISEFSKRVILADANLDKVLSAYNKHRDKPIREQAENIIHLFTLTNLGAPAAFKYFDTTIDRKRYTSTKEVLDATLIHQSITGLYETRIDLSQLGGDGGGSSEAAAKGGSGGMNPLQLLQPLPAEIKGTKLLAHWNSGATITCIPESFLEDEQPIKKTLIKTIHGEKQQNVYYVTFKVKGRKVEAEVIASPYEYILLSPTDVPWLTQQPLQLTILVPLQEYQEKILSKTALPEDQKQQLKTLFVKYDNLWQHWENQVGHRKIRPHNIATGDYPPRPQKQYPINPKAKPSIQIVIDDLLKQGVLTPQNSTMNTPVYPVPKPDGRWRMVLDYREVNKTIPLTAAQNQHSAGILATIVRQKYKTTLDLANGFWAHPITPESYWLTAFTWQGKQYCWTRLPQGFLNSPALFNADVVDLLKEIPNVQVYVDDIYLSHDDPKEHVQQLEKVFQILLQAGYVVSLKKSEIGQKTVEFLGFNITKEGRGLTDTFKTKLLNITPPKDLKQLQSILGKLNFARNFIPNFAELVQPLYNLIAPAKGKYIEWSEENTKQLNMVIEALNTASNLEERLPEQRLVIKVNTSPSAGYVRYYNETGKKPIMYLNYVFSKAELKFSMLEKLLTTMHKALIKAMDLAMGQEILVYSPIVSMTKIQKTPLPERKALPIRWITWMTYLEDPRIQFHYDKTLPELKHIPDVYTSSQSPVKHPSQYEGVFYTDGSAIKSPDPTKSNNAGMGIVHATYKPEYQVLNQWSIPLGNHTAQMAEIAAVEFACKKALKIPGPVLVITDSFYVAESANKELPYWKSNGFVNNKKKPLKHISKWKSIAECLSMKPDITIQHEKGISLQIPVFILKGNALADKLATQGSYVVNAGKRTADGSEFEKRTADGSEFESPKKKAKVE

SEQ ID NO: 1358 - protein, 2171 aa, synthetic construct
MPAAKRVKLDGGDKKYSIGLDIGTNSVGWAVITDEYKVPSKKFKVLGNTDRHSIKKNLIGALLFDSGETAEATRLKRTARRRYTRRKNRICYLQEIFSNEMAKVDDSFFHRLEESFLVEEDKKHERHPIFGNIVDEVAYHEKYPTIYHLRKKLVDSTDKADLRLIYLALAHMIKFRGHFLIEGDLNPDNSDVDKLFIQLVQTYNQLFEENPINASGVDAKAILSARLSKSRRLENLIAQLPGEKKNGLFGNLIALSLGLTPNFKSNFDLAEDAKLQLSKDTYDDDLDNLLAQIGDQYADLFLAAKNLSDAILLSDILRVNTEITKAPLSASMIKRYDEHHQDLTLLKALVRQQLPEKYKEIFFDQSKNGYAGYIDGGASQEEFYKFIKPILEKMDGTEELLVKLNREDLLRKQRTFDNGSIPHQIHLGELHAILRRQEDFYPFLKDNREKIEKILTFRIPYYVGPLARGNSRFAWMTRKSEETITPWNFEEVVDKGASAQSFIERMTNFDKNLPNEKVLPKHSLLYEYFTVYNELTKVKYVTEGMRKPAFLSGEQKKAIVDLLFKTNRKVTVKQLKEDYFKKIECFDSVEISGVEDRFNASLGTYHDLLKIIKDKDFLDNEENEDILEDIVLTLTLFEDREMIEERLKTYAHLFDDKVMKQLKRRRYTGWGRLSRKLINGIRDKQSGKTILDFLKSDGFANRNFMQLIHDDSLTFKEDIQKAQVSGQGDSLHEHIANLAGSPAIKKGILQTVKVVDELVKVMGRHKPENIVIEMARENQTTQKGQKNSRERMKRIEEGIKELGSQILKEHPVENTQLQNEKLYLYYLQNGRDMYVDQELDINRLSDYDVDHIVPQSFLKDDSIDNKVLTRSDKARGKSDNVPSEEVVKKMKNYWRQLLNAKLITQRKFDNLTKAERGGLSELDKAGFIKRQLVETRQITKHVAQILDSRMNTKYDENDKLIREVKVITLKSKLVSDFRKDFQFYKVREINNYHHAHDAYLNAVVGTALIKKYPKLESEFVYGDYKVYDVRKMIAKSEQEIGKATAKYFFYSNIMNFFKTEITLANGEIRKRPLIETNGETGEIVWDKGRDFATVRKVLSMPQVNIVKKTEVQTGGFSKESILPKRNSDKLIARKKDWDPKKYGGFDSPTVAYSVLVVAKVEKGKSKKLKSVKELLGITIMERSSFEKNPIDFLEAKGYKEVKKDLIIKLPKYSLFELENGRKRMLASAGELQKGNELALPSKYVNFLYLASHYEKLKGSPEDNEQKQLFVEQHKHYLDEIIEQISEFSKRVILADANLDKVLSAYNKHRDKPIREQAENIIHLFTLTNLGAPAAFKYFDTTIDRKRYTSTKEVLDATLIHQSITGLYETRIDLSQLGGDGGPAPGSSGGMNPLQLLQPLPAEIKGTKLLAHWNSGATITCIPESFLEDEQPIKKTLIKTIHGEKQQNVYYVTFKVKGRKVEAEVIASPYEYILLSPTDVPWLTQQPLQLTILVPLQEYQEKILSKTALPEDQKQQLKTLFVKYDNLWQHWENQVGHRKIRPHNIATGDYPPRPQKQYPINPKAKPSIQIVIDDLLKQGVLTPQNSTMNTPVYPVPKPDGRWRMVLDYREVNKTIPLTAAQNQHSAGILATIVRQKYKTTLDLANGFWAHPITPESYWLTAFTWQGKQYCWTRLPQGFLNSPALFNADVVDLLKEIPNVQVYVDDIYLSHDDPKEHVQQLEKVFQILLQAGYVVSLKKSEIGQKTVEFLGFNITKEGRGLTDTFKTKLLNITPPKDLKQLQSILGKLNFARNFIPNFAELVQPLYNLIAPAKGKYIEWSEENTKQLNMVIEALNTASNLEERLPEQRLVIKVNTSPSAGYVRYYNETGKKPIMYLNYVFSKAELKFSMLEKLLTTMHKALIKAMDLAMGQEILVYSPIVSMTKIQKTPLPERKALPIRWITWMTYLEDPRIQFHYDKTLPELKHIPDVYTSSQSPVKHPSQYEGVFYTDGSAIKSPDPTKSNNAGMGIVHATYKPEYQVLNQWSIPLGNHTAQMAEIAAVEFACKKALKIPGPVLVITDSFYVAESANKELPYWKSNGFVNNKKKPLKHISKWKSIAECLSMKPDITIQHEKGISLQIPVFILKGNALADKLATQGSYVVNAGKRTADGSEFEKRTADGSEFESPKKKAKVE

SEQ ID NO: 1359 - protein, 2176 aa, synthetic construct
MPAAKRVKLDGGDKKYSIGLDIGTNSVGWAVITDEYKVPSKKFKVLGNTDRHSIKKNLIGALLFDSGETAEATRLKRTARRRYTRRKNRICYLQEIFSNEMAKVDDSFFHRLEESFLVEEDKKHERHPIFGNIVDEVAYHEKYPTIYHLRKKLVDSTDKADLRLIYLALAHMIKFRGHFLIEGDLNPDNSDVDKLFIQLVQTYNQLFEENPINASGVDAKAILSARLSKSRRLENLIAQLPGEKKNGLFGNLIALSLGLTPNFKSNFDLAEDAKLQLSKDTYDDDLDNLLAQIGDQYADLFLAAKNLSDAILLSDILRVNTEITKAPLSASMIKRYDEHHQDLTLLKALVRQQLPEKYKEIFFDQSKNGYAGYIDGGASQEEFYKFIKPILEKMDGTEELLVKLNREDLLRKQRTFDNGSIPHQIHLGELHAILRRQEDFYPFLKDNREKIEKILTFRIPYYVGPLARGNSRFAWMTRKSEETITPWNFEEVVDKGASAQSFIERMTNFDKNLPNEKVLPKHSLLYEYFTVYNELTKVKYVTEGMRKPAFLSGEQKKAIVDLLFKTNRKVTVKQLKEDYFKKIECFDSVEISGVEDRFNASLGTYHDLLKIIKDKDFLDNEENEDILEDIVLTLTLFEDREMIEERLKTYAHLFDDKVMKQLKRRRYTGWGRLSRKLINGIRDKQSGKTILDFLKSDGFANRNFMQLIHDDSLTFKEDIQKAQVSGQGDSLHEHIANLAGSPAIKKGILQTVKVVDELVKVMGRHKPENIVIEMARENQTTQKGQKNSRERMKRIEEGIKELGSQILKEHPVENTQLQNEKLYLYYLQNGRDMYVDQELDINRLSDYDVDHIVPQSFLKDDSIDNKVLTRSDKARGKSDNVPSEEVVKKMKNYWRQLLNAKLITQRKFDNLTKAERGGLSELDKAGFIKRQLVETRQITKHVAQILDSRMNTKYDENDKLIREVKVITLKSKLVSDFRKDFQFYKVREINNYHHAHDAYLNAVVGTALIKKYPKLESEFVYGDYKVYDVRKMIAKSEQEIGKATAKYFFYSNIMNFFKTEITLANGEIRKRPLIETNGETGEIVWDKGRDFATVRKVLSMPQVNIVKKTEVQTGGFSKESILPKRNSDKLIARKKDWDPKKYGGFDSPTVAYSVLVVAKVEKGKSKKLKSVKELLGITIMERSSFEKNPIDFLEAKGYKEVKKDLIIKLPKYSLFELENGRKRMLASAGELQKGNELALPSKYVNFLYLASHYEKLKGSPEDNEQKQLFVEQHKHYLDEIIEQISEFSKRVILADANLDKVLSAYNKHRDKPIREQAENIIHLFTLTNLGAPAAFKYFDTTIDRKRYTSTKEVLDATLIHQSITGLYETRIDLSQLGGDGGPAPEAAAKGGSGGMNPLQLLQPLPAEIKGTKLLAHWNSGATITCIPESFLEDEQPIKKTLIKTIHGEKQQNVYYVTFKVKGRKVEAEVIASPYEYILLSPTDVPWLTQQPLQLTILVPLQEYQEKILSKTALPEDQKQQLKTLFVKYDNLWQHWENQVGHRKIRPHNIATGDYPPRPQKQYPINPKAKPSIQIVIDDLLKQGVLTPQNSTMNTPVYPVPKPDGRWRMVLDYREVNKTIPLTAAQNQHSAGILATIVRQKYKTTLDLANGFWAHPITPESYWLTAFTWQGKQYCWTRLPQGFLNSPALFNADVVDLLKEIPNVQVYVDDIYLSHDDPKEHVQQLEKVFQILLQAGYVVSLKKSEIGQKTVEFLGFNITKEGRGLTDTFKTKLLNITPPKDLKQLQSILGKLNFARNFIPNFAELVQPLYNLIAPAKGKYIEWSEENTKQLNMVIEALNTASNLEERLPEQRLVIKVNTSPSAGYVRYYNETGKKPIMYLNYVFSKAELKFSMLEKLLTTMHKALIKAMDLAMGQEILVYSPIVSMTKIQKTPLPERKALPIRWITWMTYLEDPRIQFHYDKTLPELKHIPDVYTSSQSPVKHPSQYEGVFYTDGSAIKSPDPTKSNNAGMGIVHATYKPEYQVLNQWSIPLGNHTAQMAEIAAVEFACKKALKIPGPVLVITDSFYVAESANKELPYWKSNGFVNNKKKPLKHISKWKSIAECLSMKPDITIQHEKGISLQIPVFILKGNALADKLATQGSYVVNAGKRTADGSEFEKRTADGSEFESPKKKAKVE

SEQ ID NO: 1360 - protein, 2176 aa, synthetic construct
MPAAKRVKLDGGDKKYSIGLDIGTNSVGWAVITDEYKVPSKKFKVLGNTDRHSIKKNLIGALLFDSGETAEATRLKRTARRRYTRRKNRICYLQEIFSNEMAKVDDSFFHRLEESFLVEEDKKHERHPIFGNIVDEVAYHEKYPTIYHLRKKLVDSTDKADLRLIYLALAHMIKFRGHFLIEGDLNPDNSDVDKLFIQLVQTYNQLFEENPINASGVDAKAILSARLSKSRRLENLIAQLPGEKKNGLFGNLIALSLGLTPNFKSNFDLAEDAKLQLSKDTYDDDLDNLLAQIGDQYADLFLAAKNLSDAILLSDILRVNTEITKAPLSASMIKRYDEHHQDLTLLKALVRQQLPEKYKEIFFDQSKNGYAGYIDGGASQEEFYKFIKPILEKMDGTEELLVKLNREDLLRKQRTFDNGSIPHQIHLGELHAILRRQEDFYPFLKDNREKIEKILTFRIPYYVGPLARGNSRFAWMTRKSEETITPWNFEEVVDKGASAQSFIERMTNFDKNLPNEKVLPKHSLLYEYFTVYNELTKVKYVTEGMRKPAFLSGEQKKAIVDLLFKTNRKVTVKQLKEDYFKKIECFDSVEISGVEDRFNASLGTYHDLLKIIKDKDFLDNEENEDILEDIVLTLTLFEDREMIEERLKTYAHLFDDKVMKQLKRRRYTGWGRLSRKLINGIRDKQSGKTILDFLKSDGFANRNFMQLIHDDSLTFKEDIQKAQVSGQGDSLHEHIANLAGSPAIKKGILQTVKVVDELVKVMGRHKPENIVIEMARENQTTQKGQKNSRERMKRIEEGIKELGSQILKEHPVENTQLQNEKLYLYYLQNGRDMYVDQELDINRLSDYDVDHIVPQSFLKDDSIDNKVLTRSDKARGKSDNVPSEEVVKKMKNYWRQLLNAKLITQRKFDNLTKAERGGLSELDKAGFIKRQLVETRQITKHVAQILDSRMNTKYDENDKLIREVKVITLKSKLVSDFRKDFQFYKVREINNYHHAHDAYLNAVVGTALIKKYPKLESEFVYGDYKVYDVRKMIAKSEQEIGKATAKYFFYSNIMNFFKTEITLANGEIRKRPLIETNGETGEIVWDKGRDFATVRKVLSMPQVNIVKKTEVQTGGFSKESILPKRNSDKLIARKKDWDPKKYGGFDSPTVAYSVLVVAKVEKGKSKKLKSVKELLGITIMERSSFEKNPIDFLEAKGYKEVKKDLIIKLPKYSLFELENGRKRMLASAGELQKGNELALPSKYVNFLYLASHYEKLKGSPEDNEQKQLFVEQHKHYLDEIIEQISEFSKRVILADANLDKVLSAYNKHRDKPIREQAENIIHLFTLTNLGAPAAFKYFDTTIDRKRYTSTKEVLDATLIHQSITGLYETRIDLSQLGGDGGEAAAKGGGPAPGGMNPLQLLQPLPAEIKGTKLLAHWNSGATITCIPESFLEDEQPIKKTLIKTIHGEKQQNVYYVTFKVKGRKVEAEVIASPYEYILLSPTDVPWLTQQPLQLTILVPLQEYQEKILSKTALPEDQKQQLKTLFVKYDNLWQHWENQVGHRKIRPHNIATGDYPPRPQKQYPINPKAKPSIQIVIDDLLKQGVLTPQNSTMNTPVYPVPKPDGRWRMVLDYREVNKTIPLTAAQNQHSAGILATIVRQKYKTTLDLANGFWAHPITPESYWLTAFTWQGKQYCWTRLPQGFLNSPALFNADVVDLLKEIPNVQVYVDDIYLSHDDPKEHVQQLEKVFQILLQAGYVVSLKKSEIGQKTVEFLGFNITKEGRGLTDTFKTKLLNITPPKDLKQLQSILGKLNFARNFIPNFAELVQPLYNLIAPAKGKYIEWSEENTKQLNMVIEALNTASNLEERLPEQRLVIKVNTSPSAGYVRYYNETGKKPIMYLNYVFSKAELKFSMLEKLLTTMHKALIKAMDLAMGQEILVYSPIVSMTKIQKTPLPERKALPIRWITWMTYLEDPRIQFHYDKTLPELKHIPDVYTSSQSPVKHPSQYEGVFYTDGSAIKSPDPTKSNNAGMGIVHATYKPEYQVLNQWSIPLGNHTAQMAEIAAVEFACKKALKIPGPVLVITDSFYVAESANKELPYWKSNGFVNNKKKPLKHISKWKSIAECLSMKPDITIQHEKGISLQIPVFILKGNALADKLATQGSYVVNAGKRTADGSEFEKRTADGSEFESPKKKAKVE

SEQ ID NO: 1361 - protein, 2176 aa, synthetic construct
MPAAKRVKLDGGDKKYSIGLDIGTNSVGWAVITDEYKVPSKKFKVLGNTDRHSIKKNLIGALLFDSGETAEATRLKRTARRRYTRRKNRICYLQEIFSNEMAKVDDSFFHRLEESFLVEEDKKHERHPIFGNIVDEVAYHEKYPTIYHLRKKLVDSTDKADLRLIYLALAHMIKFRGHFLIEGDLNPDNSDVDKLFIQLVQTYNQLFEENPINASGVDAKAILSARLSKSRRLENLIAQLPGEKKNGLFGNLIALSLGLTPNFKSNFDLAEDAKLQLSKDTYDDDLDNLLAQIGDQYADLFLAAKNLSDAILLSDILRVNTEITKAPLSASMIKRYDEHHQDLTLLKALVRQQLPEKYKEIFFDQSKNGYAGYIDGGASQEEFYKFIKPILEKMDGTEELLVKLNREDLLRKQRTFDNGSIPHQIHLGELHAILRRQEDFYPFLKDNREKIEKILTFRIPYYVGPLARGNSRFAWMTRKSEETITPWNFEEVVDKGASAQSFIERMTNFDKNLPNEKVLPKHSLLYEYFTVYNELTKVKYVTEGMRKPAFLSGEQKKAIVDLLFKTNRKVTVKQLKEDYFKKIECFDSVEISGVEDRFNASLGTYHDLLKIIKDKDFLDNEENEDILEDIVLTLTLFEDREMIEERLKTYAHLFDDKVMKQLKRRRYTGWGRLSRKLINGIRDKQSGKTILDFLKSDGFANRNFMQLIHDDSLTFKEDIQKAQVSGQGDSLHEHIANLAGSPAIKKGILQTVKVVDELVKVMGRHKPENIVIEMARENQTTQKGQKNSRERMKRIEEGIKELGSQILKEHPVENTQLQNEKLYLYYLQNGRDMYVDQELDINRLSDYDVDHIVPQSFLKDDSIDNKVLTRSDKARGKSDNVPSEEVVKKMKNYWRQLLNAKLITQRKFDNLTKAERGGLSELDKAGFIKRQLVETRQITKHVAQILDSRMNTKYDENDKLIREVKVITLKSKLVSDFRKDFQFYKVREINNYHHAHDAYLNAVVGTALIKKYPKLESEFVYGDYKVYDVRKMIAKSEQEIGKATAKYFFYSNIMNFFKTEITLANGEIRKRPLIETNGETGEIVWDKGRDFATVRKVLSMPQVNIVKKTEVQTGGFSKESILPKRNSDKLIARKKDWDPKKYGGFDSPTVAYSVLVVAKVEKGKSKKLKSVKELLGITIMERSSFEKNPIDFLEAKGYKEVKKDLIIKLPKYSLFELENGRKRMLASAGELQKGNELALPSKYVNFLYLASHYEKLKGSPEDNEQKQLFVEQHKHYLDEIIEQISEFSKRVILADANLDKVLSAYNKHRDKPIREQAENIIHLFTLTNLGAPAAFKYFDTTIDRKRYTSTKEVLDATLIHQSITGLYETRIDLSQLGGDGGGSSEAAAKGGGGGMNPLQLLQPLPAEIKGTKLLAHWNSGATITCIPESFLEDEQPIKKTLIKTIHGEKQQNVYYVTFKVKGRKVEAEVIASPYEYILLSPTDVPWLTQQPLQLTILVPLQEYQEKILSKTALPEDQKQQLKTLFVKYDNLWQHWENQVGHRKIRPHNIATGDYPPRPQKQYPINPKAKPSIQIVIDDLLKQGVLTPQNSTMNTPVYPVPKPDGRWRMVLDYREVNKTIPLTAAQNQHSAGILATIVRQKYKTTLDLANGFWAHPITPESYWLTAFTWQGKQYCWTRLPQGFLNSPALFNADVVDLLKEIPNVQVYVDDIYLSHDDPKEHVQQLEKVFQILLQAGYVVSLKKSEIGQKTVEFLGFNITKEGRGLTDTFKTKLLNITPPKDLKQLQSILGKLNFARNFIPNFAELVQPLYNLIAPAKGKYIEWSEENTKQLNMVIEALNTASNLEERLPEQRLVIKVNTSPSAGYVRYYNETGKKPIMYLNYVFSKAELKFSMLEKLLTTMHKALIKAMDLAMGQEILVYSPIVSMTKIQKTPLPERKALPIRWITWMTYLEDPRIQFHYDKTLPELKHIPDVYTSSQSPVKHPSQYEGVFYTDGSAIKSPDPTKSNNAGMGIVHATYKPEYQVLNQWSIPLGNHTAQMAEIAAVEFACKKALKIPGPVLVITDSFYVAESANKELPYWKSNGFVNNKKKPLKHISKWKSIAECLSMKPDITIQHEKGISLQIPVFILKGNALADKLATQGSYVVNAGKRTADGSEFEKRTADGSEFESPKKKAKVE

SEQ ID NO: 1362 - protein, 2176 aa, synthetic construct
MPAAKRVKLDGGDKKYSIGLDIGTNSVGWAVITDEYKVPSKKFKVLGNTDRHSIKKNLIGALLFDSGETAEATRLKRTARRRYTRRKNRICYLQEIFSNEMAKVDDSFFHRLEESFLVEEDKKHERHPIFGNIVDEVAYHEKYPTIYHLRKKLVDSTDKADLRLIYLALAHMIKFRGHFLIEGDLNPDNSDVDKLFIQLVQTYNQLFEENPINASGVDAKAILSARLSKSRRLENLIAQLPGEKKNGLFGNLIALSLGLTPNFKSNFDLAEDAKLQLSKDTYDDDLDNLLAQIGDQYADLFLAAKNLSDAILLSDILRVNTEITKAPLSASMIKRYDEHHQDLTLLKALVRQQLPEKYKEIFFDQSKNGYAGYIDGGASQEEFYKFIKPILEKMDGTEELLVKLNREDLLRKQRTFDNGSIPHQIHLGELHAILRRQEDFYPFLKDNREKIEKILTFRIPYYVGPLARGNSRFAWMTRKSEETITPWNFEEVVDKGASAQSFIERMTNFDKNLPNEKVLPKHSLLYEYFTVYNELTKVKYVTEGMRKPAFLSGEQKKAIVDLLFKTNRKVTVKQLKEDYFKKIECFDSVEISGVEDRFNASLGTYHDLLKIIKDKDFLDNEENEDILEDIVLTLTLFEDREMIEERLKTYAHLFDDKVMKQLKRRRYTGWGRLSRKLINGIRDKQSGKTILDFLKSDGFANRNFMQLIHDDSLTFKEDIQKAQVSGQGDSLHEHIANLAGSPAIKKGILQTVKVVDELVKVMGRHKPENIVIEMARENQTTQKGQKNSRERMKRIEEGIKELGSQILKEHPVENTQLQNEKLYLYYLQNGRDMYVDQELDINRLSDYDVDHIVPQSFLKDDSIDNKVLTRSDKARGKSDNVPSEEVVKKMKNYWRQLLNAKLITQRKFDNLTKAERGGLSELDKAGFIKRQLVETRQITKHVAQILDSRMNTKYDENDKLIREVKVITLKSKLVSDFRKDFQFYKVREINNYHHAHDAYLNAVVGTALIKKYPKLESEFVYGDYKVYDVRKMIAKSEQEIGKATAKYFFYSNIMNFFKTEITLANGEIRKRPLIETNGETGEIVWDKGRDFATVRKVLSMPQVNIVKKTEVQTGGFSKESILPKRNSDKLIARKKDWDPKKYGGFDSPTVAYSVLVVAKVEKGKSKKLKSVKELLGITIMERSSFEKNPIDFLEAKGYKEVKKDLIIKLPKYSLFELENGRKRMLASAGELQKGNELALPSKYVNFLYLASHYEKLKGSPEDNEQKQLFVEQHKHYLDEIIEQISEFSKRVILADANLDKVLSAYNKHRDKPIREQAENIIHLFTLTNLGAPAAFKYFDTTIDRKRYTSTKEVLDATLIHQSITGLYETRIDLSQLGGDGGEAAAKGGGGSSGGMNPLQLLQPLPAEIKGTKLLAHWNSGATITCIPESFLEDEQPIKKTLIKTIHGEKQQNVYYVTFKVKGRKVEAEVIASPYEYILLSPTDVPWLTQQPLQLTILVPLQEYQEKILSKTALPEDQKQQLKTLFVKYDNLWQHWENQVGHRKIRPHNIATGDYPPRPQKQYPINPKAKPSIQIVIDDLLKQGVLTPQNSTMNTPVYPVPKPDGRWRMVLDYREVNKTIPLTAAQNQHSAGILATIVRQKYKTTLDLANGFWAHPITPESYWLTAFTWQGKQYCWTRLPQGFLNSPALFNADVVDLLKEIPNVQVYVDDIYLSHDDPKEHVQQLEKVFQILLQAGYVVSLKKSEIGQKTVEFLGFNITKEGRGLTDTFKTKLLNITPPKDLKQLQSILGKLNFARNFIPNFAELVQPLYNLIAPAKGKYIEWSEENTKQLNMVIEALNTASNLEERLPEQRLVIKVNTSPSAGYVRYYNETGKKPIMYLNYVFSKAELKFSMLEKLLTTMHKALIKAMDLAMGQEILVYSPIVSMTKIQKTPLPERKALPIRWITWMTYLEDPRIQFHYDKTLPELKHIPDVYTSSQSPVKHPSQYEGVFYTDGSAIKSPDPTKSNNAGMGIVHATYKPEYQVLNQWSIPLGNHTAQMAEIAAVEFACKKALKIPGPVLVITDSFYVAESANKELPYWKSNGFVNNKKKPLKHISKWKSIAECLSMKPDITIQHEKGISLQIPVFILKGNALADKLATQGSYVVNAGKRTADGSEFEKRTADGSEFESPKKKAKVE

SEQ ID NO: 1363 - protein, 2172 aa, synthetic construct
MPAAKRVKLDGGDKKYSIGLDIGTNSVGWAVITDEYKVPSKKFKVLGNTDRHSIKKNLIGALLFDSGETAEATRLKRTARRRYTRRKNRICYLQEIFSNEMAKVDDSFFHRLEESFLVEEDKKHERHPIFGNIVDEVAYHEKYPTIYHLRKKLVDSTDKADLRLIYLALAHMIKFRGHFLIEGDLNPDNSDVDKLFIQLVQTYNQLFEENPINASGVDAKAILSARLSKSRRLENLIAQLPGEKKNGLFGNLIALSLGLTPNFKSNFDLAEDAKLQLSKDTYDDDLDNLLAQIGDQYADLFLAAKNLSDAILLSDILRVNTEITKAPLSASMIKRYDEHHQDLTLLKALVRQQLPEKYKEIFFDQSKNGYAGYIDGGASQEEFYKFIKPILEKMDGTEELLVKLNREDLLRKQRTFDNGSIPHQIHLGELHAILRRQEDFYPFLKDNREKIEKILTFRIPYYVGPLARGNSRFAWMTRKSEETITPWNFEEVVDKGASAQSFIERMTNFDKNLPNEKVLPKHSLLYEYFTVYNELTKVKYVTEGMRKPAFLSGEQKKAIVDLLFKTNRKVTVKQLKEDYFKKIECFDSVEISGVEDRFNASLGTYHDLLKIIKDKDFLDNEENEDILEDIVLTLTLFEDREMIEERLKTYAHLFDDKVMKQLKRRRYTGWGRLSRKLINGIRDKQSGKTILDFLKSDGFANRNFMQLIHDDSLTFKEDIQKAQVSGQGDSLHEHIANLAGSPAIKKGILQTVKVVDELVKVMGRHKPENIVIEMARENQTTQKGQKNSRERMKRIEEGIKELGSQILKEHPVENTQLQNEKLYLYYLQNGRDMYVDQELDINRLSDYDVDHIVPQSFLKDDSIDNKVLTRSDKARGKSDNVPSEEVVKKMKNYWRQLLNAKLITQRKFDNLTKAERGGLSELDKAGFIKRQLVETRQITKHVAQILDSRMNTKYDENDKLIREVKVITLKSKLVSDFRKDFQFYKVREINNYHHAHDAYLNAVVGTALIKKYPKLESEFVYGDYKVYDVRKMIAKSEQEIGKATAKYFFYSNIMNFFKTEITLANGEIRKRPLIETNGETGEIVWDKGRDFATVRKVLSMPQVNIVKKTEVQTGGFSKESILPKRNSDKLIARKKDWDPKKYGGFDSPTVAYSVLVVAKVEKGKSKKLKSVKELLGITIMERSSFEKNPIDFLEAKGYKEVKKDLIIKLPKYSLFELENGRKRMLASAGELQKGNELALPSKYVNFLYLASHYEKLKGSPEDNEQKQLFVEQHKHYLDEIIEQISEFSKRVILADANLDKVLSAYNKHRDKPIREQAENIIHLFTLTNLGAPAAFKYFDTTIDRKRYTSTKEVLDATLIHQSITGLYETRIDLSQLGGDGGPAPAPAPGGMNPLQLLQPLPAEIKGTKLLAHWNSGATITCIPESFLEDEQPIKKTLIKTIHGEKQQNVYYVTFKVKGRKVEAEVIASPYEYILLSPTDVPWLTQQPLQLTILVPLQEYQEKILSKTALPEDQKQQLKTLFVKYDNLWQHWENQVGHRKIRPHNIATGDYPPRPQKQYPINPKAKPSIQIVIDDLLKQGVLTPQNSTMNTPVYPVPKPDGRWRMVLDYREVNKTIPLTAAQNQHSAGILATIVRQKYKTTLDLANGFWAHPITPESYWLTAFTWQGKQYCWTRLPQGFLNSPALFNADVVDLLKEIPNVQVYVDDIYLSHDDPKEHVQQLEKVFQILLQAGYVVSLKKSEIGQKTVEFLGFNITKEGRGLTDTFKTKLLNITPPKDLKQLQSILGKLNFARNFIPNFAELVQPLYNLIAPAKGKYIEWSEENTKQLNMVIEALNTASNLEERLPEQRLVIKVNTSPSAGYVRYYNETGKKPIMYLNYVFSKAELKFSMLEKLLTTMHKALIKAMDLAMGQEILVYSPIVSMTKIQKTPLPERKALPIRWITWMTYLEDPRIQFHYDKTLPELKHIPDVYTSSQSPVKHPSQYEGVFYTDGSAIKSPDPTKSNNAGMGIVHATYKPEYQVLNQWSIPLGNHTAQMAEIAAVEFACKKALKIPGPVLVITDSFYVAESANKELPYWKSNGFVNNKKKPLKHISKWKSIAECLSMKPDITIQHEKGISLQIPVFILKGNALADKLATQGSYVVNAGKRTADGSEFEKRTADGSEFESPKKKAKVE

SEQ ID NO: 1364 - protein, 2174 aa, synthetic construct
MPAAKRVKLDGGDKKYSIGLDIGTNSVGWAVITDEYKVPSKKFKVLGNTDRHSIKKNLIGALLFDSGETAEATRLKRTARRRYTRRKNRICYLQEIFSNEMAKVDDSFFHRLEESFLVEEDKKHERHPIFGNIVDEVAYHEKYPTIYHLRKKLVDSTDKADLRLIYLALAHMIKFRGHFLIEGDLNPDNSDVDKLFIQLVQTYNQLFEENPINASGVDAKAILSARLSKSRRLENLIAQLPGEKKNGLFGNLIALSLGLTPNFKSNFDLAEDAKLQLSKDTYDDDLDNLLAQIGDQYADLFLAAKNLSDAILLSDILRVNTEITKAPLSASMIKRYDEHHQDLTLLKALVRQQLPEKYKEIFFDQSKNGYAGYIDGGASQEEFYKFIKPILEKMDGTEELLVKLNREDLLRKQRTFDNGSIPHQIHLGELHAILRRQEDFYPFLKDNREKIEKILTFRIPYYVGPLARGNSRFAWMTRKSEETITPWNFEEVVDKGASAQSFIERMTNFDKNLPNEKVLPKHSLLYEYFTVYNELTKVKYVTEGMRKPAFLSGEQKKAIVDLLFKTNRKVTVKQLKEDYFKKIECFDSVEISGVEDRFNASLGTYHDLLKIIKDKDFLDNEENEDILEDIVLTLTLFEDREMIEERLKTYAHLFDDKVMKQLKRRRYTGWGRLSRKLINGIRDKQSGKTILDFLKSDGFANRNFMQLIHDDSLTFKEDIQKAQVSGQGDSLHEHIANLAGSPAIKKGILQTVKVVDELVKVMGRHKPENIVIEMARENQTTQKGQKNSRERMKRIEEGIKELGSQILKEHPVENTQLQNEKLYLYYLQNGRDMYVDQELDINRLSDYDVDHIVPQSFLKDDSIDNKVLTRSDKARGKSDNVPSEEVVKKMKNYWRQLLNAKLITQRKFDNLTKAERGGLSELDKAGFIKRQLVETRQITKHVAQILDSRMNTKYDENDKLIREVKVITLKSKLVSDFRKDFQFYKVREINNYHHAHDAYLNAVVGTALIKKYPKLESEFVYGDYKVYDVRKMIAKSEQEIGKATAKYFFYSNIMNFFKTEITLANGEIRKRPLIETNGETGEIVWDKGRDFATVRKVLSMPQVNIVKKTEVQTGGFSKESILPKRNSDKLIARKKDWDPKKYGGFDSPTVAYSVLVVAKVEKGKSKKLKSVKELLGITIMERSSFEKNPIDFLEAKGYKEVKKDLIIKLPKYSLFELENGRKRMLASAGELQKGNELALPSKYVNFLYLASHYEKLKGSPEDNEQKQLFVEQHKHYLDEIIEQISEFSKRVILADANLDKVLSAYNKHRDKPIREQAENIIHLFTLTNLGAPAAFKYFDTTIDRKRYTSTKEVLDATLIHQSITGLYETRIDLSQLGGDGGPAPAPAPAPGGMNPLQLLQPLPAEIKGTKLLAHWNSGATITCIPESFLEDEQPIKKTLIKTIHGEKQQNVYYVTFKVKGRKVEAEVIASPYEYILLSPTDVPWLTQQPLQLTILVPLQEYQEKILSKTALPEDQKQQLKTLFVKYDNLWQHWENQVGHRKIRPHNIATGDYPPRPQKQYPINPKAKPSIQIVIDDLLKQGVLTPQNSTMNTPVYPVPKPDGRWRMVLDYREVNKTIPLTAAQNQHSAGILATIVRQKYKTTLDLANGFWAHPITPESYWLTAFTWQGKQYCWTRLPQGFLNSPALFNADVVDLLKEIPNVQVYVDDIYLSHDDPKEHVQQLEKVFQILLQAGYVVSLKKSEIGQKTVEFLGFNITKEGRGLTDTFKTKLLNITPPKDLKQLQSILGKLNFARNFIPNFAELVQPLYNLIAPAKGKYIEWSEENTKQLNMVIEALNTASNLEERLPEQRLVIKVNTSPSAGYVRYYNETGKKPIMYLNYVFSKAELKFSMLEKLLTTMHKALIKAMDLAMGQEILVYSPIVSMTKIQKTPLPERKALPIRWITWMTYLEDPRIQFHYDKTLPELKHIPDVYTSSQSPVKHPSQYEGVFYTDGSAIKSPDPTKSNNAGMGIVHATYKPEYQVLNQWSIPLGNHTAQMAEIAAVEFACKKALKIPGPVLVITDSFYVAESANKELPYWKSNGFVNNKKKPLKHISKWKSIAECLSMKPDITIQHEKGISLQIPVFILKGNALADKLATQGSYVVNAGKRTADGSEFEKRTADGSEFESPKKKAKVE

SEQ ID NO: 1365 - protein, 2094 aa, synthetic construct
MPAAKRVKLDGGDKKYSIGLDIGTNSVGWAVITDEYKVPSKKFKVLGNTDRHSIKKNLIGALLFDSGETAEATRLKRTARRRYTRRKNRICYLQEIFSNEMAKVDDSFFHRLEESFLVEEDKKHERHPIFGNIVDEVAYHEKYPTIYHLRKKLVDSTDKADLRLIYLALAHMIKFRGHFLIEGDLNPDNSDVDKLFIQLVQTYNQLFEENPINASGVDAKAILSARLSKSRRLENLIAQLPGEKKNGLFGNLIALSLGLTPNFKSNFDLAEDAKLQLSKDTYDDDLDNLLAQIGDQYADLFLAAKNLSDAILLSDILRVNTEITKAPLSASMIKRYDEHHQDLTLLKALVRQQLPEKYKEIFFDQSKNGYAGYIDGGASQEEFYKFIKPILEKMDGTEELLVKLNREDLLRKQRTFDNGSIPHQIHLGELHAILRRQEDFYPFLKDNREKIEKILTFRIPYYVGPLARGNSRFAWMTRKSEETITPWNFEEVVDKGASAQSFIERMTNFDKNLPNEKVLPKHSLLYEYFTVYNELTKVKYVTEGMRKPAFLSGEQKKAIVDLLFKTNRKVTVKQLKEDYFKKIECFDSVEISGVEDRFNASLGTYHDLLKIIKDKDFLDNEENEDILEDIVLTLTLFEDREMIEERLKTYAHLFDDKVMKQLKRRRYTGWGRLSRKLINGIRDKQSGKTILDFLKSDGFANRNFMQLIHDDSLTFKEDIQKAQVSGQGDSLHEHIANLAGSPAIKKGILQTVKVVDELVKVMGRHKPENIVIEMARENQTTQKGQKNSRERMKRIEEGIKELGSQILKEHPVENTQLQNEKLYLYYLQNGRDMYVDQELDINRLSDYDVDHIVPQSFLKDDSIDNKVLTRSDKARGKSDNVPSEEVVKKMKNYWRQLLNAKLITQRKFDNLTKAERGGLSELDKAGFIKRQLVETRQITKHVAQILDSRMNTKYDENDKLIREVKVITLKSKLVSDFRKDFQFYKVREINNYHHAHDAYLNAVVGTALIKKYPKLESEFVYGDYKVYDVRKMIAKSEQEIGKATAKYFFYSNIMNFFKTEITLANGEIRKRPLIETNGETGEIVWDKGRDFATVRKVLSMPQVNIVKKTEVQTGGFSKESILPKRNSDKLIARKKDWDPKKYGGFDSPTVAYSVLVVAKVEKGKSKKLKSVKELLGITIMERSSFEKNPIDFLEAKGYKEVKKDLIIKLPKYSLFELENGRKRMLASAGELQKGNELALPSKYVNFLYLASHYEKLKGSPEDNEQKQLFVEQHKHYLDEIIEQISEFSKRVILADANLDKVLSAYNKHRDKPIREQAENIIHLFTLTNLGAPAAFKYFDTTIDRKRYTSTKEVLDATLIHQSITGLYETRIDLSQLGGDGGEAAAKGGSPAPGGVLNLEEEYRLHEKPVPSSIDPSWLQLFPTVWAERAGMGLANQVPPVVVELRSGASPVAVRQYPMSKEAREGIRPHIQKFLDLGVLVPCRSPWNTPLLPVKKPGTNDYRPVQDLREINKRVQDIHPTVPNPYNLLSSLPPSYTWYSVLDLKDAFFCLRLHPNSQPLFAFEWKDPEKGNTGQLTWTRLPQGFKNSPTLFDEALHRDLAPFRALNPQVVLLQYVDDLLVAAPTYEDCKKGTQKLLQELSKLGYRVSAKKAQLCQREVTYLGYLLKEGKRWLTPARKATVMKIPVPTTPRQVREFLGTAGFCRLWIPGFASLAAPLYPLTKESIPFIWTEEHQQAFDHIKKALLSAPALALPDLTKPFTLYIDERAGVARGVLTQTLGPWRRPVAYLSKKLDPVASGWPTCLKAVAAVALLLKDADKLTLGQNVTVIASHSLESIVRQPPDRWMTNARMTHYQSLLLNERVSFAPPAVLNPATLLPVESEATPVHRCSEILAEETGTRRDLEDQPLPGVPTWYTDGSSFITEGKRRAGAPIVDGKRTVWASSLPEGTSAQKAELVALTQALRLAEGKNINIYTDSRYAFATAHIHGAIYKQRGLLTSAGKDIKNKEEILALLEAIHLPRRVAIIHCPGHQRGSNPVATGNRRADEAAKQAALSTRVLAGTTKPAGKRTADGSEFEKRTADGSEFESPKKKAKVE

SEQ ID NO: 1366 - protein, 2101 aa, synthetic construct
MPAAKRVKLDGGDKKYSIGLDIGTNSVGWAVITDEYKVPSKKFKVLGNTDRHSIKKNLIGALLFDSGETAEATRLKRTARRRYTRRKNRICYLQEIFSNEMAKVDDSFFHRLEESFLVEEDKKHERHPIFGNIVDEVAYHEKYPTIYHLRKKLVDSTDKADLRLIYLALAHMIKFRGHFLIEGDLNPDNSDVDKLFIQLVQTYNQLFEENPINASGVDAKAILSARLSKSRRLENLIAQLPGEKKNGLFGNLIALSLGLTPNFKSNFDLAEDAKLQLSKDTYDDDLDNLLAQIGDQYADLFLAAKNLSDAILLSDILRVNTEITKAPLSASMIKRYDEHHQDLTLLKALVRQQLPEKYKEIFFDQSKNGYAGYIDGGASQEEFYKFIKPILEKMDGTEELLVKLNREDLLRKQRTFDNGSIPHQIHLGELHAILRRQEDFYPFLKDNREKIEKILTFRIPYYVGPLARGNSRFAWMTRKSEETITPWNFEEVVDKGASAQSFIERMTNFDKNLPNEKVLPKHSLLYEYFTVYNELTKVKYVTEGMRKPAFLSGEQKKAIVDLLFKTNRKVTVKQLKEDYFKKIECFDSVEISGVEDRFNASLGTYHDLLKIIKDKDFLDNEENEDILEDIVLTLTLFEDREMIEERLKTYAHLFDDKVMKQLKRRRYTGWGRLSRKLINGIRDKQSGKTILDFLKSDGFANRNFMQLIHDDSLTFKEDIQKAQVSGQGDSLHEHIANLAGSPAIKKGILQTVKVVDELVKVMGRHKPENIVIEMARENQTTQKGQKNSRERMKRIEEGIKELGSQILKEHPVENTQLQNEKLYLYYLQNGRDMYVDQELDINRLSDYDVDHIVPQSFLKDDSIDNKVLTRSDKARGKSDNVPSEEVVKKMKNYWRQLLNAKLITQRKFDNLTKAERGGLSELDKAGFIKRQLVETRQITKHVAQILDSRMNTKYDENDKLIREVKVITLKSKLVSDFRKDFQFYKVREINNYHHAHDAYLNAVVGTALIKKYPKLESEFVYGDYKVYDVRKMIAKSEQEIGKATAKYFFYSNIMNFFKTEITLANGEIRKRPLIETNGETGEIVWDKGRDFATVRKVLSMPQVNIVKKTEVQTGGFSKESILPKRNSDKLIARKKDWDPKKYGGFDSPTVAYSVLVVAKVEKGKSKKLKSVKELLGITIMERSSFEKNPIDFLEAKGYKEVKKDLIIKLPKYSLFELENGRKRMLASAGELQKGNELALPSKYVNFLYLASHYEKLKGSPEDNEQKQLFVEQHKHYLDEIIEQISEFSKRVILADANLDKVLSAYNKHRDKPIREQAENIIHLFTLTNLGAPAAFKYFDTTIDRKRYTSTKEVLDATLIHQSITGLYETRIDLSQLGGDGGGSSGSSGSSGSSGSSGSSGGVLNLEEEYRLHEKPVPSSIDPSWLQLFPTVWAERAGMGLANQVPPVVVELRSGASPVAVRQYPMSKEAREGIRPHIQKFLDLGVLVPCRSPWNTPLLPVKKPGTNDYRPVQDLREINKRVQDIHPTVPNPYNLLSSLPPSYTWYSVLDLKDAFFCLRLHPNSQPLFAFEWKDPEKGNTGQLTWTRLPQGFKNSPTLFDEALHRDLAPFRALNPQVVLLQYVDDLLVAAPTYEDCKKGTQKLLQELSKLGYRVSAKKAQLCQREVTYLGYLLKEGKRWLTPARKATVMKIPVPTTPRQVREFLGTAGFCRLWIPGFASLAAPLYPLTKESIPFIWTEEHQQAFDHIKKALLSAPALALPDLTKPFTLYIDERAGVARGVLTQTLGPWRRPVAYLSKKLDPVASGWPTCLKAVAAVALLLKDADKLTLGQNVTVIASHSLESIVRQPPDRWMTNARMTHYQSLLLNERVSFAPPAVLNPATLLPVESEATPVHRCSEILAEETGTRRDLEDQPLPGVPTWYTDGSSFITEGKRRAGAPIVDGKRTVWASSLPEGTSAQKAELVALTQALRLAEGKNINIYTDSRYAFATAHIHGAIYKQRGLLTSAGKDIKNKEEILALLEAIHLPRRVAIIHCPGHQRGSNPVATGNRRADEAAKQAALSTRVLAGTTKPAGKRTADGSEFEKRTADGSEFESPKKKAKVE

SEQ ID NO: 1367 - protein, 2103 aa, synthetic construct
MPAAKRVKLDGGDKKYSIGLDIGTNSVGWAVITDEYKVPSKKFKVLGNTDRHSIKKNLIGALLFDSGETAEATRLKRTARRRYTRRKNRICYLQEIFSNEMAKVDDSFFHRLEESFLVEEDKKHERHPIFGNIVDEVAYHEKYPTIYHLRKKLVDSTDKADLRLIYLALAHMIKFRGHFLIEGDLNPDNSDVDKLFIQLVQTYNQLFEENPINASGVDAKAILSARLSKSRRLENLIAQLPGEKKNGLFGNLIALSLGLTPNFKSNFDLAEDAKLQLSKDTYDDDLDNLLAQIGDQYADLFLAAKNLSDAILLSDILRVNTEITKAPLSASMIKRYDEHHQDLTLLKALVRQQLPEKYKEIFFDQSKNGYAGYIDGGASQEEFYKFIKPILEKMDGTEELLVKLNREDLLRKQRTFDNGSIPHQIHLGELHAILRRQEDFYPFLKDNREKIEKILTFRIPYYVGPLARGNSRFAWMTRKSEETITPWNFEEVVDKGASAQSFIERMTNFDKNLPNEKVLPKHSLLYEYFTVYNELTKVKYVTEGMRKPAFLSGEQKKAIVDLLFKTNRKVTVKQLKEDYFKKIECFDSVEISGVEDRFNASLGTYHDLLKIIKDKDFLDNEENEDILEDIVLTLTLFEDREMIEERLKTYAHLFDDKVMKQLKRRRYTGWGRLSRKLINGIRDKQSGKTILDFLKSDGFANRNFMQLIHDDSLTFKEDIQKAQVSGQGDSLHEHIANLAGSPAIKKGILQTVKVVDELVKVMGRHKPENIVIEMARENQTTQKGQKNSRERMKRIEEGIKELGSQILKEHPVENTQLQNEKLYLYYLQNGRDMYVDQELDINRLSDYDVDHIVPQSFLKDDSIDNKVLTRSDKARGKSDNVPSEEVVKKMKNYWRQLLNAKLITQRKFDNLTKAERGGLSELDKAGFIKRQLVETRQITKHVAQILDSRMNTKYDENDKLIREVKVITLKSKLVSDFRKDFQFYKVREINNYHHAHDAYLNAVVGTALIKKYPKLESEFVYGDYKVYDVRKMIAKSEQEIGKATAKYFFYSNIMNFFKTEITLANGEIRKRPLIETNGETGEIVWDKGRDFATVRKVLSMPQVNIVKKTEVQTGGFSKESILPKRNSDKLIARKKDWDPKKYGGFDSPTVAYSVLVVAKVEKGKSKKLKSVKELLGITIMERSSFEKNPIDFLEAKGYKEVKKDLIIKLPKYSLFELENGRKRMLASAGELQKGNELALPSKYVNFLYLASHYEKLKGSPEDNEQKQLFVEQHKHYLDEIIEQISEFSKRVILADANLDKVLSAYNKHRDKPIREQAENIIHLFTLTNLGAPAAFKYFDTTIDRKRYTSTKEVLDATLIHQSITGLYETRIDLSQLGGDGGEAAAKEAAAKEAAAKEAAAKGGVLNLEEEYRLHEKPVPSSIDPSWLQLFPTVWAERAGMGLANQVPPVVVELRSGASPVAVRQYPMSKEAREGIRPHIQKFLDLGVLVPCRSPWNTPLLPVKKPGTNDYRPVQDLREINKRVQDIHPTVPNPYNLLSSLPPSYTWYSVLDLKDAFFCLRLHPNSQPLFAFEWKDPEKGNTGQLTWTRLPQGFKNSPTLFDEALHRDLAPFRALNPQVVLLQYVDDLLVAAPTYEDCKKGTQKLLQELSKLGYRVSAKKAQLCQREVTYLGYLLKEGKRWLTPARKATVMKIPVPTTPRQVREFLGTAGFCRLWIPGFASLAAPLYPLTKESIPFIWTEEHQQAFDHIKKALLSAPALALPDLTKPFTLYIDERAGVARGVLTQTLGPWRRPVAYLSKKLDPVASGWPTCLKAVAAVALLLKDADKLTLGQNVTVIASHSLESIVRQPPDRWMTNARMTHYQSLLLNERVSFAPPAVLNPATLLPVESEATPVHRCSEILAEETGTRRDLEDQPLPGVPTWYTDGSSFITEGKRRAGAPIVDGKRTVWASSLPEGTSAQKAELVALTQALRLAEGKNINIYTDSRYAFATAHIHGAIYKQRGLLTSAGKDIKNKEEILALLEAIHLPRRVAIIHCPGHQRGSNPVATGNRRADEAAKQAALSTRVLAGTTKPAGKRTADGSEFEKRTADGSEFESPKKKAKVE

SEQ ID NO: 1368 - protein, 2098 aa, synthetic construct
MPAAKRVKLDGGDKKYSIGLDIGTNSVGWAVITDEYKVPSKKFKVLGNTDRHSIKKNLIGALLFDSGETAEATRLKRTARRRYTRRKNRICYLQEIFSNEMAKVDDSFFHRLEESFLVEEDKKHERHPIFGNIVDEVAYHEKYPTIYHLRKKLVDSTDKADLRLIYLALAHMIKFRGHFLIEGDLNPDNSDVDKLFIQLVQTYNQLFEENPINASGVDAKAILSARLSKSRRLENLIAQLPGEKKNGLFGNLIALSLGLTPNFKSNFDLAEDAKLQLSKDTYDDDLDNLLAQIGDQYADLFLAAKNLSDAILLSDILRVNTEITKAPLSASMIKRYDEHHQDLTLLKALVRQQLPEKYKEIFFDQSKNGYAGYIDGGASQEEFYKFIKPILEKMDGTEELLVKLNREDLLRKQRTFDNGSIPHQIHLGELHAILRRQEDFYPFLKDNREKIEKILTFRIPYYVGPLARGNSRFAWMTRKSEETITPWNFEEVVDKGASAQSFIERMTNFDKNLPNEKVLPKHSLLYEYFTVYNELTKVKYVTEGMRKPAFLSGEQKKAIVDLLFKTNRKVTVKQLKEDYFKKIECFDSVEISGVEDRFNASLGTYHDLLKIIKDKDFLDNEENEDILEDIVLTLTLFEDREMIEERLKTYAHLFDDKVMKQLKRRRYTGWGRLSRKLINGIRDKQSGKTILDFLKSDGFANRNFMQLIHDDSLTFKEDIQKAQVSGQGDSLHEHIANLAGSPAIKKGILQTVKVVDELVKVMGRHKPENIVIEMARENQTTQKGQKNSRERMKRIEEGIKELGSQILKEHPVENTQLQNEKLYLYYLQNGRDMYVDQELDINRLSDYDVDHIVPQSFLKDDSIDNKVLTRSDKARGKSDNVPSEEVVKKMKNYWRQLLNAKLITQRKFDNLTKAERGGLSELDKAGFIKRQLVETRQITKHVAQILDSRMNTKYDENDKLIREVKVITLKSKLVSDFRKDFQFYKVREINNYHHAHDAYLNAVVGTALIKKYPKLESEFVYGDYKVYDVRKMIAKSEQEIGKATAKYFFYSNIMNFFKTEITLANGEIRKRPLIETNGETGEIVWDKGRDFATVRKVLSMPQVNIVKKTEVQTGGFSKESILPKRNSDKLIARKKDWDPKKYGGFDSPTVAYSVLVVAKVEKGKSKKLKSVKELLGITIMERSSFEKNPIDFLEAKGYKEVKKDLIIKLPKYSLFELENGRKRMLASAGELQKGNELALPSKYVNFLYLASHYEKLKGSPEDNEQKQLFVEQHKHYLDEIIEQISEFSKRVILADANLDKVLSAYNKHRDKPIREQAENIIHLFTLTNLGAPAAFKYFDTTIDRKRYTSTKEVLDATLIHQSITGLYETRIDLSQLGGDGGGSSGSSGSSGSSGSSGGVLNLEEEYRLHEKPVPSSIDPSWLQLFPTVWAERAGMGLANQVPPVVVELRSGASPVAVRQYPMSKEAREGIRPHIQKFLDLGVLVPCRSPWNTPLLPVKKPGTNDYRPVQDLREINKRVQDIHPTVPNPYNLLSSLPPSYTWYSVLDLKDAFFCLRLHPNSQPLFAFEWKDPEKGNTGQLTWTRLPQGFKNSPTLFDEALHRDLAPFRALNPQVVLLQYVDDLLVAAPTYEDCKKGTQKLLQELSKLGYRVSAKKAQLCQREVTYLGYLLKEGKRWLTPARKATVMKIPVPTTPRQVREFLGTAGFCRLWIPGFASLAAPLYPLTKESIPFIWTEEHQQAFDHIKKALLSAPALALPDLTKPFTLYIDERAGVARGVLTQTLGPWRRPVAYLSKKLDPVASGWPTCLKAVAAVALLLKDADKLTLGQNVTVIASHSLESIVRQPPDRWMTNARMTHYQSLLLNERVSFAPPAVLNPATLLPVESEATPVHRCSEILAEETGTRRDLEDQPLPGVPTWYTDGSSFITEGKRRAGAPIVDGKRTVWASSLPEGTSAQKAELVALTQALRLAEGKNINIYTDSRYAFATAHIHGAIYKQRGLLTSAGKDIKNKEEILALLEAIHLPRRVAIIHCPGHQRGSNPVATGNRRADEAAKQAALSTRVLAGTTKPAGKRTADGSEFEKRTADGSEFESPKKKAKVE

SEQ ID NO: 1369 - protein, 2094 aa, synthetic construct
MPAAKRVKLDGGDKKYSIGLDIGTNSVGWAVITDEYKVPSKKFKVLGNTDRHSIKKNLIGALLFDSGETAEATRLKRTARRRYTRRKNRICYLQEIFSNEMAKVDDSFFHRLEESFLVEEDKKHERHPIFGNIVDEVAYHEKYPTIYHLRKKLVDSTDKADLRLIYLALAHMIKFRGHFLIEGDLNPDNSDVDKLFIQLVQTYNQLFEENPINASGVDAKAILSARLSKSRRLENLIAQLPGEKKNGLFGNLIALSLGLTPNFKSNFDLAEDAKLQLSKDTYDDDLDNLLAQIGDQYADLFLAAKNLSDAILLSDILRVNTEITKAPLSASMIKRYDEHHQDLTLLKALVRQQLPEKYKEIFFDQSKNGYAGYIDGGASQEEFYKFIKPILEKMDGTEELLVKLNREDLLRKQRTFDNGSIPHQIHLGELHAILRRQEDFYPFLKDNREKIEKILTFRIPYYVGPLARGNSRFAWMTRKSEETITPWNFEEVVDKGASAQSFIERMTNFDKNLPNEKVLPKHSLLYEYFTVYNELTKVKYVTEGMRKPAFLSGEQKKAIVDLLFKTNRKVTVKQLKEDYFKKIECFDSVEISGVEDRFNASLGTYHDLLKIIKDKDFLDNEENEDILEDIVLTLTLFEDREMIEERLKTYAHLFDDKVMKQLKRRRYTGWGRLSRKLINGIRDKQSGKTILDFLKSDGFANRNFMQLIHDDSLTFKEDIQKAQVSGQGDSLHEHIANLAGSPAIKKGILQTVKVVDELVKVMGRHKPENIVIEMARENQTTQKGQKNSRERMKRIEEGIKELGSQILKEHPVENTQLQNEKLYLYYLQNGRDMYVDQELDINRLSDYDVDHIVPQSFLKDDSIDNKVLTRSDKARGKSDNVPSEEVVKKMKNYWRQLLNAKLITQRKFDNLTKAERGGLSELDKAGFIKRQLVETRQITKHVAQILDSRMNTKYDENDKLIREVKVITLKSKLVSDFRKDFQFYKVREINNYHHAHDAYLNAVVGTALIKKYPKLESEFVYGDYKVYDVRKMIAKSEQEIGKATAKYFFYSNIMNFFKTEITLANGEIRKRPLIETNGETGEIVWDKGRDFATVRKVLSMPQVNIVKKTEVQTGGFSKESILPKRNSDKLIARKKDWDPKKYGGFDSPTVAYSVLVVAKVEKGKSKKLKSVKELLGITIMERSSFEKNPIDFLEAKGYKEVKKDLIIKLPKYSLFELENGRKRMLASAGELQKGNELALPSKYVNFLYLASHYEKLKGSPEDNEQKQLFVEQHKHYLDEIIEQISEFSKRVILADANLDKVLSAYNKHRDKPIREQAENIIHLFTLTNLGAPAAFKYFDTTIDRKRYTSTKEVLDATLIHQSITGLYETRIDLSQLGGDGGEAAAKGSSGGSGGVLNLEEEYRLHEKPVPSSIDPSWLQLFPTVWAERAGMGLANQVPPVVVELRSGASPVAVRQYPMSKEAREGIRPHIQKFLDLGVLVPCRSPWNTPLLPVKKPGTNDYRPVQDLREINKRVQDIHPTVPNPYNLLSSLPPSYTWYSVLDLKDAFFCLRLHPNSQPLFAFEWKDPEKGNTGQLTWTRLPQGFKNSPTLFDEALHRDLAPFRALNPQVVLLQYVDDLLVAAPTYEDCKKGTQKLLQELSKLGYRVSAKKAQLCQREVTYLGYLLKEGKRWLTPARKATVMKIPVPTTPRQVREFLGTAGFCRLWIPGFASLAAPLYPLTKESIPFIWTEEHQQAFDHIKKALLSAPALALPDLTKPFTLYIDERAGVARGVLTQTLGPWRRPVAYLSKKLDPVASGWPTCLKAVAAVALLLKDADKLTLGQNVTVIASHSLESIVRQPPDRWMTNARMTHYQSLLLNERVSFAPPAVLNPATLLPVESEATPVHRCSEILAEETGTRRDLEDQPLPGVPTWYTDGSSFITEGKRRAGAPIVDGKRTVWASSLPEGTSAQKAELVALTQALRLAEGKNINIYTDSRYAFATAHIHGAIYKQRGLLTSAGKDIKNKEEILALLEAIHLPRRVAIIHCPGHQRGSNPVATGNRRADEAAKQAALSTRVLAGTTKPAGKRTADGSEFEKRTADGSEFESPKKKAKVE

SEQ ID NO: 1370 - protein, 2129 aa, synthetic construct
MPAAKRVKLDGGDKKYSIGLDIGTNSVGWAVITDEYKVPSKKFKVLGNTDRHSIKKNLIGALLFDSGETAEATRLKRTARRRYTRRKNRICYLQEIFSNEMAKVDDSFFHRLEESFLVEEDKKHERHPIFGNIVDEVAYHEKYPTIYHLRKKLVDSTDKADLRLIYLALAHMIKFRGHFLIEGDLNPDNSDVDKLFIQLVQTYNQLFEENPINASGVDAKAILSARLSKSRRLENLIAQLPGEKKNGLFGNLIALSLGLTPNFKSNFDLAEDAKLQLSKDTYDDDLDNLLAQIGDQYADLFLAAKNLSDAILLSDILRVNTEITKAPLSASMIKRYDEHHQDLTLLKALVRQQLPEKYKEIFFDQSKNGYAGYIDGGASQEEFYKFIKPILEKMDGTEELLVKLNREDLLRKQRTFDNGSIPHQIHLGELHAILRRQEDFYPFLKDNREKIEKILTFRIPYYVGPLARGNSRFAWMTRKSEETITPWNFEEVVDKGASAQSFIERMTNFDKNLPNEKVLPKHSLLYEYFTVYNELTKVKYVTEGMRKPAFLSGEQKKAIVDLLFKTNRKVTVKQLKEDYFKKIECFDSVEISGVEDRFNASLGTYHDLLKIIKDKDFLDNEENEDILEDIVLTLTLFEDREMIEERLKTYAHLFDDKVMKQLKRRRYTGWGRLSRKLINGIRDKQSGKTILDFLKSDGFANRNFMQLIHDDSLTFKEDIQKAQVSGQGDSLHEHIANLAGSPAIKKGILQTVKVVDELVKVMGRHKPENIVIEMARENQTTQKGQKNSRERMKRIEEGIKELGSQILKEHPVENTQLQNEKLYLYYLQNGRDMYVDQELDINRLSDYDVDHIVPQSFLKDDSIDNKVLTRSDKARGKSDNVPSEEVVKKMKNYWRQLLNAKLITQRKFDNLTKAERGGLSELDKAGFIKRQLVETRQITKHVAQILDSRMNTKYDENDKLIREVKVITLKSKLVSDFRKDFQFYKVREINNYHHAHDAYLNAVVGTALIKKYPKLESEFVYGDYKVYDVRKMIAKSEQEIGKATAKYFFYSNIMNFFKTEITLANGEIRKRPLIETNGETGEIVWDKGRDFATVRKVLSMPQVNIVKKTEVQTGGFSKESILPKRNSDKLIARKKDWDPKKYGGFDSPTVAYSVLVVAKVEKGKSKKLKSVKELLGITIMERSSFEKNPIDFLEAKGYKEVKKDLIIKLPKYSLFELENGRKRMLASAGELQKGNELALPSKYVNFLYLASHYEKLKGSPEDNEQKQLFVEQHKHYLDEIIEQISEFSKRVILADANLDKVLSAYNKHRDKPIREQAENIIHLFTLTNLGAPAAFKYFDTTIDRKRYTSTKEVLDATLIHQSITGLYETRIDLSQLGGDGGAEAAAKEAAAKEAAAKEAAAKALEAEAAAKEAAAKEAAAKEAAAKAGGVLNLEEEYRLHEKPVPSSIDPSWLQLFPTVWAERAGMGLANQVPPVVVELRSGASPVAVRQYPMSKEAREGIRPHIQKFLDLGVLVPCRSPWNTPLLPVKKPGTNDYRPVQDLREINKRVQDIHPTVPNPYNLLSSLPPSYTWYSVLDLKDAFFCLRLHPNSQPLFAFEWKDPEKGNTGQLTWTRLPQGFKNSPTLFNEALHRDLAPFRALNPQVVLLQYVDDLLVAAPTYEDCKKGTQKLLQELSKLGYRVSAKKAQLCQREVTYLGYLLKEGKRWLTPARKATVMKIPVPTTPRQVREFLGTAGFCRLWIPGFASLAAPLYPLTKPSIPFIWTEEHQQAFDHIKKALLSAPALALPDLTKPFTLYIDERAGVARGVLTQTLGPWRRPVAYLSKKLDPVASGWPTCLKAVAAVALLLKDADKLTLGQNVTVIASHSLESIVRQPPDRWMTNARMTHYQSLLLNERVSFAPPAVLNPATLLPVESEATPVHRCSEILAEETGTRRDLEDQPLPGVPTWYTDGSSFITEGKRRAGAPIVDGKRTVWASSLPEGTSAQKAELVALTQALRLAEGKNINIYTDSRYAFATAHIHGAIYKQRGWLTSAGKDIKNKEEILALLEAIHLPRRVAIIHCPGHQRGSNPVATGNRRADEAAKQAALSTRVLAGTTKPAGKRTADGSEFEKRTADGSEFESPKKKAKVE

SEQ ID NO: 1371 - protein, 2098 aa, synthetic construct
MPAAKRVKLDGGDKKYSIGLDIGTNSVGWAVITDEYKVPSKKFKVLGNTDRHSIKKNLIGALLFDSGETAEATRLKRTARRRYTRRKNRICYLQEIFSNEMAKVDDSFFHRLEESFLVEEDKKHERHPIFGNIVDEVAYHEKYPTIYHLRKKLVDSTDKADLRLIYLALAHMIKFRGHFLIEGDLNPDNSDVDKLFIQLVQTYNQLFEENPINASGVDAKAILSARLSKSRRLENLIAQLPGEKKNGLFGNLIALSLGLTPNFKSNFDLAEDAKLQLSKDTYDDDLDNLLAQIGDQYADLFLAAKNLSDAILLSDILRVNTEITKAPLSASMIKRYDEHHQDLTLLKALVRQQLPEKYKEIFFDQSKNGYAGYIDGGASQEEFYKFIKPILEKMDGTEELLVKLNREDLLRKQRTFDNGSIPHQIHLGELHAILRRQEDFYPFLKDNREKIEKILTFRIPYYVGPLARGNSRFAWMTRKSEETITPWNFEEVVDKGASAQSFIERMTNFDKNLPNEKVLPKHSLLYEYFTVYNELTKVKYVTEGMRKPAFLSGEQKKAIVDLLFKTNRKVTVKQLKEDYFKKIECFDSVEISGVEDRFNASLGTYHDLLKIIKDKDFLDNEENEDILEDIVLTLTLFEDREMIEERLKTYAHLFDDKVMKQLKRRRYTGWGRLSRKLINGIRDKQSGKTILDFLKSDGFANRNFMQLIHDDSLTFKEDIQKAQVSGQGDSLHEHIANLAGSPAIKKGILQTVKVVDELVKVMGRHKPENIVIEMARENQTTQKGQKNSRERMKRIEEGIKELGSQILKEHPVENTQLQNEKLYLYYLQNGRDMYVDQELDINRLSDYDVDHIVPQSFLKDDSIDNKVLTRSDKARGKSDNVPSEEVVKKMKNYWRQLLNAKLITQRKFDNLTKAERGGLSELDKAGFIKRQLVETRQITKHVAQILDSRMNTKYDENDKLIREVKVITLKSKLVSDFRKDFQFYKVREINNYHHAHDAYLNAVVGTALIKKYPKLESEFVYGDYKVYDVRKMIAKSEQEIGKATAKYFFYSNIMNFFKTEITLANGEIRKRPLIETNGETGEIVWDKGRDFATVRKVLSMPQVNIVKKTEVQTGGFSKESILPKRNSDKLIARKKDWDPKKYGGFDSPTVAYSVLVVAKVEKGKSKKLKSVKELLGITIMERSSFEKNPIDFLEAKGYKEVKKDLIIKLPKYSLFELENGRKRMLASAGELQKGNELALPSKYVNFLYLASHYEKLKGSPEDNEQKQLFVEQHKHYLDEIIEQISEFSKRVILADANLDKVLSAYNKHRDKPIREQAENIIHLFTLTNLGAPAAFKYFDTTIDRKRYTSTKEVLDATLIHQSITGLYETRIDLSQLGGDGGPAPGGSEAAAKGGTAPLEEEYRLFLEAPIQNVTLLEQWKREIPKVWAEINPPGLASTQAPIHVQLLSTALPVRVRQYPITLEAKRSLRETIRKFRAAGILRPVHSPWNTPLLPVRKSGTSEYRMVQDLREVNKRVETIHPTVPNPYTLLSLLPPDRIWYSVLDLKDAFFCIPLAPESQLIFAFEWADAEEGESGQLTWTRLPQGFKNSPTLFNEALNRDLQGFRLDHPSVSLLQYVDDLLIAADTQAACLSATRDLLMTLAELGYRVSGKKAQLCQEEVTYLGFKIHKGSRSLSNSRTQAILQIPVPKTKRQVREFLGKIGYCRLFIPGFAELAQPLYAATRPGNDPLVWGEKEEEAFQSLKLALTQPPALALPSLDKPFQLFVEETSGAAKGVLTQALGPWKRPVAYLSKRLDPVAAGWPRCLRAIAAAALLTREASKLTFGQDIEITSSHNLESLLRSPPDKWLTNARITQYQVLLLDPPRVRFKQTAALNPATLLPETDDTLPIHHCLDTLDSLTSTRPDLTDQPLAQAEATLFTDGSSYIRDGKRYAGAAVVTLDSVIWAEPLPIGTSAQKAELIALTKALEWSKDKSVNIYTDSRYAFATLHVHGMIYRERGWLTAGGKAIKNAPEILALLTAVWLPKRVAVMHCKGHQKDDAPTSTGNRRADEVAREVAIRPLSTQATISAGKRTADGSEFEKRTADGSEFESPKKKAKVE

SEQ ID NO: 1372 - protein, 2133 aa, synthetic construct
MPAAKRVKLDGGDKKYSIGLDIGTNSVGWAVITDEYKVPSKKFKVLGNTDRHSIKKNLIGALLFDSGETAEATRLKRTARRRYTRRKNRICYLQEIFSNEMAKVDDSFFHRLEESFLVEEDKKHERHPIFGNIVDEVAYHEKYPTIYHLRKKLVDSTDKADLRLIYLALAHMIKFRGHFLIEGDLNPDNSDVDKLFIQLVQTYNQLFEENPINASGVDAKAILSARLSKSRRLENLIAQLPGEKKNGLFGNLIALSLGLTPNFKSNFDLAEDAKLQLSKDTYDDDLDNLLAQIGDQYADLFLAAKNLSDAILLSDILRVNTEITKAPLSASMIKRYDEHHQDLTLLKALVRQQLPEKYKEIFFDQSKNGYAGYIDGGASQEEFYKFIKPILEKMDGTEELLVKLNREDLLRKQRTFDNGSIPHQIHLGELHAILRRQEDFYPFLKDNREKIEKILTFRIPYYVGPLARGNSRFAWMTRKSEETITPWNFEEVVDKGASAQSFIERMTNFDKNLPNEKVLPKHSLLYEYFTVYNELTKVKYVTEGMRKPAFLSGEQKKAIVDLLFKTNRKVTVKQLKEDYFKKIECFDSVEISGVEDRFNASLGTYHDLLKIIKDKDFLDNEENEDILEDIVLTLTLFEDREMIEERLKTYAHLFDDKVMKQLKRRRYTGWGRLSRKLINGIRDKQSGKTILDFLKSDGFANRNFMQLIHDDSLTFKEDIQKAQVSGQGDSLHEHIANLAGSPAIKKGILQTVKVVDELVKVMGRHKPENIVIEMARENQTTQKGQKNSRERMKRIEEGIKELGSQILKEHPVENTQLQNEKLYLYYLQNGRDMYVDQELDINRLSDYDVDHIVPQSFLKDDSIDNKVLTRSDKARGKSDNVPSEEVVKKMKNYWRQLLNAKLITQRKFDNLTKAERGGLSELDKAGFIKRQLVETRQITKHVAQILDSRMNTKYDENDKLIREVKVITLKSKLVSDFRKDFQFYKVREINNYHHAHDAYLNAVVGTALIKKYPKLESEFVYGDYKVYDVRKMIAKSEQEIGKATAKYFFYSNIMNFFKTEITLANGEIRKRPLIETNGETGEIVWDKGRDFATVRKVLSMPQVNIVKKTEVQTGGFSKESILPKRNSDKLIARKKDWDPKKYGGFDSPTVAYSVLVVAKVEKGKSKKLKSVKELLGITIMERSSFEKNPIDFLEAKGYKEVKKDLIIKLPKYSLFELENGRKRMLASAGELQKGNELALPSKYVNFLYLASHYEKLKGSPEDNEQKQLFVEQHKHYLDEIIEQISEFSKRVILADANLDKVLSAYNKHRDKPIREQAENIIHLFTLTNLGAPAAFKYFDTTIDRKRYTSTKEVLDATLIHQSITGLYETRIDLSQLGGDGGAEAAAKEAAAKEAAAKEAAAKALEAEAAAKEAAAKEAAAKEAAAKAGGTAPLEEEYRLFLEAPIQNVTLLEQWKREIPKVWAEINPPGLASTQAPIHVQLLSTALPVRVRQYPITLEAKRSLRETIRKFRAAGILRPVHSPWNTPLLPVRKSGTSEYRMVQDLREVNKRVETIHPTVPNPYTLLSLLPPDRIWYSVLDLKDAFFCIPLAPESQLIFAFEWADAEEGESGQLTWTRLPQGFKNSPTLFNEALNRDLQGFRLDHPSVSLLQYVDDLLIAADTQAACLSATRDLLMTLAELGYRVSGKKAQLCQEEVTYLGFKIHKGSRSLSNSRTQAILQIPVPKTKRQVREFLGKIGYCRLFIPGFAELAQPLYAATRPGNDPLVWGEKEEEAFQSLKLALTQPPALALPSLDKPFQLFVEETSGAAKGVLTQALGPWKRPVAYLSKRLDPVAAGWPRCLRAIAAAALLTREASKLTFGQDIEITSSHNLESLLRSPPDKWLTNARITQYQVLLLDPPRVRFKQTAALNPATLLPETDDTLPIHHCLDTLDSLTSTRPDLTDQPLAQAEATLFTDGSSYIRDGKRYAGAAVVTLDSVIWAEPLPIGTSAQKAELIALTKALEWSKDKSVNIYTDSRYAFATLHVHGMIYRERGWLTAGGKAIKNAPEILALLTAVWLPKRVAVMHCKGHQKDDAPTSTGNRRADEVAREVAIRPLSTQATISAGKRTADGSEFEKRTADGSEFESPKKKAKVE

SEQ ID NO: 1373 - protein, 2117 aa, synthetic construct
MPAAKRVKLDGGDKKYSIGLDIGTNSVGWAVITDEYKVPSKKFKVLGNTDRHSIKKNLIGALLFDSGETAEATRLKRTARRRYTRRKNRICYLQEIFSNEMAKVDDSFFHRLEESFLVEEDKKHERHPIFGNIVDEVAYHEKYPTIYHLRKKLVDSTDKADLRLIYLALAHMIKFRGHFLIEGDLNPDNSDVDKLFIQLVQTYNQLFEENPINASGVDAKAILSARLSKSRRLENLIAQLPGEKKNGLFGNLIALSLGLTPNFKSNFDLAEDAKLQLSKDTYDDDLDNLLAQIGDQYADLFLAAKNLSDAILLSDILRVNTEITKAPLSASMIKRYDEHHQDLTLLKALVRQQLPEKYKEIFFDQSKNGYAGYIDGGASQEEFYKFIKPILEKMDGTEELLVKLNREDLLRKQRTFDNGSIPHQIHLGELHAILRRQEDFYPFLKDNREKIEKILTFRIPYYVGPLARGNSRFAWMTRKSEETITPWNFEEVVDKGASAQSFIERMTNFDKNLPNEKVLPKHSLLYEYFTVYNELTKVKYVTEGMRKPAFLSGEQKKAIVDLLFKTNRKVTVKQLKEDYFKKIECFDSVEISGVEDRFNASLGTYHDLLKIIKDKDFLDNEENEDILEDIVLTLTLFEDREMIEERLKTYAHLFDDKVMKQLKRRRYTGWGRLSRKLINGIRDKQSGKTILDFLKSDGFANRNFMQLIHDDSLTFKEDIQKAQVSGQGDSLHEHIANLAGSPAIKKGILQTVKVVDELVKVMGRHKPENIVIEMARENQTTQKGQKNSRERMKRIEEGIKELGSQILKEHPVENTQLQNEKLYLYYLQNGRDMYVDQELDINRLSDYDVDHIVPQSFLKDDSIDNKVLTRSDKARGKSDNVPSEEVVKKMKNYWRQLLNAKLITQRKFDNLTKAERGGLSELDKAGFIKRQLVETRQITKHVAQILDSRMNTKYDENDKLIREVKVITLKSKLVSDFRKDFQFYKVREINNYHHAHDAYLNAVVGTALIKKYPKLESEFVYGDYKVYDVRKMIAKSEQEIGKATAKYFFYSNIMNFFKTEITLANGEIRKRPLIETNGETGEIVWDKGRDFATVRKVLSMPQVNIVKKTEVQTGGFSKESILPKRNSDKLIARKKDWDPKKYGGFDSPTVAYSVLVVAKVEKGKSKKLKSVKELLGITIMERSSFEKNPIDFLEAKGYKEVKKDLIIKLPKYSLFELENGRKRMLASAGELQKGNELALPSKYVNFLYLASHYEKLKGSPEDNEQKQLFVEQHKHYLDEIIEQISEFSKRVILADANLDKVLSAYNKHRDKPIREQAENIIHLFTLTNLGAPAAFKYFDTTIDRKRYTSTKEVLDATLIHQSITGLYETRIDLSQLGGDGGGGGGSGGGGSGGGGSGGGGSGGGGSGGGGSGGTAPLEEEYRLFLEAPIQNVTLLEQWKREIPKVWAEINPPGLASTQAPIHVQLLSTALPVRVRQYPITLEAKRSLRETIRKFRAAGILRPVHSPWNTPLLPVRKSGTSEYRMVQDLREVNKRVETIHPTVPNPYTLLSLLPPDRIWYSVLDLKDAFFCIPLAPESQLIFAFEWADAEEGESGQLTWTRLPQGFKNSPTLFNEALNRDLQGFRLDHPSVSLLQYVDDLLIAADTQAACLSATRDLLMTLAELGYRVSGKKAQLCQEEVTYLGFKIHKGSRSLSNSRTQAILQIPVPKTKRQVREFLGKIGYCRLFIPGFAELAQPLYAATRPGNDPLVWGEKEEEAFQSLKLALTQPPALALPSLDKPFQLFVEETSGAAKGVLTQALGPWKRPVAYLSKRLDPVAAGWPRCLRAIAAAALLTREASKLTFGQDIEITSSHNLESLLRSPPDKWLTNARITQYQVLLLDPPRVRFKQTAALNPATLLPETDDTLPIHHCLDTLDSLTSTRPDLTDQPLAQAEATLFTDGSSYIRDGKRYAGAAVVTLDSVIWAEPLPIGTSAQKAELIALTKALEWSKDKSVNIYTDSRYAFATLHVHGMIYRERGWLTAGGKAIKNAPEILALLTAVWLPKRVAVMHCKGHQKDDAPTSTGNRRADEVAREVAIRPLSTQATISAGKRTADGSEFEKRTADGSEFESPKKKAKVE

SEQ ID NO: 1374 - protein, 2107 aa, synthetic construct
MPAAKRVKLDGGDKKYSIGLDIGTNSVGWAVITDEYKVPSKKFKVLGNTDRHSIKKNLIGALLFDSGETAEATRLKRTARRRYTRRKNRICYLQEIFSNEMAKVDDSFFHRLEESFLVEEDKKHERHPIFGNIVDEVAYHEKYPTIYHLRKKLVDSTDKADLRLIYLALAHMIKFRGHFLIEGDLNPDNSDVDKLFIQLVQTYNQLFEENPINASGVDAKAILSARLSKSRRLENLIAQLPGEKKNGLFGNLIALSLGLTPNFKSNFDLAEDAKLQLSKDTYDDDLDNLLAQIGDQYADLFLAAKNLSDAILLSDILRVNTEITKAPLSASMIKRYDEHHQDLTLLKALVRQQLPEKYKEIFFDQSKNGYAGYIDGGASQEEFYKFIKPILEKMDGTEELLVKLNREDLLRKQRTFDNGSIPHQIHLGELHAILRRQEDFYPFLKDNREKIEKILTFRIPYYVGPLARGNSRFAWMTRKSEETITPWNFEEVVDKGASAQSFIERMTNFDKNLPNEKVLPKHSLLYEYFTVYNELTKVKYVTEGMRKPAFLSGEQKKAIVDLLFKTNRKVTVKQLKEDYFKKIECFDSVEISGVEDRFNASLGTYHDLLKIIKDKDFLDNEENEDILEDIVLTLTLFEDREMIEERLKTYAHLFDDKVMKQLKRRRYTGWGRLSRKLINGIRDKQSGKTILDFLKSDGFANRNFMQLIHDDSLTFKEDIQKAQVSGQGDSLHEHIANLAGSPAIKKGILQTVKVVDELVKVMGRHKPENIVIEMARENQTTQKGQKNSRERMKRIEEGIKELGSQILKEHPVENTQLQNEKLYLYYLQNGRDMYVDQELDINRLSDYDVDHIVPQSFLKDDSIDNKVLTRSDKARGKSDNVPSEEVVKKMKNYWRQLLNAKLITQRKFDNLTKAERGGLSELDKAGFIKRQLVETRQITKHVAQILDSRMNTKYDENDKLIREVKVITLKSKLVSDFRKDFQFYKVREINNYHHAHDAYLNAVVGTALIKKYPKLESEFVYGDYKVYDVRKMIAKSEQEIGKATAKYFFYSNIMNFFKTEITLANGEIRKRPLIETNGETGEIVWDKGRDFATVRKVLSMPQVNIVKKTEVQTGGFSKESILPKRNSDKLIARKKDWDPKKYGGFDSPTVAYSVLVVAKVEKGKSKKLKSVKELLGITIMERSSFEKNPIDFLEAKGYKEVKKDLIIKLPKYSLFELENGRKRMLASAGELQKGNELALPSKYVNFLYLASHYEKLKGSPEDNEQKQLFVEQHKHYLDEIIEQISEFSKRVILADANLDKVLSAYNKHRDKPIREQAENIIHLFTLTNLGAPAAFKYFDTTIDRKRYTSTKEVLDATLIHQSITGLYETRIDLSQLGGDGGGGGGSGGGGSGGGGSGGGGSGGTAPLEEEYRLFLEAPIQNVTLLEQWKREIPKVWAEINPPGLASTQAPIHVQLLSTALPVRVRQYPITLEAKRSLRETIRKFRAAGILRPVHSPWNTPLLPVRKSGTSEYRMVQDLREVNKRVETIHPTVPNPYTLLSLLPPDRIWYSVLDLKDAFFCIPLAPESQLIFAFEWADAEEGESGQLTWTRLPQGFKNSPTLFNEALNRDLQGFRLDHPSVSLLQYVDDLLIAADTQAACLSATRDLLMTLAELGYRVSGKKAQLCQEEVTYLGFKIHKGSRSLSNSRTQAILQIPVPKTKRQVREFLGKIGYCRLFIPGFAELAQPLYAATRPGNDPLVWGEKEEEAFQSLKLALTQPPALALPSLDKPFQLFVEETSGAAKGVLTQALGPWKRPVAYLSKRLDPVAAGWPRCLRAIAAAALLTREASKLTFGQDIEITSSHNLESLLRSPPDKWLTNARITQYQVLLLDPPRVRFKQTAALNPATLLPETDDTLPIHHCLDTLDSLTSTRPDLTDQPLAQAEATLFTDGSSYIRDGKRYAGAAVVTLDSVIWAEPLPIGTSAQKAELIALTKALEWSKDKSVNIYTDSRYAFATLHVHGMIYRERGWLTAGGKAIKNAPEILALLTAVWLPKRVAVMHCKGHQKDDAPTSTGNRRADEVAREVAIRPLSTQATISAGKRTADGSEFEKRTADGSEFESPKKKAKVE

SEQ ID NO: 1375 - protein, 2093 aa, synthetic construct
MPAAKRVKLDGGDKKYSIGLDIGTNSVGWAVITDEYKVPSKKFKVLGNTDRHSIKKNLIGALLFDSGETAEATRLKRTARRRYTRRKNRICYLQEIFSNEMAKVDDSFFHRLEESFLVEEDKKHERHPIFGNIVDEVAYHEKYPTIYHLRKKLVDSTDKADLRLIYLALAHMIKFRGHFLIEGDLNPDNSDVDKLFIQLVQTYNQLFEENPINASGVDAKAILSARLSKSRRLENLIAQLPGEKKNGLFGNLIALSLGLTPNFKSNFDLAEDAKLQLSKDTYDDDLDNLLAQIGDQYADLFLAAKNLSDAILLSDILRVNTEITKAPLSASMIKRYDEHHQDLTLLKALVRQQLPEKYKEIFFDQSKNGYAGYIDGGASQEEFYKFIKPILEKMDGTEELLVKLNREDLLRKQRTFDNGSIPHQIHLGELHAILRRQEDFYPFLKDNREKIEKILTFRIPYYVGPLARGNSRFAWMTRKSEETITPWNFEEVVDKGASAQSFIERMTNFDKNLPNEKVLPKHSLLYEYFTVYNELTKVKYVTEGMRKPAFLSGEQKKAIVDLLFKTNRKVTVKQLKEDYFKKIECFDSVEISGVEDRFNASLGTYHDLLKIIKDKDFLDNEENEDILEDIVLTLTLFEDREMIEERLKTYAHLFDDKVMKQLKRRRYTGWGRLSRKLINGIRDKQSGKTILDFLKSDGFANRNFMQLIHDDSLTFKEDIQKAQVSGQGDSLHEHIANLAGSPAIKKGILQTVKVVDELVKVMGRHKPENIVIEMARENQTTQKGQKNSRERMKRIEEGIKELGSQILKEHPVENTQLQNEKLYLYYLQNGRDMYVDQELDINRLSDYDVDHIVPQSFLKDDSIDNKVLTRSDKARGKSDNVPSEEVVKKMKNYWRQLLNAKLITQRKFDNLTKAERGGLSELDKAGFIKRQLVETRQITKHVAQILDSRMNTKYDENDKLIREVKVITLKSKLVSDFRKDFQFYKVREINNYHHAHDAYLNAVVGTALIKKYPKLESEFVYGDYKVYDVRKMIAKSEQEIGKATAKYFFYSNIMNFFKTEITLANGEIRKRPLIETNGETGEIVWDKGRDFATVRKVLSMPQVNIVKKTEVQTGGFSKESILPKRNSDKLIARKKDWDPKKYGGFDSPTVAYSVLVVAKVEKGKSKKLKSVKELLGITIMERSSFEKNPIDFLEAKGYKEVKKDLIIKLPKYSLFELENGRKRMLASAGELQKGNELALPSKYVNFLYLASHYEKLKGSPEDNEQKQLFVEQHKHYLDEIIEQISEFSKRVILADANLDKVLSAYNKHRDKPIREQAENIIHLFTLTNLGAPAAFKYFDTTIDRKRYTSTKEVLDATLIHQSITGLYETRIDLSQLGGDGGGSSPAPGGTAPLEEEYRLFLEAPIQNVTLLEQWKREIPKVWAEINPPGLASTQAPIHVQLLSTALPVRVRQYPITLEAKRSLRETIRKFRAAGILRPVHSPWNTPLLPVRKSGTSEYRMVQDLREVNKRVETIHPTVPNPYTLLSLLPPDRIWYSVLDLKDAFFCIPLAPESQLIFAFEWADAEEGESGQLTWTRLPQGFKNSPTLFNEALNRDLQGFRLDHPSVSLLQYVDDLLIAADTQAACLSATRDLLMTLAELGYRVSGKKAQLCQEEVTYLGFKIHKGSRSLSNSRTQAILQIPVPKTKRQVREFLGKIGYCRLFIPGFAELAQPLYAATRPGNDPLVWGEKEEEAFQSLKLALTQPPALALPSLDKPFQLFVEETSGAAKGVLTQALGPWKRPVAYLSKRLDPVAAGWPRCLRAIAAAALLTREASKLTFGQDIEITSSHNLESLLRSPPDKWLTNARITQYQVLLLDPPRVRFKQTAALNPATLLPETDDTLPIHHCLDTLDSLTSTRPDLTDQPLAQAEATLFTDGSSYIRDGKRYAGAAVVTLDSVIWAEPLPIGTSAQKAELIALTKALEWSKDKSVNIYTDSRYAFATLHVHGMIYRERGWLTAGGKAIKNAPEILALLTAVWLPKRVAVMHCKGHQKDDAPTSTGNRRADEVAREVAIRPLSTQATISAGKRTADGSEFEKRTADGSEFESPKKKAKVE

SEQ ID NO: 1376 - protein, 2103 aa, synthetic construct
MPAAKRVKLDGGDKKYSIGLDIGTNSVGWAVITDEYKVPSKKFKVLGNTDRHSIKKNLIGALLFDSGETAEATRLKRTARRRYTRRKNRICYLQEIFSNEMAKVDDSFFHRLEESFLVEEDKKHERHPIFGNIVDEVAYHEKYPTIYHLRKKLVDSTDKADLRLIYLALAHMIKFRGHFLIEGDLNPDNSDVDKLFIQLVQTYNQLFEENPINASGVDAKAILSARLSKSRRLENLIAQLPGEKKNGLFGNLIALSLGLTPNFKSNFDLAEDAKLQLSKDTYDDDLDNLLAQIGDQYADLFLAAKNLSDAILLSDILRVNTEITKAPLSASMIKRYDEHHQDLTLLKALVRQQLPEKYKEIFFDQSKNGYAGYIDGGASQEEFYKFIKPILEKMDGTEELLVKLNREDLLRKQRTFDNGSIPHQIHLGELHAILRRQEDFYPFLKDNREKIEKILTFRIPYYVGPLARGNSRFAWMTRKSEETITPWNFEEVVDKGASAQSFIERMTNFDKNLPNEKVLPKHSLLYEYFTVYNELTKVKYVTEGMRKPAFLSGEQKKAIVDLLFKTNRKVTVKQLKEDYFKKIECFDSVEISGVEDRFNASLGTYHDLLKIIKDKDFLDNEENEDILEDIVLTLTLFEDREMIEERLKTYAHLFDDKVMKQLKRRRYTGWGRLSRKLINGIRDKQSGKTILDFLKSDGFANRNFMQLIHDDSLTFKEDIQKAQVSGQGDSLHEHIANLAGSPAIKKGILQTVKVVDELVKVMGRHKPENIVIEMARENQTTQKGQKNSRERMKRIEEGIKELGSQILKEHPVENTQLQNEKLYLYYLQNGRDMYVDQELDINRLSDYDVDHIVPQSFLKDDSIDNKVLTRSDKARGKSDNVPSEEVVKKMKNYWRQLLNAKLITQRKFDNLTKAERGGLSELDKAGFIKRQLVETRQITKHVAQILDSRMNTKYDENDKLIREVKVITLKSKLVSDFRKDFQFYKVREINNYHHAHDAYLNAVVGTALIKKYPKLESEFVYGDYKVYDVRKMIAKSEQEIGKATAKYFFYSNIMNFFKTEITLANGEIRKRPLIETNGETGEIVWDKGRDFATVRKVLSMPQVNIVKKTEVQTGGFSKESILPKRNSDKLIARKKDWDPKKYGGFDSPTVAYSVLVVAKVEKGKSKKLKSVKELLGITIMERSSFEKNPIDFLEAKGYKEVKKDLIIKLPKYSLFELENGRKRMLASAGELQKGNELALPSKYVNFLYLASHYEKLKGSPEDNEQKQLFVEQHKHYLDEIIEQISEFSKRVILADANLDKVLSAYNKHRDKPIREQAENIIHLFTLTNLGAPAAFKYFDTTIDRKRYTSTKEVLDATLIHQSITGLYETRIDLSQLGGDGGSGSETPGTSESATPESGGTAPLEEEYRLFLEAPIQNVTLLEQWKREIPKVWAEINPPGLASTQAPIHVQLLSTALPVRVRQYPITLEAKRSLRETIRKFRAAGILRPVHSPWNTPLLPVRKSGTSEYRMVQDLREVNKRVETIHPTVPNPYTLLSLLPPDRIWYSVLDLKDAFFCIPLAPESQLIFAFEWADAEEGESGQLTWTRLPQGFKNSPTLFNEALNRDLQGFRLDHPSVSLLQYVDDLLIAADTQAACLSATRDLLMTLAELGYRVSGKKAQLCQEEVTYLGFKIHKGSRSLSNSRTQAILQIPVPKTKRQVREFLGKIGYCRLFIPGFAELAQPLYAATRPGNDPLVWGEKEEEAFQSLKLALTQPPALALPSLDKPFQLFVEETSGAAKGVLTQALGPWKRPVAYLSKRLDPVAAGWPRCLRAIAAAALLTREASKLTFGQDIEITSSHNLESLLRSPPDKWLTNARITQYQVLLLDPPRVRFKQTAALNPATLLPETDDTLPIHHCLDTLDSLTSTRPDLTDQPLAQAEATLFTDGSSYIRDGKRYAGAAVVTLDSVIWAEPLPIGTSAQKAELIALTKALEWSKDKSVNIYTDSRYAFATLHVHGMIYRERGWLTAGGKAIKNAPEILALLTAVWLPKRVAVMHCKGHQKDDAPTSTGNRRADEVAREVAIRPLSTQATISAGKRTADGSEFEKRTADGSEFESPKKKAKVE

SEQ ID NO: 1377 - protein, 2098 aa, synthetic construct
MPAAKRVKLDGGDKKYSIGLDIGTNSVGWAVITDEYKVPSKKFKVLGNTDRHSIKKNLIGALLFDSGETAEATRLKRTARRRYTRRKNRICYLQEIFSNEMAKVDDSFFHRLEESFLVEEDKKHERHPIFGNIVDEVAYHEKYPTIYHLRKKLVDSTDKADLRLIYLALAHMIKFRGHFLIEGDLNPDNSDVDKLFIQLVQTYNQLFEENPINASGVDAKAILSARLSKSRRLENLIAQLPGEKKNGLFGNLIALSLGLTPNFKSNFDLAEDAKLQLSKDTYDDDLDNLLAQIGDQYADLFLAAKNLSDAILLSDILRVNTEITKAPLSASMIKRYDEHHQDLTLLKALVRQQLPEKYKEIFFDQSKNGYAGYIDGGASQEEFYKFIKPILEKMDGTEELLVKLNREDLLRKQRTFDNGSIPHQIHLGELHAILRRQEDFYPFLKDNREKIEKILTFRIPYYVGPLARGNSRFAWMTRKSEETITPWNFEEVVDKGASAQSFIERMTNFDKNLPNEKVLPKHSLLYEYFTVYNELTKVKYVTEGMRKPAFLSGEQKKAIVDLLFKTNRKVTVKQLKEDYFKKIECFDSVEISGVEDRFNASLGTYHDLLKIIKDKDFLDNEENEDILEDIVLTLTLFEDREMIEERLKTYAHLFDDKVMKQLKRRRYTGWGRLSRKLINGIRDKQSGKTILDFLKSDGFANRNFMQLIHDDSLTFKEDIQKAQVSGQGDSLHEHIANLAGSPAIKKGILQTVKVVDELVKVMGRHKPENIVIEMARENQTTQKGQKNSRERMKRIEEGIKELGSQILKEHPVENTQLQNEKLYLYYLQNGRDMYVDQELDINRLSDYDVDHIVPQSFLKDDSIDNKVLTRSDKARGKSDNVPSEEVVKKMKNYWRQLLNAKLITQRKFDNLTKAERGGLSELDKAGFIKRQLVETRQITKHVAQILDSRMNTKYDENDKLIREVKVITLKSKLVSDFRKDFQFYKVREINNYHHAHDAYLNAVVGTALIKKYPKLESEFVYGDYKVYDVRKMIAKSEQEIGKATAKYFFYSNIMNFFKTEITLANGEIRKRPLIETNGETGEIVWDKGRDFATVRKVLSMPQVNIVKKTEVQTGGFSKESILPKRNSDKLIARKKDWDPKKYGGFDSPTVAYSVLVVAKVEKGKSKKLKSVKELLGITIMERSSFEKNPIDFLEAKGYKEVKKDLIIKLPKYSLFELENGRKRMLASAGELQKGNELALPSKYVNFLYLASHYEKLKGSPEDNEQKQLFVEQHKHYLDEIIEQISEFSKRVILADANLDKVLSAYNKHRDKPIREQAENIIHLFTLTNLGAPAAFKYFDTTIDRKRYTSTKEVLDATLIHQSITGLYETRIDLSQLGGDGGPAPEAAAKGGSGGTAPLEEEYRLFLEAPIQNVTLLEQWKREIPKVWAEINPPGLASTQAPIHVQLLSTALPVRVRQYPITLEAKRSLRETIRKFRAAGILRPVHSPWNTPLLPVRKSGTSEYRMVQDLREVNKRVETIHPTVPNPYTLLSLLPPDRIWYSVLDLKDAFFCIPLAPESQLIFAFEWADAEEGESGQLTWTRLPQGFKNSPTLFNEALNRDLQGFRLDHPSVSLLQYVDDLLIAADTQAACLSATRDLLMTLAELGYRVSGKKAQLCQEEVTYLGFKIHKGSRSLSNSRTQAILQIPVPKTKRQVREFLGKIGYCRLFIPGFAELAQPLYAATRPGNDPLVWGEKEEEAFQSLKLALTQPPALALPSLDKPFQLFVEETSGAAKGVLTQALGPWKRPVAYLSKRLDPVAAGWPRCLRAIAAAALLTREASKLTFGQDIEITSSHNLESLLRSPPDKWLTNARITQYQVLLLDPPRVRFKQTAALNPATLLPETDDTLPIHHCLDTLDSLTSTRPDLTDQPLAQAEATLFTDGSSYIRDGKRYAGAAVVTLDSVIWAEPLPIGTSAQKAELIALTKALEWSKDKSVNIYTDSRYAFATLHVHGMIYRERGWLTAGGKAIKNAPEILALLTAVWLPKRVAVMHCKGHQKDDAPTSTGNRRADEVAREVAIRPLSTQATISAGKRTADGSEFEKRTADGSEFESPKKKAKVE

SEQ ID NO: 1378 - protein, 2092 aa, synthetic construct
MPAAKRVKLDGGDKKYSIGLDIGTNSVGWAVITDEYKVPSKKFKVLGNTDRHSIKKNLIGALLFDSGETAEATRLKRTARRRYTRRKNRICYLQEIFSNEMAKVDDSFFHRLEESFLVEEDKKHERHPIFGNIVDEVAYHEKYPTIYHLRKKLVDSTDKADLRLIYLALAHMIKFRGHFLIEGDLNPDNSDVDKLFIQLVQTYNQLFEENPINASGVDAKAILSARLSKSRRLENLIAQLPGEKKNGLFGNLIALSLGLTPNFKSNFDLAEDAKLQLSKDTYDDDLDNLLAQIGDQYADLFLAAKNLSDAILLSDILRVNTEITKAPLSASMIKRYDEHHQDLTLLKALVRQQLPEKYKEIFFDQSKNGYAGYIDGGASQEEFYKFIKPILEKMDGTEELLVKLNREDLLRKQRTFDNGSIPHQIHLGELHAILRRQEDFYPFLKDNREKIEKILTFRIPYYVGPLARGNSRFAWMTRKSEETITPWNFEEVVDKGASAQSFIERMTNFDKNLPNEKVLPKHSLLYEYFTVYNELTKVKYVTEGMRKPAFLSGEQKKAIVDLLFKTNRKVTVKQLKEDYFKKIECFDSVEISGVEDRFNASLGTYHDLLKIIKDKDFLDNEENEDILEDIVLTLTLFEDREMIEERLKTYAHLFDDKVMKQLKRRRYTGWGRLSRKLINGIRDKQSGKTILDFLKSDGFANRNFMQLIHDDSLTFKEDIQKAQVSGQGDSLHEHIANLAGSPAIKKGILQTVKVVDELVKVMGRHKPENIVIEMARENQTTQKGQKNSRERMKRIEEGIKELGSQILKEHPVENTQLQNEKLYLYYLQNGRDMYVDQELDINRLSDYDVDHIVPQSFLKDDSIDNKVLTRSDKARGKSDNVPSEEVVKKMKNYWRQLLNAKLITQRKFDNLTKAERGGLSELDKAGFIKRQLVETRQITKHVAQILDSRMNTKYDENDKLIREVKVITLKSKLVSDFRKDFQFYKVREINNYHHAHDAYLNAVVGTALIKKYPKLESEFVYGDYKVYDVRKMIAKSEQEIGKATAKYFFYSNIMNFFKTEITLANGEIRKRPLIETNGETGEIVWDKGRDFATVRKVLSMPQVNIVKKTEVQTGGFSKESILPKRNSDKLIARKKDWDPKKYGGFDSPTVAYSVLVVAKVEKGKSKKLKSVKELLGITIMERSSFEKNPIDFLEAKGYKEVKKDLIIKLPKYSLFELENGRKRMLASAGELQKGNELALPSKYVNFLYLASHYEKLKGSPEDNEQKQLFVEQHKHYLDEIIEQISEFSKRVILADANLDKVLSAYNKHRDKPIREQAENIIHLFTLTNLGAPAAFKYFDTTIDRKRYTSTKEVLDATLIHQSITGLYETRIDLSQLGGDGGPAPAPGGTAPLEEEYRLFLEAPIQNVTLLEQWKREIPKVWAEINPPGLASTQAPIHVQLLSTALPVRVRQYPITLEAKRSLRETIRKFRAAGILRPVHSPWNTPLLPVRKSGTSEYRMVQDLREVNKRVETIHPTVPNPYTLLSLLPPDRIWYSVLDLKDAFFCIPLAPESQLIFAFEWADAEEGESGQLTWTRLPQGFKNSPTLFNEALNRDLQGFRLDHPSVSLLQYVDDLLIAADTQAACLSATRDLLMTLAELGYRVSGKKAQLCQEEVTYLGFKIHKGSRSLSNSRTQAILQIPVPKTKRQVREFLGKIGYCRLFIPGFAELAQPLYAATRPGNDPLVWGEKEEEAFQSLKLALTQPPALALPSLDKPFQLFVEETSGAAKGVLTQALGPWKRPVAYLSKRLDPVAAGWPRCLRAIAAAALLTREASKLTFGQDIEITSSHNLESLLRSPPDKWLTNARITQYQVLLLDPPRVRFKQTAALNPATLLPETDDTLPIHHCLDTLDSLTSTRPDLTDQPLAQAEATLFTDGSSYIRDGKRYAGAAVVTLDSVIWAEPLPIGTSAQKAELIALTKALEWSKDKSVNIYTDSRYAFATLHVHGMIYRERGWLTAGGKAIKNAPEILALLTAVWLPKRVAVMHCKGHQKDDAPTSTGNRRADEVAREVAIRPLSTQATISAGKRTADGSEFEKRTADGSEFESPKKKAKVE

SEQ ID NO: 1379 - protein, 2098 aa, synthetic construct
MPAAKRVKLDGGDKKYSIGLDIGTNSVGWAVITDEYKVPSKKFKVLGNTDRHSIKKNLIGALLFDSGETAEATRLKRTARRRYTRRKNRICYLQEIFSNEMAKVDDSFFHRLEESFLVEEDKKHERHPIFGNIVDEVAYHEKYPTIYHLRKKLVDSTDKADLRLIYLALAHMIKFRGHFLIEGDLNPDNSDVDKLFIQLVQTYNQLFEENPINASGVDAKAILSARLSKSRRLENLIAQLPGEKKNGLFGNLIALSLGLTPNFKSNFDLAEDAKLQLSKDTYDDDLDNLLAQIGDQYADLFLAAKNLSDAILLSDILRVNTEITKAPLSASMIKRYDEHHQDLTLLKALVRQQLPEKYKEIFFDQSKNGYAGYIDGGASQEEFYKFIKPILEKMDGTEELLVKLNREDLLRKQRTFDNGSIPHQIHLGELHAILRRQEDFYPFLKDNREKIEKILTFRIPYYVGPLARGNSRFAWMTRKSEETITPWNFEEVVDKGASAQSFIERMTNFDKNLPNEKVLPKHSLLYEYFTVYNELTKVKYVTEGMRKPAFLSGEQKKAIVDLLFKTNRKVTVKQLKEDYFKKIECFDSVEISGVEDRFNASLGTYHDLLKIIKDKDFLDNEENEDILEDIVLTLTLFEDREMIEERLKTYAHLFDDKVMKQLKRRRYTGWGRLSRKLINGIRDKQSGKTILDFLKSDGFANRNFMQLIHDDSLTFKEDIQKAQVSGQGDSLHEHIANLAGSPAIKKGILQTVKVVDELVKVMGRHKPENIVIEMARENQTTQKGQKNSRERMKRIEEGIKELGSQILKEHPVENTQLQNEKLYLYYLQNGRDMYVDQELDINRLSDYDVDHIVPQSFLKDDSIDNKVLTRSDKARGKSDNVPSEEVVKKMKNYWRQLLNAKLITQRKFDNLTKAERGGLSELDKAGFIKRQLVETRQITKHVAQILDSRMNTKYDENDKLIREVKVITLKSKLVSDFRKDFQFYKVREINNYHHAHDAYLNAVVGTALIKKYPKLESEFVYGDYKVYDVRKMIAKSEQEIGKATAKYFFYSNIMNFFKTEITLANGEIRKRPLIETNGETGEIVWDKGRDFATVRKVLSMPQVNIVKKTEVQTGGFSKESILPKRNSDKLIARKKDWDPKKYGGFDSPTVAYSVLVVAKVEKGKSKKLKSVKELLGITIMERSSFEKNPIDFLEAKGYKEVKKDLIIKLPKYSLFELENGRKRMLASAGELQKGNELALPSKYVNFLYLASHYEKLKGSPEDNEQKQLFVEQHKHYLDEIIEQISEFSKRVILADANLDKVLSAYNKHRDKPIREQAENIIHLFTLTNLGAPAAFKYFDTTIDRKRYTSTKEVLDATLIHQSITGLYETRIDLSQLGGDGGGGGEAAAKGGSGGTAPLEEEYRLFLEAPIQNVTLLEQWKREIPKVWAEINPPGLASTQAPIHVQLLSTALPVRVRQYPITLEAKRSLRETIRKFRAAGILRPVHSPWNTPLLPVRKSGTSEYRMVQDLREVNKRVETIHPTVPNPYTLLSLLPPDRIWYSVLDLKDAFFCIPLAPESQLIFAFEWADAEEGESGQLTWTRLPQGFKNSPTLFNEALNRDLQGFRLDHPSVSLLQYVDDLLIAADTQAACLSATRDLLMTLAELGYRVSGKKAQLCQEEVTYLGFKIHKGSRSLSNSRTQAILQIPVPKTKRQVREFLGKIGYCRLFIPGFAELAQPLYAATRPGNDPLVWGEKEEEAFQSLKLALTQPPALALPSLDKPFQLFVEETSGAAKGVLTQALGPWKRPVAYLSKRLDPVAAGWPRCLRAIAAAALLTREASKLTFGQDIEITSSHNLESLLRSPPDKWLTNARITQYQVLLLDPPRVRFKQTAALNPATLLPETDDTLPIHHCLDTLDSLTSTRPDLTDQPLAQAEATLFTDGSSYIRDGKRYAGAAVVTLDSVIWAEPLPIGTSAQKAELIALTKALEWSKDKSVNIYTDSRYAFATLHVHGMIYRERGWLTAGGKAIKNAPEILALLTAVWLPKRVAVMHCKGHQKDDAPTSTGNRRADEVAREVAIRPLSTQATISAGKRTADGSEFEKRTADGSEFESPKKKAKVE

SEQ ID NO: 1380 - protein, 2092 aa, synthetic construct
MPAAKRVKLDGGDKKYSIGLDIGTNSVGWAVITDEYKVPSKKFKVLGNTDRHSIKKNLIGALLFDSGETAEATRLKRTARRRYTRRKNRICYLQEIFSNEMAKVDDSFFHRLEESFLVEEDKKHERHPIFGNIVDEVAYHEKYPTIYHLRKKLVDSTDKADLRLIYLALAHMIKFRGHFLIEGDLNPDNSDVDKLFIQLVQTYNQLFEENPINASGVDAKAILSARLSKSRRLENLIAQLPGEKKNGLFGNLIALSLGLTPNFKSNFDLAEDAKLQLSKDTYDDDLDNLLAQIGDQYADLFLAAKNLSDAILLSDILRVNTEITKAPLSASMIKRYDEHHQDLTLLKALVRQQLPEKYKEIFFDQSKNGYAGYIDGGASQEEFYKFIKPILEKMDGTEELLVKLNREDLLRKQRTFDNGSIPHQIHLGELHAILRRQEDFYPFLKDNREKIEKILTFRIPYYVGPLARGNSRFAWMTRKSEETITPWNFEEVVDKGASAQSFIERMTNFDKNLPNEKVLPKHSLLYEYFTVYNELTKVKYVTEGMRKPAFLSGEQKKAIVDLLFKTNRKVTVKQLKEDYFKKIECFDSVEISGVEDRFNASLGTYHDLLKIIKDKDFLDNEENEDILEDIVLTLTLFEDREMIEERLKTYAHLFDDKVMKQLKRRRYTGWGRLSRKLINGIRDKQSGKTILDFLKSDGFANRNFMQLIHDDSLTFKEDIQKAQVSGQGDSLHEHIANLAGSPAIKKGILQTVKVVDELVKVMGRHKPENIVIEMARENQTTQKGQKNSRERMKRIEEGIKELGSQILKEHPVENTQLQNEKLYLYYLQNGRDMYVDQELDINRLSDYDVDHIVPQSFLKDDSIDNKVLTRSDKARGKSDNVPSEEVVKKMKNYWRQLLNAKLITQRKFDNLTKAERGGLSELDKAGFIKRQLVETRQITKHVAQILDSRMNTKYDENDKLIREVKVITLKSKLVSDFRKDFQFYKVREINNYHHAHDAYLNAVVGTALIKKYPKLESEFVYGDYKVYDVRKMIAKSEQEIGKATAKYFFYSNIMNFFKTEITLANGEIRKRPLIETNGETGEIVWDKGRDFATVRKVLSMPQVNIVKKTEVQTGGFSKESILPKRNSDKLIARKKDWDPKKYGGFDSPTVAYSVLVVAKVEKGKSKKLKSVKELLGITIMERSSFEKNPIDFLEAKGYKEVKKDLIIKLPKYSLFELENGRKRMLASAGELQKGNELALPSKYVNFLYLASHYEKLKGSPEDNEQKQLFVEQHKHYLDEIIEQISEFSKRVILADANLDKVLSAYNKHRDKPIREQAENIIHLFTLTNLGAPAAFKYFDTTIDRKRYTSTKEVLDATLIHQSITGLYETRIDLSQLGGDGGEAAAKGGTAPLEEEYRLFLEAPIQNVTLLEQWKREIPKVWAEINPPGLASTQAPIHVQLLSTALPVRVRQYPITLEAKRSLRETIRKFRAAGILRPVHSPWNTPLLPVRKSGTSEYRMVQDLREVNKRVETIHPTVPNPYTLLSLLPPDRIWYSVLDLKDAFFCIPLAPESQLIFAFEWADAEEGESGQLTWTRLPQGFKNSPTLFNEALNRDLQGFRLDHPSVSLLQYVDDLLIAADTQAACLSATRDLLMTLAELGYRVSGKKAQLCQEEVTYLGFKIHKGSRSLSNSRTQAILQIPVPKTKRQVREFLGKIGYCRLFIPGFAELAQPLYAATRPGNDPLVWGEKEEEAFQSLKLALTQPPALALPSLDKPFQLFVEETSGAAKGVLTQALGPWKRPVAYLSKRLDPVAAGWPRCLRAIAAAALLTREASKLTFGQDIEITSSHNLESLLRSPPDKWLTNARITQYQVLLLDPPRVRFKQTAALNPATLLPETDDTLPIHHCLDTLDSLTSTRPDLTDQPLAQAEATLFTDGSSYIRDGKRYAGAAVVTLDSVIWAEPLPIGTSAQKAELIALTKALEWSKDKSVNIYTDSRYAFATLHVHGMIYRERGWLTAGGKAIKNAPEILALLTAVWLPKRVAVMHCKGHQKDDAPTSTGNRRADEVAREVAIRPLSTQATISAGKRTADGSEFEKRTADGSEFESPKKKAKVE

SEQ ID NO: 1381 - protein, 2098 aa, synthetic construct
MPAAKRVKLDGGDKKYSIGLDIGTNSVGWAVITDEYKVPSKKFKVLGNTDRHSIKKNLIGALLFDSGETAEATRLKRTARRRYTRRKNRICYLQEIFSNEMAKVDDSFFHRLEESFLVEEDKKHERHPIFGNIVDEVAYHEKYPTIYHLRKKLVDSTDKADLRLIYLALAHMIKFRGHFLIEGDLNPDNSDVDKLFIQLVQTYNQLFEENPINASGVDAKAILSARLSKSRRLENLIAQLPGEKKNGLFGNLIALSLGLTPNFKSNFDLAEDAKLQLSKDTYDDDLDNLLAQIGDQYADLFLAAKNLSDAILLSDILRVNTEITKAPLSASMIKRYDEHHQDLTLLKALVRQQLPEKYKEIFFDQSKNGYAGYIDGGASQEEFYKFIKPILEKMDGTEELLVKLNREDLLRKQRTFDNGSIPHQIHLGELHAILRRQEDFYPFLKDNREKIEKILTFRIPYYVGPLARGNSRFAWMTRKSEETITPWNFEEVVDKGASAQSFIERMTNFDKNLPNEKVLPKHSLLYEYFTVYNELTKVKYVTEGMRKPAFLSGEQKKAIVDLLFKTNRKVTVKQLKEDYFKKIECFDSVEISGVEDRFNASLGTYHDLLKIIKDKDFLDNEENEDILEDIVLTLTLFEDREMIEERLKTYAHLFDDKVMKQLKRRRYTGWGRLSRKLINGIRDKQSGKTILDFLKSDGFANRNFMQLIHDDSLTFKEDIQKAQVSGQGDSLHEHIANLAGSPAIKKGILQTVKVVDELVKVMGRHKPENIVIEMARENQTTQKGQKNSRERMKRIEEGIKELGSQILKEHPVENTQLQNEKLYLYYLQNGRDMYVDQELDINRLSDYDVDHIVPQSFLKDDSIDNKVLTRSDKARGKSDNVPSEEVVKKMKNYWRQLLNAKLITQRKFDNLTKAERGGLSELDKAGFIKRQLVETRQITKHVAQILDSRMNTKYDENDKLIREVKVITLKSKLVSDFRKDFQFYKVREINNYHHAHDAYLNAVVGTALIKKYPKLESEFVYGDYKVYDVRKMIAKSEQEIGKATAKYFFYSNIMNFFKTEITLANGEIRKRPLIETNGETGEIVWDKGRDFATVRKVLSMPQVNIVKKTEVQTGGFSKESILPKRNSDKLIARKKDWDPKKYGGFDSPTVAYSVLVVAKVEKGKSKKLKSVKELLGITIMERSSFEKNPIDFLEAKGYKEVKKDLIIKLPKYSLFELENGRKRMLASAGELQKGNELALPSKYVNFLYLASHYEKLKGSPEDNEQKQLFVEQHKHYLDEIIEQISEFSKRVILADANLDKVLSAYNKHRDKPIREQAENIIHLFTLTNLGAPAAFKYFDTTIDRKRYTSTKEVLDATLIHQSITGLYETRIDLSQLGGDGGGSSEAAAKPAPGGTAPLEEEYRLFLEAPIQNVTLLEQWKREIPKVWAEINPPGLASTQAPIHVQLLSTALPVRVRQYPITLEAKRSLRETIRKFRAAGILRPVHSPWNTPLLPVRKSGTSEYRMVQDLREVNKRVETIHPTVPNPYTLLSLLPPDRIWYSVLDLKDAFFCIPLAPESQLIFAFEWADAEEGESGQLTWTRLPQGFKNSPTLFNEALNRDLQGFRLDHPSVSLLQYVDDLLIAADTQAACLSATRDLLMTLAELGYRVSGKKAQLCQEEVTYLGFKIHKGSRSLSNSRTQAILQIPVPKTKRQVREFLGKIGYCRLFIPGFAELAQPLYAATRPGNDPLVWGEKEEEAFQSLKLALTQPPALALPSLDKPFQLFVEETSGAAKGVLTQALGPWKRPVAYLSKRLDPVAAGWPRCLRAIAAAALLTREASKLTFGQDIEITSSHNLESLLRSPPDKWLTNARITQYQVLLLDPPRVRFKQTAALNPATLLPETDDTLPIHHCLDTLDSLTSTRPDLTDQPLAQAEATLFTDGSSYIRDGKRYAGAAVVTLDSVIWAEPLPIGTSAQKAELIALTKALEWSKDKSVNIYTDSRYAFATLHVHGMIYRERGWLTAGGKAIKNAPEILALLTAVWLPKRVAVMHCKGHQKDDAPTSTGNRRADEVAREVAIRPLSTQATISAGKRTADGSEFEKRTADGSEFESPKKKAKVE

SEQ ID NO: 1382 - protein, 2105 aa, synthetic construct
MPAAKRVKLDGGDKKYSIGLDIGTNSVGWAVITDEYKVPSKKFKVLGNTDRHSIKKNLIGALLFDSGETAEATRLKRTARRRYTRRKNRICYLQEIFSNEMAKVDDSFFHRLEESFLVEEDKKHERHPIFGNIVDEVAYHEKYPTIYHLRKKLVDSTDKADLRLIYLALAHMIKFRGHFLIEGDLNPDNSDVDKLFIQLVQTYNQLFEENPINASGVDAKAILSARLSKSRRLENLIAQLPGEKKNGLFGNLIALSLGLTPNFKSNFDLAEDAKLQLSKDTYDDDLDNLLAQIGDQYADLFLAAKNLSDAILLSDILRVNTEITKAPLSASMIKRYDEHHQDLTLLKALVRQQLPEKYKEIFFDQSKNGYAGYIDGGASQEEFYKFIKPILEKMDGTEELLVKLNREDLLRKQRTFDNGSIPHQIHLGELHAILRRQEDFYPFLKDNREKIEKILTFRIPYYVGPLARGNSRFAWMTRKSEETITPWNFEEVVDKGASAQSFIERMTNFDKNLPNEKVLPKHSLLYEYFTVYNELTKVKYVTEGMRKPAFLSGEQKKAIVDLLFKTNRKVTVKQLKEDYFKKIECFDSVEISGVEDRFNASLGTYHDLLKIIKDKDFLDNEENEDILEDIVLTLTLFEDREMIEERLKTYAHLFDDKVMKQLKRRRYTGWGRLSRKLINGIRDKQSGKTILDFLKSDGFANRNFMQLIHDDSLTFKEDIQKAQVSGQGDSLHEHIANLAGSPAIKKGILQTVKVVDELVKVMGRHKPENIVIEMARENQTTQKGQKNSRERMKRIEEGIKELGSQILKEHPVENTQLQNEKLYLYYLQNGRDMYVDQELDINRLSDYDVDHIVPQSFLKDDSIDNKVLTRSDKARGKSDNVPSEEVVKKMKNYWRQLLNAKLITQRKFDNLTKAERGGLSELDKAGFIKRQLVETRQITKHVAQILDSRMNTKYDENDKLIREVKVITLKSKLVSDFRKDFQFYKVREINNYHHAHDAYLNAVVGTALIKKYPKLESEFVYGDYKVYDVRKMIAKSEQEIGKATAKYFFYSNIMNFFKTEITLANGEIRKRPLIETNGETGEIVWDKGRDFATVRKVLSMPQVNIVKKTEVQTGGFSKESILPKRNSDKLIARKKDWDPKKYGGFDSPTVAYSVLVVAKVEKGKSKKLKSVKELLGITIMERSSFEKNPIDFLEAKGYKEVKKDLIIKLPKYSLFELENGRKRMLASAGELQKGNELALPSKYVNFLYLASHYEKLKGSPEDNEQKQLFVEQHKHYLDEIIEQISEFSKRVILADANLDKVLSAYNKHRDKPIREQAENIIHLFTLTNLGAPAAFKYFDTTIDRKRYTSTKEVLDATLIHQSITGLYETRIDLSQLGGDGGGSSGSSGSSGSSGSSGSSGGTAPLEEEYRLFLEAPIQNVTLLEQWKREIPKVWAEINPPGLASTQAPIHVQLLSTALPVRVRQYPITLEAKRSLRETIRKFRAAGILRPVHSPWNTPLLPVRKSGTSEYRMVQDLREVNKRVETIHPTVPNPYTLLSLLPPDRIWYSVLDLKDAFFCIPLAPESQLIFAFEWADAEEGESGQLTWTRLPQGFKNSPTLFNEALNRDLQGFRLDHPSVSLLQYVDDLLIAADTQAACLSATRDLLMTLAELGYRVSGKKAQLCQEEVTYLGFKIHKGSRSLSNSRTQAILQIPVPKTKRQVREFLGKIGYCRLFIPGFAELAQPLYAATRPGNDPLVWGEKEEEAFQSLKLALTQPPALALPSLDKPFQLFVEETSGAAKGVLTQALGPWKRPVAYLSKRLDPVAAGWPRCLRAIAAAALLTREASKLTFGQDIEITSSHNLESLLRSPPDKWLTNARITQYQVLLLDPPRVRFKQTAALNPATLLPETDDTLPIHHCLDTLDSLTSTRPDLTDQPLAQAEATLFTDGSSYIRDGKRYAGAAVVTLDSVIWAEPLPIGTSAQKAELIALTKALEWSKDKSVNIYTDSRYAFATLHVHGMIYRERGWLTAGGKAIKNAPEILALLTAVWLPKRVAVMHCKGHQKDDAPTSTGNRRADEVAREVAIRPLSTQATISAGKRTADGSEFEKRTADGSEFESPKKKAKVE

SEQ ID NO: 1383 - protein, 2096 aa, synthetic construct
MPAAKRVKLDGGDKKYSIGLDIGTNSVGWAVITDEYKVPSKKFKVLGNTDRHSIKKNLIGALLFDSGETAEATRLKRTARRRYTRRKNRICYLQEIFSNEMAKVDDSFFHRLEESFLVEEDKKHERHPIFGNIVDEVAYHEKYPTIYHLRKKLVDSTDKADLRLIYLALAHMIKFRGHFLIEGDLNPDNSDVDKLFIQLVQTYNQLFEENPINASGVDAKAILSARLSKSRRLENLIAQLPGEKKNGLFGNLIALSLGLTPNFKSNFDLAEDAKLQLSKDTYDDDLDNLLAQIGDQYADLFLAAKNLSDAILLSDILRVNTEITKAPLSASMIKRYDEHHQDLTLLKALVRQQLPEKYKEIFFDQSKNGYAGYIDGGASQEEFYKFIKPILEKMDGTEELLVKLNREDLLRKQRTFDNGSIPHQIHLGELHAILRRQEDFYPFLKDNREKIEKILTFRIPYYVGPLARGNSRFAWMTRKSEETITPWNFEEVVDKGASAQSFIERMTNFDKNLPNEKVLPKHSLLYEYFTVYNELTKVKYVTEGMRKPAFLSGEQKKAIVDLLFKTNRKVTVKQLKEDYFKKIECFDSVEISGVEDRFNASLGTYHDLLKIIKDKDFLDNEENEDILEDIVLTLTLFEDREMIEERLKTYAHLFDDKVMKQLKRRRYTGWGRLSRKLINGIRDKQSGKTILDFLKSDGFANRNFMQLIHDDSLTFKEDIQKAQVSGQGDSLHEHIANLAGSPAIKKGILQTVKVVDELVKVMGRHKPENIVIEMARENQTTQKGQKNSRERMKRIEEGIKELGSQILKEHPVENTQLQNEKLYLYYLQNGRDMYVDQELDINRLSDYDVDHIVPQSFLKDDSIDNKVLTRSDKARGKSDNVPSEEVVKKMKNYWRQLLNAKLITQRKFDNLTKAERGGLSELDKAGFIKRQLVETRQITKHVAQILDSRMNTKYDENDKLIREVKVITLKSKLVSDFRKDFQFYKVREINNYHHAHDAYLNAVVGTALIKKYPKLESEFVYGDYKVYDVRKMIAKSEQEIGKATAKYFFYSNIMNFFKTEITLANGEIRKRPLIETNGETGEIVWDKGRDFATVRKVLSMPQVNIVKKTEVQTGGFSKESILPKRNSDKLIARKKDWDPKKYGGFDSPTVAYSVLVVAKVEKGKSKKLKSVKELLGITIMERSSFEKNPIDFLEAKGYKEVKKDLIIKLPKYSLFELENGRKRMLASAGELQKGNELALPSKYVNFLYLASHYEKLKGSPEDNEQKQLFVEQHKHYLDEIIEQISEFSKRVILADANLDKVLSAYNKHRDKPIREQAENIIHLFTLTNLGAPAAFKYFDTTIDRKRYTSTKEVLDATLIHQSITGLYETRIDLSQLGGDGGGGSPAPGGGGGTAPLEEEYRLFLEAPIQNVTLLEQWKREIPKVWAEINPPGLASTQAPIHVQLLSTALPVRVRQYPITLEAKRSLRETIRKFRAAGILRPVHSPWNTPLLPVRKSGTSEYRMVQDLREVNKRVETIHPTVPNPYTLLSLLPPDRIWYSVLDLKDAFFCIPLAPESQLIFAFEWADAEEGESGQLTWTRLPQGFKNSPTLFNEALNRDLQGFRLDHPSVSLLQYVDDLLIAADTQAACLSATRDLLMTLAELGYRVSGKKAQLCQEEVTYLGFKIHKGSRSLSNSRTQAILQIPVPKTKRQVREFLGKIGYCRLFIPGFAELAQPLYAATRPGNDPLVWGEKEEEAFQSLKLALTQPPALALPSLDKPFQLFVEETSGAAKGVLTQALGPWKRPVAYLSKRLDPVAAGWPRCLRAIAAAALLTREASKLTFGQDIEITSSHNLESLLRSPPDKWLTNARITQYQVLLLDPPRVRFKQTAALNPATLLPETDDTLPIHHCLDTLDSLTSTRPDLTDQPLAQAEATLFTDGSSYIRDGKRYAGAAVVTLDSVIWAEPLPIGTSAQKAELIALTKALEWSKDKSVNIYTDSRYAFATLHVHGMIYRERGWLTAGGKAIKNAPEILALLTAVWLPKRVAVMHCKGHQKDDAPTSTGNRRADEVAREVAIRPLSTQATISAGKRTADGSEFEKRTADGSEFESPKKKAKVE

SEQ ID NO: 1384 - protein, 2098 aa, synthetic construct
MPAAKRVKLDGGDKKYSIGLDIGTNSVGWAVITDEYKVPSKKFKVLGNTDRHSIKKNLIGALLFDSGETAEATRLKRTARRRYTRRKNRICYLQEIFSNEMAKVDDSFFHRLEESFLVEEDKKHERHPIFGNIVDEVAYHEKYPTIYHLRKKLVDSTDKADLRLIYLALAHMIKFRGHFLIEGDLNPDNSDVDKLFIQLVQTYNQLFEENPINASGVDAKAILSARLSKSRRLENLIAQLPGEKKNGLFGNLIALSLGLTPNFKSNFDLAEDAKLQLSKDTYDDDLDNLLAQIGDQYADLFLAAKNLSDAILLSDILRVNTEITKAPLSASMIKRYDEHHQDLTLLKALVRQQLPEKYKEIFFDQSKNGYAGYIDGGASQEEFYKFIKPILEKMDGTEELLVKLNREDLLRKQRTFDNGSIPHQIHLGELHAILRRQEDFYPFLKDNREKIEKILTFRIPYYVGPLARGNSRFAWMTRKSEETITPWNFEEVVDKGASAQSFIERMTNFDKNLPNEKVLPKHSLLYEYFTVYNELTKVKYVTEGMRKPAFLSGEQKKAIVDLLFKTNRKVTVKQLKEDYFKKIECFDSVEISGVEDRFNASLGTYHDLLKIIKDKDFLDNEENEDILEDIVLTLTLFEDREMIEERLKTYAHLFDDKVMKQLKRRRYTGWGRLSRKLINGIRDKQSGKTILDFLKSDGFANRNFMQLIHDDSLTFKEDIQKAQVSGQGDSLHEHIANLAGSPAIKKGILQTVKVVDELVKVMGRHKPENIVIEMARENQTTQKGQKNSRERMKRIEEGIKELGSQILKEHPVENTQLQNEKLYLYYLQNGRDMYVDQELDINRLSDYDVDHIVPQSFLKDDSIDNKVLTRSDKARGKSDNVPSEEVVKKMKNYWRQLLNAKLITQRKFDNLTKAERGGLSELDKAGFIKRQLVETRQITKHVAQILDSRMNTKYDENDKLIREVKVITLKSKLVSDFRKDFQFYKVREINNYHHAHDAYLNAVVGTALIKKYPKLESEFVYGDYKVYDVRKMIAKSEQEIGKATAKYFFYSNIMNFFKTEITLANGEIRKRPLIETNGETGEIVWDKGRDFATVRKVLSMPQVNIVKKTEVQTGGFSKESILPKRNSDKLIARKKDWDPKKYGGFDSPTVAYSVLVVAKVEKGKSKKLKSVKELLGITIMERSSFEKNPIDFLEAKGYKEVKKDLIIKLPKYSLFELENGRKRMLASAGELQKGNELALPSKYVNFLYLASHYEKLKGSPEDNEQKQLFVEQHKHYLDEIIEQISEFSKRVILADANLDKVLSAYNKHRDKPIREQAENIIHLFTLTNLGAPAAFKYFDTTIDRKRYTSTKEVLDATLIHQSITGLYETRIDLSQLGGDGGGGGEAAAKPAPGGTAPLEEEYRLFLEAPIQNVTLLEQWKREIPKVWAEINPPGLASTQAPIHVQLLSTALPVRVRQYPITLEAKRSLRETIRKFRAAGILRPVHSPWNTPLLPVRKSGTSEYRMVQDLREVNKRVETIHPTVPNPYTLLSLLPPDRIWYSVLDLKDAFFCIPLAPESQLIFAFEWADAEEGESGQLTWTRLPQGFKNSPTLFNEALNRDLQGFRLDHPSVSLLQYVDDLLIAADTQAACLSATRDLLMTLAELGYRVSGKKAQLCQEEVTYLGFKIHKGSRSLSNSRTQAILQIPVPKTKRQVREFLGKIGYCRLFIPGFAELAQPLYAATRPGNDPLVWGEKEEEAFQSLKLALTQPPALALPSLDKPFQLFVEETSGAAKGVLTQALGPWKRPVAYLSKRLDPVAAGWPRCLRAIAAAALLTREASKLTFGQDIEITSSHNLESLLRSPPDKWLTNARITQYQVLLLDPPRVRFKQTAALNPATLLPETDDTLPIHHCLDTLDSLTSTRPDLTDQPLAQAEATLFTDGSSYIRDGKRYAGAAVVTLDSVIWAEPLPIGTSAQKAELIALTKALEWSKDKSVNIYTDSRYAFATLHVHGMIYRERGWLTAGGKAIKNAPEILALLTAVWLPKRVAVMHCKGHQKDDAPTSTGNRRADEVAREVAIRPLSTQATISAGKRTADGSEFEKRTADGSEFESPKKKAKVE

SEQ ID NO: 1385 - protein, 2096 aa, synthetic construct
MPAAKRVKLDGGDKKYSIGLDIGTNSVGWAVITDEYKVPSKKFKVLGNTDRHSIKKNLIGALLFDSGETAEATRLKRTARRRYTRRKNRICYLQEIFSNEMAKVDDSFFHRLEESFLVEEDKKHERHPIFGNIVDEVAYHEKYPTIYHLRKKLVDSTDKADLRLIYLALAHMIKFRGHFLIEGDLNPDNSDVDKLFIQLVQTYNQLFEENPINASGVDAKAILSARLSKSRRLENLIAQLPGEKKNGLFGNLIALSLGLTPNFKSNFDLAEDAKLQLSKDTYDDDLDNLLAQIGDQYADLFLAAKNLSDAILLSDILRVNTEITKAPLSASMIKRYDEHHQDLTLLKALVRQQLPEKYKEIFFDQSKNGYAGYIDGGASQEEFYKFIKPILEKMDGTEELLVKLNREDLLRKQRTFDNGSIPHQIHLGELHAILRRQEDFYPFLKDNREKIEKILTFRIPYYVGPLARGNSRFAWMTRKSEETITPWNFEEVVDKGASAQSFIERMTNFDKNLPNEKVLPKHSLLYEYFTVYNELTKVKYVTEGMRKPAFLSGEQKKAIVDLLFKTNRKVTVKQLKEDYFKKIECFDSVEISGVEDRFNASLGTYHDLLKIIKDKDFLDNEENEDILEDIVLTLTLFEDREMIEERLKTYAHLFDDKVMKQLKRRRYTGWGRLSRKLINGIRDKQSGKTILDFLKSDGFANRNFMQLIHDDSLTFKEDIQKAQVSGQGDSLHEHIANLAGSPAIKKGILQTVKVVDELVKVMGRHKPENIVIEMARENQTTQKGQKNSRERMKRIEEGIKELGSQILKEHPVENTQLQNEKLYLYYLQNGRDMYVDQELDINRLSDYDVDHIVPQSFLKDDSIDNKVLTRSDKARGKSDNVPSEEVVKKMKNYWRQLLNAKLITQRKFDNLTKAERGGLSELDKAGFIKRQLVETRQITKHVAQILDSRMNTKYDENDKLIREVKVITLKSKLVSDFRKDFQFYKVREINNYHHAHDAYLNAVVGTALIKKYPKLESEFVYGDYKVYDVRKMIAKSEQEIGKATAKYFFYSNIMNFFKTEITLANGEIRKRPLIETNGETGEIVWDKGRDFATVRKVLSMPQVNIVKKTEVQTGGFSKESILPKRNSDKLIARKKDWDPKKYGGFDSPTVAYSVLVVAKVEKGKSKKLKSVKELLGITIMERSSFEKNPIDFLEAKGYKEVKKDLIIKLPKYSLFELENGRKRMLASAGELQKGNELALPSKYVNFLYLASHYEKLKGSPEDNEQKQLFVEQHKHYLDEIIEQISEFSKRVILADANLDKVLSAYNKHRDKPIREQAENIIHLFTLTNLGAPAAFKYFDTTIDRKRYTSTKEVLDATLIHQSITGLYETRIDLSQLGGDGGPAPGGSGSSGGTAPLEEEYRLFLEAPIQNVTLLEQWKREIPKVWAEINPPGLASTQAPIHVQLLSTALPVRVRQYPITLEAKRSLRETIRKFRAAGILRPVHSPWNTPLLPVRKSGTSEYRMVQDLREVNKRVETIHPTVPNPYTLLSLLPPDRIWYSVLDLKDAFFCIPLAPESQLIFAFEWADAEEGESGQLTWTRLPQGFKNSPTLFNEALNRDLQGFRLDHPSVSLLQYVDDLLIAADTQAACLSATRDLLMTLAELGYRVSGKKAQLCQEEVTYLGFKIHKGSRSLSNSRTQAILQIPVPKTKRQVREFLGKIGYCRLFIPGFAELAQPLYAATRPGNDPLVWGEKEEEAFQSLKLALTQPPALALPSLDKPFQLFVEETSGAAKGVLTQALGPWKRPVAYLSKRLDPVAAGWPRCLRAIAAAALLTREASKLTFGQDIEITSSHNLESLLRSPPDKWLTNARITQYQVLLLDPPRVRFKQTAALNPATLLPETDDTLPIHHCLDTLDSLTSTRPDLTDQPLAQAEATLFTDGSSYIRDGKRYAGAAVVTLDSVIWAEPLPIGTSAQKAELIALTKALEWSKDKSVNIYTDSRYAFATLHVHGMIYRERGWLTAGGKAIKNAPEILALLTAVWLPKRVAVMHCKGHQKDDAPTSTGNRRADEVAREVAIRPLSTQATISAGKRTADGSEFEKRTADGSEFESPKKKAKVE

SEQ ID NO: 1386 - protein, 2099 aa, synthetic construct
MPAAKRVKLDGGDKKYSIGLDIGTNSVGWAVITDEYKVPSKKFKVLGNTDRHSIKKNLIGALLFDSGETAEATRLKRTARRRYTRRKNRICYLQEIFSNEMAKVDDSFFHRLEESFLVEEDKKHERHPIFGNIVDEVAYHEKYPTIYHLRKKLVDSTDKADLRLIYLALAHMIKFRGHFLIEGDLNPDNSDVDKLFIQLVQTYNQLFEENPINASGVDAKAILSARLSKSRRLENLIAQLPGEKKNGLFGNLIALSLGLTPNFKSNFDLAEDAKLQLSKDTYDDDLDNLLAQIGDQYADLFLAAKNLSDAILLSDILRVNTEITKAPLSASMIKRYDEHHQDLTLLKALVRQQLPEKYKEIFFDQSKNGYAGYIDGGASQEEFYKFIKPILEKMDGTEELLVKLNREDLLRKQRTFDNGSIPHQIHLGELHAILRRQEDFYPFLKDNREKIEKILTFRIPYYVGPLARGNSRFAWMTRKSEETITPWNFEEVVDKGASAQSFIERMTNFDKNLPNEKVLPKHSLLYEYFTVYNELTKVKYVTEGMRKPAFLSGEQKKAIVDLLFKTNRKVTVKQLKEDYFKKIECFDSVEISGVEDRFNASLGTYHDLLKIIKDKDFLDNEENEDILEDIVLTLTLFEDREMIEERLKTYAHLFDDKVMKQLKRRRYTGWGRLSRKLINGIRDKQSGKTILDFLKSDGFANRNFMQLIHDDSLTFKEDIQKAQVSGQGDSLHEHIANLAGSPAIKKGILQTVKVVDELVKVMGRHKPENIVIEMARENQTTQKGQKNSRERMKRIEEGIKELGSQILKEHPVENTQLQNEKLYLYYLQNGRDMYVDQELDINRLSDYDVDHIVPQSFLKDDSIDNKVLTRSDKARGKSDNVPSEEVVKKMKNYWRQLLNAKLITQRKFDNLTKAERGGLSELDKAGFIKRQLVETRQITKHVAQILDSRMNTKYDENDKLIREVKVITLKSKLVSDFRKDFQFYKVREINNYHHAHDAYLNAVVGTALIKKYPKLESEFVYGDYKVYDVRKMIAKSEQEIGKATAKYFFYSNIMNFFKTEITLANGEIRKRPLIETNGETGEIVWDKGRDFATVRKVLSMPQVNIVKKTEVQTGGFSKESILPKRNSDKLIARKKDWDPKKYGGFDSPTVAYSVLVVAKVEKGKSKKLKSVKELLGITIMERSSFEKNPIDFLEAKGYKEVKKDLIIKLPKYSLFELENGRKRMLASAGELQKGNELALPSKYVNFLYLASHYEKLKGSPEDNEQKQLFVEQHKHYLDEIIEQISEFSKRVILADANLDKVLSAYNKHRDKPIREQAENIIHLFTLTNLGAPAAFKYFDTTIDRKRYTSTKEVLDATLIHQSITGLYETRIDLSQLGGDGGGSSGSSGSSGSSGGTAPLEEEYRLFLEAPIQNVTLLEQWKREIPKVWAEINPPGLASTQAPIHVQLLSTALPVRVRQYPITLEAKRSLRETIRKFRAAGILRPVHSPWNTPLLPVRKSGTSEYRMVQDLREVNKRVETIHPTVPNPYTLLSLLPPDRIWYSVLDLKDAFFCIPLAPESQLIFAFEWADAEEGESGQLTWTRLPQGFKNSPTLFNEALNRDLQGFRLDHPSVSLLQYVDDLLIAADTQAACLSATRDLLMTLAELGYRVSGKKAQLCQEEVTYLGFKIHKGSRSLSNSRTQAILQIPVPKTKRQVREFLGKIGYCRLFIPGFAELAQPLYAATRPGNDPLVWGEKEEEAFQSLKLALTQPPALALPSLDKPFQLFVEETSGAAKGVLTQALGPWKRPVAYLSKRLDPVAAGWPRCLRAIAAAALLTREASKLTFGQDIEITSSHNLESLLRSPPDKWLTNARITQYQVLLLDPPRVRFKQTAALNPATLLPETDDTLPIHHCLDTLDSLTSTRPDLTDQPLAQAEATLFTDGSSYIRDGKRYAGAAVVTLDSVIWAEPLPIGTSAQKAELIALTKALEWSKDKSVNIYTDSRYAFATLHVHGMIYRERGWLTAGGKAIKNAPEILALLTAVWLPKRVAVMHCKGHQKDDAPTSTGNRRADEVAREVAIRPLSTQATISAGKRTADGSEFEKRTADGSEFESPKKKAKVE

SEQ ID NO: 1387 - protein, 2098 aa, synthetic construct
MPAAKRVKLDGGDKKYSIGLDIGTNSVGWAVITDEYKVPSKKFKVLGNTDRHSIKKNLIGALLFDSGETAEATRLKRTARRRYTRRKNRICYLQEIFSNEMAKVDDSFFHRLEESFLVEEDKKHERHPIFGNIVDEVAYHEKYPTIYHLRKKLVDSTDKADLRLIYLALAHMIKFRGHFLIEGDLNPDNSDVDKLFIQLVQTYNQLFEENPINASGVDAKAILSARLSKSRRLENLIAQLPGEKKNGLFGNLIALSLGLTPNFKSNFDLAEDAKLQLSKDTYDDDLDNLLAQIGDQYADLFLAAKNLSDAILLSDILRVNTEITKAPLSASMIKRYDEHHQDLTLLKALVRQQLPEKYKEIFFDQSKNGYAGYIDGGASQEEFYKFIKPILEKMDGTEELLVKLNREDLLRKQRTFDNGSIPHQIHLGELHAILRRQEDFYPFLKDNREKIEKILTFRIPYYVGPLARGNSRFAWMTRKSEETITPWNFEEVVDKGASAQSFIERMTNFDKNLPNEKVLPKHSLLYEYFTVYNELTKVKYVTEGMRKPAFLSGEQKKAIVDLLFKTNRKVTVKQLKEDYFKKIECFDSVEISGVEDRFNASLGTYHDLLKIIKDKDFLDNEENEDILEDIVLTLTLFEDREMIEERLKTYAHLFDDKVMKQLKRRRYTGWGRLSRKLINGIRDKQSGKTILDFLKSDGFANRNFMQLIHDDSLTFKEDIQKAQVSGQGDSLHEHIANLAGSPAIKKGILQTVKVVDELVKVMGRHKPENIVIEMARENQTTQKGQKNSRERMKRIEEGIKELGSQILKEHPVENTQLQNEKLYLYYLQNGRDMYVDQELDINRLSDYDVDHIVPQSFLKDDSIDNKVLTRSDKARGKSDNVPSEEVVKKMKNYWRQLLNAKLITQRKFDNLTKAERGGLSELDKAGFIKRQLVETRQITKHVAQILDSRMNTKYDENDKLIREVKVITLKSKLVSDFRKDFQFYKVREINNYHHAHDAYLNAVVGTALIKKYPKLESEFVYGDYKVYDVRKMIAKSEQEIGKATAKYFFYSNIMNFFKTEITLANGEIRKRPLIETNGETGEIVWDKGRDFATVRKVLSMPQVNIVKKTEVQTGGFSKESILPKRNSDKLIARKKDWDPKKYGGFDSPTVAYSVLVVAKVEKGKSKKLKSVKELLGITIMERSSFEKNPIDFLEAKGYKEVKKDLIIKLPKYSLFELENGRKRMLASAGELQKGNELALPSKYVNFLYLASHYEKLKGSPEDNEQKQLFVEQHKHYLDEIIEQISEFSKRVILADANLDKVLSAYNKHRDKPIREQAENIIHLFTLTNLGAPAAFKYFDTTIDRKRYTSTKEVLDATLIHQSITGLYETRIDLSQLGGDGGPAPEAAAKGGGGGTAPLEEEYRLFLEAPIQNVTLLEQWKREIPKVWAEINPPGLASTQAPIHVQLLSTALPVRVRQYPITLEAKRSLRETIRKFRAAGILRPVHSPWNTPLLPVRKSGTSEYRMVQDLREVNKRVETIHPTVPNPYTLLSLLPPDRIWYSVLDLKDAFFCIPLAPESQLIFAFEWADAEEGESGQLTWTRLPQGFKNSPTLFNEALNRDLQGFRLDHPSVSLLQYVDDLLIAADTQAACLSATRDLLMTLAELGYRVSGKKAQLCQEEVTYLGFKIHKGSRSLSNSRTQAILQIPVPKTKRQVREFLGKIGYCRLFIPGFAELAQPLYAATRPGNDPLVWGEKEEEAFQSLKLALTQPPALALPSLDKPFQLFVEETSGAAKGVLTQALGPWKRPVAYLSKRLDPVAAGWPRCLRAIAAAALLTREASKLTFGQDIEITSSHNLESLLRSPPDKWLTNARITQYQVLLLDPPRVRFKQTAALNPATLLPETDDTLPIHHCLDTLDSLTSTRPDLTDQPLAQAEATLFTDGSSYIRDGKRYAGAAVVTLDSVIWAEPLPIGTSAQKAELIALTKALEWSKDKSVNIYTDSRYAFATLHVHGMIYRERGWLTAGGKAIKNAPEILALLTAVWLPKRVAVMHCKGHQKDDAPTSTGNRRADEVAREVAIRPLSTQATISAGKRTADGSEFEKRTADGSEFESPKKKAKVE

SEQ ID NO: 1388 - protein, 2098 aa, synthetic construct
MPAAKRVKLDGGDKKYSIGLDIGTNSVGWAVITDEYKVPSKKFKVLGNTDRHSIKKNLIGALLFDSGETAEATRLKRTARRRYTRRKNRICYLQEIFSNEMAKVDDSFFHRLEESFLVEEDKKHERHPIFGNIVDEVAYHEKYPTIYHLRKKLVDSTDKADLRLIYLALAHMIKFRGHFLIEGDLNPDNSDVDKLFIQLVQTYNQLFEENPINASGVDAKAILSARLSKSRRLENLIAQLPGEKKNGLFGNLIALSLGLTPNFKSNFDLAEDAKLQLSKDTYDDDLDNLLAQIGDQYADLFLAAKNLSDAILLSDILRVNTEITKAPLSASMIKRYDEHHQDLTLLKALVRQQLPEKYKEIFFDQSKNGYAGYIDGGASQEEFYKFIKPILEKMDGTEELLVKLNREDLLRKQRTFDNGSIPHQIHLGELHAILRRQEDFYPFLKDNREKIEKILTFRIPYYVGPLARGNSRFAWMTRKSEETITPWNFEEVVDKGASAQSFIERMTNFDKNLPNEKVLPKHSLLYEYFTVYNELTKVKYVTEGMRKPAFLSGEQKKAIVDLLFKTNRKVTVKQLKEDYFKKIECFDSVEISGVEDRFNASLGTYHDLLKIIKDKDFLDNEENEDILEDIVLTLTLFEDREMIEERLKTYAHLFDDKVMKQLKRRRYTGWGRLSRKLINGIRDKQSGKTILDFLKSDGFANRNFMQLIHDDSLTFKEDIQKAQVSGQGDSLHEHIANLAGSPAIKKGILQTVKVVDELVKVMGRHKPENIVIEMARENQTTQKGQKNSRERMKRIEEGIKELGSQILKEHPVENTQLQNEKLYLYYLQNGRDMYVDQELDINRLSDYDVDHIVPQSFLKDDSIDNKVLTRSDKARGKSDNVPSEEVVKKMKNYWRQLLNAKLITQRKFDNLTKAERGGLSELDKAGFIKRQLVETRQITKHVAQILDSRMNTKYDENDKLIREVKVITLKSKLVSDFRKDFQFYKVREINNYHHAHDAYLNAVVGTALIKKYPKLESEFVYGDYKVYDVRKMIAKSEQEIGKATAKYFFYSNIMNFFKTEITLANGEIRKRPLIETNGETGEIVWDKGRDFATVRKVLSMPQVNIVKKTEVQTGGFSKESILPKRNSDKLIARKKDWDPKKYGGFDSPTVAYSVLVVAKVEKGKSKKLKSVKELLGITIMERSSFEKNPIDFLEAKGYKEVKKDLIIKLPKYSLFELENGRKRMLASAGELQKGNELALPSKYVNFLYLASHYEKLKGSPEDNEQKQLFVEQHKHYLDEIIEQISEFSKRVILADANLDKVLSAYNKHRDKPIREQAENIIHLFTLTNLGAPAAFKYFDTTIDRKRYTSTKEVLDATLIHQSITGLYETRIDLSQLGGDGGPAPEAAAKGSSGGTAPLEEEYRLFLEAPIQNVTLLEQWKREIPKVWAEINPPGLASTQAPIHVQLLSTALPVRVRQYPITLEAKRSLRETIRKFRAAGILRPVHSPWNTPLLPVRKSGTSEYRMVQDLREVNKRVETIHPTVPNPYTLLSLLPPDRIWYSVLDLKDAFFCIPLAPESQLIFAFEWADAEEGESGQLTWTRLPQGFKNSPTLFNEALNRDLQGFRLDHPSVSLLQYVDDLLIAADTQAACLSATRDLLMTLAELGYRVSGKKAQLCQEEVTYLGFKIHKGSRSLSNSRTQAILQIPVPKTKRQVREFLGKIGYCRLFIPGFAELAQPLYAATRPGNDPLVWGEKEEEAFQSLKLALTQPPALALPSLDKPFQLFVEETSGAAKGVLTQALGPWKRPVAYLSKRLDPVAAGWPRCLRAIAAAALLTREASKLTFGQDIEITSSHNLESLLRSPPDKWLTNARITQYQVLLLDPPRVRFKQTAALNPATLLPETDDTLPIHHCLDTLDSLTSTRPDLTDQPLAQAEATLFTDGSSYIRDGKRYAGAAVVTLDSVIWAEPLPIGTSAQKAELIALTKALEWSKDKSVNIYTDSRYAFATLHVHGMIYRERGWLTAGGKAIKNAPEILALLTAVWLPKRVAVMHCKGHQKDDAPTSTGNRRADEVAREVAIRPLSTQATISAGKRTADGSEFEKRTADGSEFESPKKKAKVE

SEQ ID NO: 1389 - protein, 2090 aa, synthetic construct
MPAAKRVKLDGGDKKYSIGLDIGTNSVGWAVITDEYKVPSKKFKVLGNTDRHSIKKNLIGALLFDSGETAEATRLKRTARRRYTRRKNRICYLQEIFSNEMAKVDDSFFHRLEESFLVEEDKKHERHPIFGNIVDEVAYHEKYPTIYHLRKKLVDSTDKADLRLIYLALAHMIKFRGHFLIEGDLNPDNSDVDKLFIQLVQTYNQLFEENPINASGVDAKAILSARLSKSRRLENLIAQLPGEKKNGLFGNLIALSLGLTPNFKSNFDLAEDAKLQLSKDTYDDDLDNLLAQIGDQYADLFLAAKNLSDAILLSDILRVNTEITKAPLSASMIKRYDEHHQDLTLLKALVRQQLPEKYKEIFFDQSKNGYAGYIDGGASQEEFYKFIKPILEKMDGTEELLVKLNREDLLRKQRTFDNGSIPHQIHLGELHAILRRQEDFYPFLKDNREKIEKILTFRIPYYVGPLARGNSRFAWMTRKSEETITPWNFEEVVDKGASAQSFIERMTNFDKNLPNEKVLPKHSLLYEYFTVYNELTKVKYVTEGMRKPAFLSGEQKKAIVDLLFKTNRKVTVKQLKEDYFKKIECFDSVEISGVEDRFNASLGTYHDLLKIIKDKDFLDNEENEDILEDIVLTLTLFEDREMIEERLKTYAHLFDDKVMKQLKRRRYTGWGRLSRKLINGIRDKQSGKTILDFLKSDGFANRNFMQLIHDDSLTFKEDIQKAQVSGQGDSLHEHIANLAGSPAIKKGILQTVKVVDELVKVMGRHKPENIVIEMARENQTTQKGQKNSRERMKRIEEGIKELGSQILKEHPVENTQLQNEKLYLYYLQNGRDMYVDQELDINRLSDYDVDHIVPQSFLKDDSIDNKVLTRSDKARGKSDNVPSEEVVKKMKNYWRQLLNAKLITQRKFDNLTKAERGGLSELDKAGFIKRQLVETRQITKHVAQILDSRMNTKYDENDKLIREVKVITLKSKLVSDFRKDFQFYKVREINNYHHAHDAYLNAVVGTALIKKYPKLESEFVYGDYKVYDVRKMIAKSEQEIGKATAKYFFYSNIMNFFKTEITLANGEIRKRPLIETNGETGEIVWDKGRDFATVRKVLSMPQVNIVKKTEVQTGGFSKESILPKRNSDKLIARKKDWDPKKYGGFDSPTVAYSVLVVAKVEKGKSKKLKSVKELLGITIMERSSFEKNPIDFLEAKGYKEVKKDLIIKLPKYSLFELENGRKRMLASAGELQKGNELALPSKYVNFLYLASHYEKLKGSPEDNEQKQLFVEQHKHYLDEIIEQISEFSKRVILADANLDKVLSAYNKHRDKPIREQAENIIHLFTLTNLGAPAAFKYFDTTIDRKRYTSTKEVLDATLIHQSITGLYETRIDLSQLGGDGGGGGGGTAPLEEEYRLFLEAPIQNVTLLEQWKREIPKVWAEINPPGLASTQAPIHVQLLSTALPVRVRQYPITLEAKRSLRETIRKFRAAGILRPVHSPWNTPLLPVRKSGTSEYRMVQDLREVNKRVETIHPTVPNPYTLLSLLPPDRIWYSVLDLKDAFFCIPLAPESQLIFAFEWADAEEGESGQLTWTRLPQGFKNSPTLFNEALNRDLQGFRLDHPSVSLLQYVDDLLIAADTQAACLSATRDLLMTLAELGYRVSGKKAQLCQEEVTYLGFKIHKGSRSLSNSRTQAILQIPVPKTKRQVREFLGKIGYCRLFIPGFAELAQPLYAATRPGNDPLVWGEKEEEAFQSLKLALTQPPALALPSLDKPFQLFVEETSGAAKGVLTQALGPWKRPVAYLSKRLDPVAAGWPRCLRAIAAAALLTREASKLTFGQDIEITSSHNLESLLRSPPDKWLTNARITQYQVLLLDPPRVRFKQTAALNPATLLPETDDTLPIHHCLDTLDSLTSTRPDLTDQPLAQAEATLFTDGSSYIRDGKRYAGAAVVTLDSVIWAEPLPIGTSAQKAELIALTKALEWSKDKSVNIYTDSRYAFATLHVHGMIYRERGWLTAGGKAIKNAPEILALLTAVWLPKRVAVMHCKGHQKDDAPTSTGNRRADEVAREVAIRPLSTQATISAGKRTADGSEFEKRTADGSEFESPKKKAKVE

SEQ ID NO: 1390 - protein, 2098 aa, synthetic construct
MPAAKRVKLDGGDKKYSIGLDIGTNSVGWAVITDEYKVPSKKFKVLGNTDRHSIKKNLIGALLFDSGETAEATRLKRTARRRYTRRKNRICYLQEIFSNEMAKVDDSFFHRLEESFLVEEDKKHERHPIFGNIVDEVAYHEKYPTIYHLRKKLVDSTDKADLRLIYLALAHMIKFRGHFLIEGDLNPDNSDVDKLFIQLVQTYNQLFEENPINASGVDAKAILSARLSKSRRLENLIAQLPGEKKNGLFGNLIALSLGLTPNFKSNFDLAEDAKLQLSKDTYDDDLDNLLAQIGDQYADLFLAAKNLSDAILLSDILRVNTEITKAPLSASMIKRYDEHHQDLTLLKALVRQQLPEKYKEIFFDQSKNGYAGYIDGGASQEEFYKFIKPILEKMDGTEELLVKLNREDLLRKQRTFDNGSIPHQIHLGELHAILRRQEDFYPFLKDNREKIEKILTFRIPYYVGPLARGNSRFAWMTRKSEETITPWNFEEVVDKGASAQSFIERMTNFDKNLPNEKVLPKHSLLYEYFTVYNELTKVKYVTEGMRKPAFLSGEQKKAIVDLLFKTNRKVTVKQLKEDYFKKIECFDSVEISGVEDRFNASLGTYHDLLKIIKDKDFLDNEENEDILEDIVLTLTLFEDREMIEERLKTYAHLFDDKVMKQLKRRRYTGWGRLSRKLINGIRDKQSGKTILDFLKSDGFANRNFMQLIHDDSLTFKEDIQKAQVSGQGDSLHEHIANLAGSPAIKKGILQTVKVVDELVKVMGRHKPENIVIEMARENQTTQKGQKNSRERMKRIEEGIKELGSQILKEHPVENTQLQNEKLYLYYLQNGRDMYVDQELDINRLSDYDVDHIVPQSFLKDDSIDNKVLTRSDKARGKSDNVPSEEVVKKMKNYWRQLLNAKLITQRKFDNLTKAERGGLSELDKAGFIKRQLVETRQITKHVAQILDSRMNTKYDENDKLIREVKVITLKSKLVSDFRKDFQFYKVREINNYHHAHDAYLNAVVGTALIKKYPKLESEFVYGDYKVYDVRKMIAKSEQEIGKATAKYFFYSNIMNFFKTEITLANGEIRKRPLIETNGETGEIVWDKGRDFATVRKVLSMPQVNIVKKTEVQTGGFSKESILPKRNSDKLIARKKDWDPKKYGGFDSPTVAYSVLVVAKVEKGKSKKLKSVKELLGITIMERSSFEKNPIDFLEAKGYKEVKKDLIIKLPKYSLFELENGRKRMLASAGELQKGNELALPSKYVNFLYLASHYEKLKGSPEDNEQKQLFVEQHKHYLDEIIEQISEFSKRVILADANLDKVLSAYNKHRDKPIREQAENIIHLFTLTNLGAPAAFKYFDTTIDRKRYTSTKEVLDATLIHQSITGLYETRIDLSQLGGDGGEAAAKGGGGGSGGTAPLEEEYRLFLEAPIQNVTLLEQWKREIPKVWAEINPPGLASTQAPIHVQLLSTALPVRVRQYPITLEAKRSLRETIRKFRAAGILRPVHSPWNTPLLPVRKSGTSEYRMVQDLREVNKRVETIHPTVPNPYTLLSLLPPDRIWYSVLDLKDAFFCIPLAPESQLIFAFEWADAEEGESGQLTWTRLPQGFKNSPTLFNEALNRDLQGFRLDHPSVSLLQYVDDLLIAADTQAACLSATRDLLMTLAELGYRVSGKKAQLCQEEVTYLGFKIHKGSRSLSNSRTQAILQIPVPKTKRQVREFLGKIGYCRLFIPGFAELAQPLYAATRPGNDPLVWGEKEEEAFQSLKLALTQPPALALPSLDKPFQLFVEETSGAAKGVLTQALGPWKRPVAYLSKRLDPVAAGWPRCLRAIAAAALLTREASKLTFGQDIEITSSHNLESLLRSPPDKWLTNARITQYQVLLLDPPRVRFKQTAALNPATLLPETDDTLPIHHCLDTLDSLTSTRPDLTDQPLAQAEATLFTDGSSYIRDGKRYAGAAVVTLDSVIWAEPLPIGTSAQKAELIALTKALEWSKDKSVNIYTDSRYAFATLHVHGMIYRERGWLTAGGKAIKNAPEILALLTAVWLPKRVAVMHCKGHQKDDAPTSTGNRRADEVAREVAIRPLSTQATISAGKRTADGSEFEKRTADGSEFESPKKKAKVE

SEQ ID NO: 1391 - protein, 2093 aa, synthetic construct
MPAAKRVKLDGGDKKYSIGLDIGTNSVGWAVITDEYKVPSKKFKVLGNTDRHSIKKNLIGALLFDSGETAEATRLKRTARRRYTRRKNRICYLQEIFSNEMAKVDDSFFHRLEESFLVEEDKKHERHPIFGNIVDEVAYHEKYPTIYHLRKKLVDSTDKADLRLIYLALAHMIKFRGHFLIEGDLNPDNSDVDKLFIQLVQTYNQLFEENPINASGVDAKAILSARLSKSRRLENLIAQLPGEKKNGLFGNLIALSLGLTPNFKSNFDLAEDAKLQLSKDTYDDDLDNLLAQIGDQYADLFLAAKNLSDAILLSDILRVNTEITKAPLSASMIKRYDEHHQDLTLLKALVRQQLPEKYKEIFFDQSKNGYAGYIDGGASQEEFYKFIKPILEKMDGTEELLVKLNREDLLRKQRTFDNGSIPHQIHLGELHAILRRQEDFYPFLKDNREKIEKILTFRIPYYVGPLARGNSRFAWMTRKSEETITPWNFEEVVDKGASAQSFIERMTNFDKNLPNEKVLPKHSLLYEYFTVYNELTKVKYVTEGMRKPAFLSGEQKKAIVDLLFKTNRKVTVKQLKEDYFKKIECFDSVEISGVEDRFNASLGTYHDLLKIIKDKDFLDNEENEDILEDIVLTLTLFEDREMIEERLKTYAHLFDDKVMKQLKRRRYTGWGRLSRKLINGIRDKQSGKTILDFLKSDGFANRNFMQLIHDDSLTFKEDIQKAQVSGQGDSLHEHIANLAGSPAIKKGILQTVKVVDELVKVMGRHKPENIVIEMARENQTTQKGQKNSRERMKRIEEGIKELGSQILKEHPVENTQLQNEKLYLYYLQNGRDMYVDQELDINRLSDYDVDHIVPQSFLKDDSIDNKVLTRSDKARGKSDNVPSEEVVKKMKNYWRQLLNAKLITQRKFDNLTKAERGGLSELDKAGFIKRQLVETRQITKHVAQILDSRMNTKYDENDKLIREVKVITLKSKLVSDFRKDFQFYKVREINNYHHAHDAYLNAVVGTALIKKYPKLESEFVYGDYKVYDVRKMIAKSEQEIGKATAKYFFYSNIMNFFKTEITLANGEIRKRPLIETNGETGEIVWDKGRDFATVRKVLSMPQVNIVKKTEVQTGGFSKESILPKRNSDKLIARKKDWDPKKYGGFDSPTVAYSVLVVAKVEKGKSKKLKSVKELLGITIMERSSFEKNPIDFLEAKGYKEVKKDLIIKLPKYSLFELENGRKRMLASAGELQKGNELALPSKYVNFLYLASHYEKLKGSPEDNEQKQLFVEQHKHYLDEIIEQISEFSKRVILADANLDKVLSAYNKHRDKPIREQAENIIHLFTLTNLGAPAAFKYFDTTIDRKRYTSTKEVLDATLIHQSITGLYETRIDLSQLGGDGGGGSGGGGGTAPLEEEYRLFLEAPIQNVTLLEQWKREIPKVWAEINPPGLASTQAPIHVQLLSTALPVRVRQYPITLEAKRSLRETIRKFRAAGILRPVHSPWNTPLLPVRKSGTSEYRMVQDLREVNKRVETIHPTVPNPYTLLSLLPPDRIWYSVLDLKDAFFCIPLAPESQLIFAFEWADAEEGESGQLTWTRLPQGFKNSPTLFNEALNRDLQGFRLDHPSVSLLQYVDDLLIAADTQAACLSATRDLLMTLAELGYRVSGKKAQLCQEEVTYLGFKIHKGSRSLSNSRTQAILQIPVPKTKRQVREFLGKIGYCRLFIPGFAELAQPLYAATRPGNDPLVWGEKEEEAFQSLKLALTQPPALALPSLDKPFQLFVEETSGAAKGVLTQALGPWKRPVAYLSKRLDPVAAGWPRCLRAIAAAALLTREASKLTFGQDIEITSSHNLESLLRSPPDKWLTNARITQYQVLLLDPPRVRFKQTAALNPATLLPETDDTLPIHHCLDTLDSLTSTRPDLTDQPLAQAEATLFTDGSSYIRDGKRYAGAAVVTLDSVIWAEPLPIGTSAQKAELIALTKALEWSKDKSVNIYTDSRYAFATLHVHGMIYRERGWLTAGGKAIKNAPEILALLTAVWLPKRVAVMHCKGHQKDDAPTSTGNRRADEVAREVAIRPLSTQATISAGKRTADGSEFEKRTADGSEFESPKKKAKVE

SEQ ID NO: 1392 - protein, 2093 aa, synthetic construct
MPAAKRVKLDGGDKKYSIGLDIGTNSVGWAVITDEYKVPSKKFKVLGNTDRHSIKKNLIGALLFDSGETAEATRLKRTARRRYTRRKNRICYLQEIFSNEMAKVDDSFFHRLEESFLVEEDKKHERHPIFGNIVDEVAYHEKYPTIYHLRKKLVDSTDKADLRLIYLALAHMIKFRGHFLIEGDLNPDNSDVDKLFIQLVQTYNQLFEENPINASGVDAKAILSARLSKSRRLENLIAQLPGEKKNGLFGNLIALSLGLTPNFKSNFDLAEDAKLQLSKDTYDDDLDNLLAQIGDQYADLFLAAKNLSDAILLSDILRVNTEITKAPLSASMIKRYDEHHQDLTLLKALVRQQLPEKYKEIFFDQSKNGYAGYIDGGASQEEFYKFIKPILEKMDGTEELLVKLNREDLLRKQRTFDNGSIPHQIHLGELHAILRRQEDFYPFLKDNREKIEKILTFRIPYYVGPLARGNSRFAWMTRKSEETITPWNFEEVVDKGASAQSFIERMTNFDKNLPNEKVLPKHSLLYEYFTVYNELTKVKYVTEGMRKPAFLSGEQKKAIVDLLFKTNRKVTVKQLKEDYFKKIECFDSVEISGVEDRFNASLGTYHDLLKIIKDKDFLDNEENEDILEDIVLTLTLFEDREMIEERLKTYAHLFDDKVMKQLKRRRYTGWGRLSRKLINGIRDKQSGKTILDFLKSDGFANRNFMQLIHDDSLTFKEDIQKAQVSGQGDSLHEHIANLAGSPAIKKGILQTVKVVDELVKVMGRHKPENIVIEMARENQTTQKGQKNSRERMKRIEEGIKELGSQILKEHPVENTQLQNEKLYLYYLQNGRDMYVDQELDINRLSDYDVDHIVPQSFLKDDSIDNKVLTRSDKARGKSDNVPSEEVVKKMKNYWRQLLNAKLITQRKFDNLTKAERGGLSELDKAGFIKRQLVETRQITKHVAQILDSRMNTKYDENDKLIREVKVITLKSKLVSDFRKDFQFYKVREINNYHHAHDAYLNAVVGTALIKKYPKLESEFVYGDYKVYDVRKMIAKSEQEIGKATAKYFFYSNIMNFFKTEITLANGEIRKRPLIETNGETGEIVWDKGRDFATVRKVLSMPQVNIVKKTEVQTGGFSKESILPKRNSDKLIARKKDWDPKKYGGFDSPTVAYSVLVVAKVEKGKSKKLKSVKELLGITIMERSSFEKNPIDFLEAKGYKEVKKDLIIKLPKYSLFELENGRKRMLASAGELQKGNELALPSKYVNFLYLASHYEKLKGSPEDNEQKQLFVEQHKHYLDEIIEQISEFSKRVILADANLDKVLSAYNKHRDKPIREQAENIIHLFTLTNLGAPAAFKYFDTTIDRKRYTSTKEVLDATLIHQSITGLYETRIDLSQLGGDGGGGSPAPGGTAPLEEEYRLFLEAPIQNVTLLEQWKREIPKVWAEINPPGLASTQAPIHVQLLSTALPVRVRQYPITLEAKRSLRETIRKFRAAGILRPVHSPWNTPLLPVRKSGTSEYRMVQDLREVNKRVETIHPTVPNPYTLLSLLPPDRIWYSVLDLKDAFFCIPLAPESQLIFAFEWADAEEGESGQLTWTRLPQGFKNSPTLFNEALNRDLQGFRLDHPSVSLLQYVDDLLIAADTQAACLSATRDLLMTLAELGYRVSGKKAQLCQEEVTYLGFKIHKGSRSLSNSRTQAILQIPVPKTKRQVREFLGKIGYCRLFIPGFAELAQPLYAATRPGNDPLVWGEKEEEAFQSLKLALTQPPALALPSLDKPFQLFVEETSGAAKGVLTQALGPWKRPVAYLSKRLDPVAAGWPRCLRAIAAAALLTREASKLTFGQDIEITSSHNLESLLRSPPDKWLTNARITQYQVLLLDPPRVRFKQTAALNPATLLPETDDTLPIHHCLDTLDSLTSTRPDLTDQPLAQAEATLFTDGSSYIRDGKRYAGAAVVTLDSVIWAEPLPIGTSAQKAELIALTKALEWSKDKSVNIYTDSRYAFATLHVHGMIYRERGWLTAGGKAIKNAPEILALLTAVWLPKRVAVMHCKGHQKDDAPTSTGNRRADEVAREVAIRPLSTQATISAGKRTADGSEFEKRTADGSEFESPKKKAKVE

SEQ ID NO: 1393 - protein, 2102 aa, synthetic construct
MPAAKRVKLDGGDKKYSIGLDIGTNSVGWAVITDEYKVPSKKFKVLGNTDRHSIKKNLIGALLFDSGETAEATRLKRTARRRYTRRKNRICYLQEIFSNEMAKVDDSFFHRLEESFLVEEDKKHERHPIFGNIVDEVAYHEKYPTIYHLRKKLVDSTDKADLRLIYLALAHMIKFRGHFLIEGDLNPDNSDVDKLFIQLVQTYNQLFEENPINASGVDAKAILSARLSKSRRLENLIAQLPGEKKNGLFGNLIALSLGLTPNFKSNFDLAEDAKLQLSKDTYDDDLDNLLAQIGDQYADLFLAAKNLSDAILLSDILRVNTEITKAPLSASMIKRYDEHHQDLTLLKALVRQQLPEKYKEIFFDQSKNGYAGYIDGGASQEEFYKFIKPILEKMDGTEELLVKLNREDLLRKQRTFDNGSIPHQIHLGELHAILRRQEDFYPFLKDNREKIEKILTFRIPYYVGPLARGNSRFAWMTRKSEETITPWNFEEVVDKGASAQSFIERMTNFDKNLPNEKVLPKHSLLYEYFTVYNELTKVKYVTEGMRKPAFLSGEQKKAIVDLLFKTNRKVTVKQLKEDYFKKIECFDSVEISGVEDRFNASLGTYHDLLKIIKDKDFLDNEENEDILEDIVLTLTLFEDREMIEERLKTYAHLFDDKVMKQLKRRRYTGWGRLSRKLINGIRDKQSGKTILDFLKSDGFANRNFMQLIHDDSLTFKEDIQKAQVSGQGDSLHEHIANLAGSPAIKKGILQTVKVVDELVKVMGRHKPENIVIEMARENQTTQKGQKNSRERMKRIEEGIKELGSQILKEHPVENTQLQNEKLYLYYLQNGRDMYVDQELDINRLSDYDVDHIVPQSFLKDDSIDNKVLTRSDKARGKSDNVPSEEVVKKMKNYWRQLLNAKLITQRKFDNLTKAERGGLSELDKAGFIKRQLVETRQITKHVAQILDSRMNTKYDENDKLIREVKVITLKSKLVSDFRKDFQFYKVREINNYHHAHDAYLNAVVGTALIKKYPKLESEFVYGDYKVYDVRKMIAKSEQEIGKATAKYFFYSNIMNFFKTEITLANGEIRKRPLIETNGETGEIVWDKGRDFATVRKVLSMPQVNIVKKTEVQTGGFSKESILPKRNSDKLIARKKDWDPKKYGGFDSPTVAYSVLVVAKVEKGKSKKLKSVKELLGITIMERSSFEKNPIDFLEAKGYKEVKKDLIIKLPKYSLFELENGRKRMLASAGELQKGNELALPSKYVNFLYLASHYEKLKGSPEDNEQKQLFVEQHKHYLDEIIEQISEFSKRVILADANLDKVLSAYNKHRDKPIREQAENIIHLFTLTNLGAPAAFKYFDTTIDRKRYTSTKEVLDATLIHQSITGLYETRIDLSQLGGDGGGGGGSEAAAKGGGGSGGTAPLEEEYRLFLEAPIQNVTLLEQWKREIPKVWAEINPPGLASTQAPIHVQLLSTALPVRVRQYPITLEAKRSLRETIRKFRAAGILRPVHSPWNTPLLPVRKSGTSEYRMVQDLREVNKRVETIHPTVPNPYTLLSLLPPDRIWYSVLDLKDAFFCIPLAPESQLIFAFEWADAEEGESGQLTWTRLPQGFKNSPTLFNEALNRDLQGFRLDHPSVSLLQYVDDLLIAADTQAACLSATRDLLMTLAELGYRVSGKKAQLCQEEVTYLGFKIHKGSRSLSNSRTQAILQIPVPKTKRQVREFLGKIGYCRLFIPGFAELAQPLYAATRPGNDPLVWGEKEEEAFQSLKLALTQPPALALPSLDKPFQLFVEETSGAAKGVLTQALGPWKRPVAYLSKRLDPVAAGWPRCLRAIAAAALLTREASKLTFGQDIEITSSHNLESLLRSPPDKWLTNARITQYQVLLLDPPRVRFKQTAALNPATLLPETDDTLPIHHCLDTLDSLTSTRPDLTDQPLAQAEATLFTDGSSYIRDGKRYAGAAVVTLDSVIWAEPLPIGTSAQKAELIALTKALEWSKDKSVNIYTDSRYAFATLHVHGMIYRERGWLTAGGKAIKNAPEILALLTAVWLPKRVAVMHCKGHQKDDAPTSTGNRRADEVAREVAIRPLSTQATISAGKRTADGSEFEKRTADGSEFESPKKKAKVE

SEQ ID NO: 1394 - protein, 2098 aa, synthetic construct
MPAAKRVKLDGGDKKYSIGLDIGTNSVGWAVITDEYKVPSKKFKVLGNTDRHSIKKNLIGALLFDSGETAEATRLKRTARRRYTRRKNRICYLQEIFSNEMAKVDDSFFHRLEESFLVEEDKKHERHPIFGNIVDEVAYHEKYPTIYHLRKKLVDSTDKADLRLIYLALAHMIKFRGHFLIEGDLNPDNSDVDKLFIQLVQTYNQLFEENPINASGVDAKAILSARLSKSRRLENLIAQLPGEKKNGLFGNLIALSLGLTPNFKSNFDLAEDAKLQLSKDTYDDDLDNLLAQIGDQYADLFLAAKNLSDAILLSDILRVNTEITKAPLSASMIKRYDEHHQDLTLLKALVRQQLPEKYKEIFFDQSKNGYAGYIDGGASQEEFYKFIKPILEKMDGTEELLVKLNREDLLRKQRTFDNGSIPHQIHLGELHAILRRQEDFYPFLKDNREKIEKILTFRIPYYVGPLARGNSRFAWMTRKSEETITPWNFEEVVDKGASAQSFIERMTNFDKNLPNEKVLPKHSLLYEYFTVYNELTKVKYVTEGMRKPAFLSGEQKKAIVDLLFKTNRKVTVKQLKEDYFKKIECFDSVEISGVEDRFNASLGTYHDLLKIIKDKDFLDNEENEDILEDIVLTLTLFEDREMIEERLKTYAHLFDDKVMKQLKRRRYTGWGRLSRKLINGIRDKQSGKTILDFLKSDGFANRNFMQLIHDDSLTFKEDIQKAQVSGQGDSLHEHIANLAGSPAIKKGILQTVKVVDELVKVMGRHKPENIVIEMARENQTTQKGQKNSRERMKRIEEGIKELGSQILKEHPVENTQLQNEKLYLYYLQNGRDMYVDQELDINRLSDYDVDHIVPQSFLKDDSIDNKVLTRSDKARGKSDNVPSEEVVKKMKNYWRQLLNAKLITQRKFDNLTKAERGGLSELDKAGFIKRQLVETRQITKHVAQILDSRMNTKYDENDKLIREVKVITLKSKLVSDFRKDFQFYKVREINNYHHAHDAYLNAVVGTALIKKYPKLESEFVYGDYKVYDVRKMIAKSEQEIGKATAKYFFYSNIMNFFKTEITLANGEIRKRPLIETNGETGEIVWDKGRDFATVRKVLSMPQVNIVKKTEVQTGGFSKESILPKRNSDKLIARKKDWDPKKYGGFDSPTVAYSVLVVAKVEKGKSKKLKSVKELLGITIMERSSFEKNPIDFLEAKGYKEVKKDLIIKLPKYSLFELENGRKRMLASAGELQKGNELALPSKYVNFLYLASHYEKLKGSPEDNEQKQLFVEQHKHYLDEIIEQISEFSKRVILADANLDKVLSAYNKHRDKPIREQAENIIHLFTLTNLGAPAAFKYFDTTIDRKRYTSTKEVLDATLIHQSITGLYETRIDLSQLGGDGGGSSEAAAKGGGGGTAPLEEEYRLFLEAPIQNVTLLEQWKREIPKVWAEINPPGLASTQAPIHVQLLSTALPVRVRQYPITLEAKRSLRETIRKFRAAGILRPVHSPWNTPLLPVRKSGTSEYRMVQDLREVNKRVETIHPTVPNPYTLLSLLPPDRIWYSVLDLKDAFFCIPLAPESQLIFAFEWADAEEGESGQLTWTRLPQGFKNSPTLFNEALNRDLQGFRLDHPSVSLLQYVDDLLIAADTQAACLSATRDLLMTLAELGYRVSGKKAQLCQEEVTYLGFKIHKGSRSLSNSRTQAILQIPVPKTKRQVREFLGKIGYCRLFIPGFAELAQPLYAATRPGNDPLVWGEKEEEAFQSLKLALTQPPALALPSLDKPFQLFVEETSGAAKGVLTQALGPWKRPVAYLSKRLDPVAAGWPRCLRAIAAAALLTREASKLTFGQDIEITSSHNLESLLRSPPDKWLTNARITQYQVLLLDPPRVRFKQTAALNPATLLPETDDTLPIHHCLDTLDSLTSTRPDLTDQPLAQAEATLFTDGSSYIRDGKRYAGAAVVTLDSVIWAEPLPIGTSAQKAELIALTKALEWSKDKSVNIYTDSRYAFATLHVHGMIYRERGWLTAGGKAIKNAPEILALLTAVWLPKRVAVMHCKGHQKDDAPTSTGNRRADEVAREVAIRPLSTQATISAGKRTADGSEFEKRTADGSEFESPKKKAKVE

SEQ ID NO: 1395 - protein, 2098 aa, synthetic construct
MPAAKRVKLDGGDKKYSIGLDIGTNSVGWAVITDEYKVPSKKFKVLGNTDRHSIKKNLIGALLFDSGETAEATRLKRTARRRYTRRKNRICYLQEIFSNEMAKVDDSFFHRLEESFLVEEDKKHERHPIFGNIVDEVAYHEKYPTIYHLRKKLVDSTDKADLRLIYLALAHMIKFRGHFLIEGDLNPDNSDVDKLFIQLVQTYNQLFEENPINASGVDAKAILSARLSKSRRLENLIAQLPGEKKNGLFGNLIALSLGLTPNFKSNFDLAEDAKLQLSKDTYDDDLDNLLAQIGDQYADLFLAAKNLSDAILLSDILRVNTEITKAPLSASMIKRYDEHHQDLTLLKALVRQQLPEKYKEIFFDQSKNGYAGYIDGGASQEEFYKFIKPILEKMDGTEELLVKLNREDLLRKQRTFDNGSIPHQIHLGELHAILRRQEDFYPFLKDNREKIEKILTFRIPYYVGPLARGNSRFAWMTRKSEETITPWNFEEVVDKGASAQSFIERMTNFDKNLPNEKVLPKHSLLYEYFTVYNELTKVKYVTEGMRKPAFLSGEQKKAIVDLLFKTNRKVTVKQLKEDYFKKIECFDSVEISGVEDRFNASLGTYHDLLKIIKDKDFLDNEENEDILEDIVLTLTLFEDREMIEERLKTYAHLFDDKVMKQLKRRRYTGWGRLSRKLINGIRDKQSGKTILDFLKSDGFANRNFMQLIHDDSLTFKEDIQKAQVSGQGDSLHEHIANLAGSPAIKKGILQTVKVVDELVKVMGRHKPENIVIEMARENQTTQKGQKNSRERMKRIEEGIKELGSQILKEHPVENTQLQNEKLYLYYLQNGRDMYVDQELDINRLSDYDVDHIVPQSFLKDDSIDNKVLTRSDKARGKSDNVPSEEVVKKMKNYWRQLLNAKLITQRKFDNLTKAERGGLSELDKAGFIKRQLVETRQITKHVAQILDSRMNTKYDENDKLIREVKVITLKSKLVSDFRKDFQFYKVREINNYHHAHDAYLNAVVGTALIKKYPKLESEFVYGDYKVYDVRKMIAKSEQEIGKATAKYFFYSNIMNFFKTEITLANGEIRKRPLIETNGETGEIVWDKGRDFATVRKVLSMPQVNIVKKTEVQTGGFSKESILPKRNSDKLIARKKDWDPKKYGGFDSPTVAYSVLVVAKVEKGKSKKLKSVKELLGITIMERSSFEKNPIDFLEAKGYKEVKKDLIIKLPKYSLFELENGRKRMLASAGELQKGNELALPSKYVNFLYLASHYEKLKGSPEDNEQKQLFVEQHKHYLDEIIEQISEFSKRVILADANLDKVLSAYNKHRDKPIREQAENIIHLFTLTNLGAPAAFKYFDTTIDRKRYTSTKEVLDATLIHQSITGLYETRIDLSQLGGDGGGGGEAAAKGSSGGTAPLEEEYRLFLEAPIQNVTLLEQWKREIPKVWAEINPPGLASTQAPIHVQLLSTALPVRVRQYPITLEAKRSLRETIRKFRAAGILRPVHSPWNTPLLPVRKSGTSEYRMVQDLREVNKRVETIHPTVPNPYTLLSLLPPDRIWYSVLDLKDAFFCIPLAPESQLIFAFEWADAEEGESGQLTWTRLPQGFKNSPTLFNEALNRDLQGFRLDHPSVSLLQYVDDLLIAADTQAACLSATRDLLMTLAELGYRVSGKKAQLCQEEVTYLGFKIHKGSRSLSNSRTQAILQIPVPKTKRQVREFLGKIGYCRLFIPGFAELAQPLYAATRPGNDPLVWGEKEEEAFQSLKLALTQPPALALPSLDKPFQLFVEETSGAAKGVLTQALGPWKRPVAYLSKRLDPVAAGWPRCLRAIAAAALLTREASKLTFGQDIEITSSHNLESLLRSPPDKWLTNARITQYQVLLLDPPRVRFKQTAALNPATLLPETDDTLPIHHCLDTLDSLTSTRPDLTDQPLAQAEATLFTDGSSYIRDGKRYAGAAVVTLDSVIWAEPLPIGTSAQKAELIALTKALEWSKDKSVNIYTDSRYAFATLHVHGMIYRERGWLTAGGKAIKNAPEILALLTAVWLPKRVAVMHCKGHQKDDAPTSTGNRRADEVAREVAIRPLSTQATISAGKRTADGSEFEKRTADGSEFESPKKKAKVE

SEQ ID NO: 1396 - protein, 2093 aa, synthetic construct
MPAAKRVKLDGGDKKYSIGLDIGTNSVGWAVITDEYKVPSKKFKVLGNTDRHSIKKNLIGALLFDSGETAEATRLKRTARRRYTRRKNRICYLQEIFSNEMAKVDDSFFHRLEESFLVEEDKKHERHPIFGNIVDEVAYHEKYPTIYHLRKKLVDSTDKADLRLIYLALAHMIKFRGHFLIEGDLNPDNSDVDKLFIQLVQTYNQLFEENPINASGVDAKAILSARLSKSRRLENLIAQLPGEKKNGLFGNLIALSLGLTPNFKSNFDLAEDAKLQLSKDTYDDDLDNLLAQIGDQYADLFLAAKNLSDAILLSDILRVNTEITKAPLSASMIKRYDEHHQDLTLLKALVRQQLPEKYKEIFFDQSKNGYAGYIDGGASQEEFYKFIKPILEKMDGTEELLVKLNREDLLRKQRTFDNGSIPHQIHLGELHAILRRQEDFYPFLKDNREKIEKILTFRIPYYVGPLARGNSRFAWMTRKSEETITPWNFEEVVDKGASAQSFIERMTNFDKNLPNEKVLPKHSLLYEYFTVYNELTKVKYVTEGMRKPAFLSGEQKKAIVDLLFKTNRKVTVKQLKEDYFKKIECFDSVEISGVEDRFNASLGTYHDLLKIIKDKDFLDNEENEDILEDIVLTLTLFEDREMIEERLKTYAHLFDDKVMKQLKRRRYTGWGRLSRKLINGIRDKQSGKTILDFLKSDGFANRNFMQLIHDDSLTFKEDIQKAQVSGQGDSLHEHIANLAGSPAIKKGILQTVKVVDELVKVMGRHKPENIVIEMARENQTTQKGQKNSRERMKRIEEGIKELGSQILKEHPVENTQLQNEKLYLYYLQNGRDMYVDQELDINRLSDYDVDHIVPQSFLKDDSIDNKVLTRSDKARGKSDNVPSEEVVKKMKNYWRQLLNAKLITQRKFDNLTKAERGGLSELDKAGFIKRQLVETRQITKHVAQILDSRMNTKYDENDKLIREVKVITLKSKLVSDFRKDFQFYKVREINNYHHAHDAYLNAVVGTALIKKYPKLESEFVYGDYKVYDVRKMIAKSEQEIGKATAKYFFYSNIMNFFKTEITLANGEIRKRPLIETNGETGEIVWDKGRDFATVRKVLSMPQVNIVKKTEVQTGGFSKESILPKRNSDKLIARKKDWDPKKYGGFDSPTVAYSVLVVAKVEKGKSKKLKSVKELLGITIMERSSFEKNPIDFLEAKGYKEVKKDLIIKLPKYSLFELENGRKRMLASAGELQKGNELALPSKYVNFLYLASHYEKLKGSPEDNEQKQLFVEQHKHYLDEIIEQISEFSKRVILADANLDKVLSAYNKHRDKPIREQAENIIHLFTLTNLGAPAAFKYFDTTIDRKRYTSTKEVLDATLIHQSITGLYETRIDLSQLGGDGGGGGGGGGGTAPLEEEYRLFLEAPIQNVTLLEQWKREIPKVWAEINPPGLASTQAPIHVQLLSTALPVRVRQYPITLEAKRSLRETIRKFRAAGILRPVHSPWNTPLLPVRKSGTSEYRMVQDLREVNKRVETIHPTVPNPYTLLSLLPPDRIWYSVLDLKDAFFCIPLAPESQLIFAFEWADAEEGESGQLTWTRLPQGFKNSPTLFNEALNRDLQGFRLDHPSVSLLQYVDDLLIAADTQAACLSATRDLLMTLAELGYRVSGKKAQLCQEEVTYLGFKIHKGSRSLSNSRTQAILQIPVPKTKRQVREFLGKIGYCRLFIPGFAELAQPLYAATRPGNDPLVWGEKEEEAFQSLKLALTQPPALALPSLDKPFQLFVEETSGAAKGVLTQALGPWKRPVAYLSKRLDPVAAGWPRCLRAIAAAALLTREASKLTFGQDIEITSSHNLESLLRSPPDKWLTNARITQYQVLLLDPPRVRFKQTAALNPATLLPETDDTLPIHHCLDTLDSLTSTRPDLTDQPLAQAEATLFTDGSSYIRDGKRYAGAAVVTLDSVIWAEPLPIGTSAQKAELIALTKALEWSKDKSVNIYTDSRYAFATLHVHGMIYRERGWLTAGGKAIKNAPEILALLTAVWLPKRVAVMHCKGHQKDDAPTSTGNRRADEVAREVAIRPLSTQATISAGKRTADGSEFEKRTADGSEFESPKKKAKVE

SEQ ID NO: 1397 - protein, 2093 aa, synthetic construct
MPAAKRVKLDGGDKKYSIGLDIGTNSVGWAVITDEYKVPSKKFKVLGNTDRHSIKKNLIGALLFDSGETAEATRLKRTARRRYTRRKNRICYLQEIFSNEMAKVDDSFFHRLEESFLVEEDKKHERHPIFGNIVDEVAYHEKYPTIYHLRKKLVDSTDKADLRLIYLALAHMIKFRGHFLIEGDLNPDNSDVDKLFIQLVQTYNQLFEENPINASGVDAKAILSARLSKSRRLENLIAQLPGEKKNGLFGNLIALSLGLTPNFKSNFDLAEDAKLQLSKDTYDDDLDNLLAQIGDQYADLFLAAKNLSDAILLSDILRVNTEITKAPLSASMIKRYDEHHQDLTLLKALVRQQLPEKYKEIFFDQSKNGYAGYIDGGASQEEFYKFIKPILEKMDGTEELLVKLNREDLLRKQRTFDNGSIPHQIHLGELHAILRRQEDFYPFLKDNREKIEKILTFRIPYYVGPLARGNSRFAWMTRKSEETITPWNFEEVVDKGASAQSFIERMTNFDKNLPNEKVLPKHSLLYEYFTVYNELTKVKYVTEGMRKPAFLSGEQKKAIVDLLFKTNRKVTVKQLKEDYFKKIECFDSVEISGVEDRFNASLGTYHDLLKIIKDKDFLDNEENEDILEDIVLTLTLFEDREMIEERLKTYAHLFDDKVMKQLKRRRYTGWGRLSRKLINGIRDKQSGKTILDFLKSDGFANRNFMQLIHDDSLTFKEDIQKAQVSGQGDSLHEHIANLAGSPAIKKGILQTVKVVDELVKVMGRHKPENIVIEMARENQTTQKGQKNSRERMKRIEEGIKELGSQILKEHPVENTQLQNEKLYLYYLQNGRDMYVDQELDINRLSDYDVDHIVPQSFLKDDSIDNKVLTRSDKARGKSDNVPSEEVVKKMKNYWRQLLNAKLITQRKFDNLTKAERGGLSELDKAGFIKRQLVETRQITKHVAQILDSRMNTKYDENDKLIREVKVITLKSKLVSDFRKDFQFYKVREINNYHHAHDAYLNAVVGTALIKKYPKLESEFVYGDYKVYDVRKMIAKSEQEIGKATAKYFFYSNIMNFFKTEITLANGEIRKRPLIETNGETGEIVWDKGRDFATVRKVLSMPQVNIVKKTEVQTGGFSKESILPKRNSDKLIARKKDWDPKKYGGFDSPTVAYSVLVVAKVEKGKSKKLKSVKELLGITIMERSSFEKNPIDFLEAKGYKEVKKDLIIKLPKYSLFELENGRKRMLASAGELQKGNELALPSKYVNFLYLASHYEKLKGSPEDNEQKQLFVEQHKHYLDEIIEQISEFSKRVILADANLDKVLSAYNKHRDKPIREQAENIIHLFTLTNLGAPAAFKYFDTTIDRKRYTSTKEVLDATLIHQSITGLYETRIDLSQLGGDGGGGGPAPGGTAPLEEEYRLFLEAPIQNVTLLEQWKREIPKVWAEINPPGLASTQAPIHVQLLSTALPVRVRQYPITLEAKRSLRETIRKFRAAGILRPVHSPWNTPLLPVRKSGTSEYRMVQDLREVNKRVETIHPTVPNPYTLLSLLPPDRIWYSVLDLKDAFFCIPLAPESQLIFAFEWADAEEGESGQLTWTRLPQGFKNSPTLFNEALNRDLQGFRLDHPSVSLLQYVDDLLIAADTQAACLSATRDLLMTLAELGYRVSGKKAQLCQEEVTYLGFKIHKGSRSLSNSRTQAILQIPVPKTKRQVREFLGKIGYCRLFIPGFAELAQPLYAATRPGNDPLVWGEKEEEAFQSLKLALTQPPALALPSLDKPFQLFVEETSGAAKGVLTQALGPWKRPVAYLSKRLDPVAAGWPRCLRAIAAAALLTREASKLTFGQDIEITSSHNLESLLRSPPDKWLTNARITQYQVLLLDPPRVRFKQTAALNPATLLPETDDTLPIHHCLDTLDSLTSTRPDLTDQPLAQAEATLFTDGSSYIRDGKRYAGAAVVTLDSVIWAEPLPIGTSAQKAELIALTKALEWSKDKSVNIYTDSRYAFATLHVHGMIYRERGWLTAGGKAIKNAPEILALLTAVWLPKRVAVMHCKGHQKDDAPTSTGNRRADEVAREVAIRPLSTQATISAGKRTADGSEFEKRTADGSEFESPKKKAKVE

SEQ ID NO: 1398 - protein, 2099 aa, synthetic construct
MPAAKRVKLDGGDKKYSIGLDIGTNSVGWAVITDEYKVPSKKFKVLGNTDRHSIKKNLIGALLFDSGETAEATRLKRTARRRYTRRKNRICYLQEIFSNEMAKVDDSFFHRLEESFLVEEDKKHERHPIFGNIVDEVAYHEKYPTIYHLRKKLVDSTDKADLRLIYLALAHMIKFRGHFLIEGDLNPDNSDVDKLFIQLVQTYNQLFEENPINASGVDAKAILSARLSKSRRLENLIAQLPGEKKNGLFGNLIALSLGLTPNFKSNFDLAEDAKLQLSKDTYDDDLDNLLAQIGDQYADLFLAAKNLSDAILLSDILRVNTEITKAPLSASMIKRYDEHHQDLTLLKALVRQQLPEKYKEIFFDQSKNGYAGYIDGGASQEEFYKFIKPILEKMDGTEELLVKLNREDLLRKQRTFDNGSIPHQIHLGELHAILRRQEDFYPFLKDNREKIEKILTFRIPYYVGPLARGNSRFAWMTRKSEETITPWNFEEVVDKGASAQSFIERMTNFDKNLPNEKVLPKHSLLYEYFTVYNELTKVKYVTEGMRKPAFLSGEQKKAIVDLLFKTNRKVTVKQLKEDYFKKIECFDSVEISGVEDRFNASLGTYHDLLKIIKDKDFLDNEENEDILEDIVLTLTLFEDREMIEERLKTYAHLFDDKVMKQLKRRRYTGWGRLSRKLINGIRDKQSGKTILDFLKSDGFANRNFMQLIHDDSLTFKEDIQKAQVSGQGDSLHEHIANLAGSPAIKKGILQTVKVVDELVKVMGRHKPENIVIEMARENQTTQKGQKNSRERMKRIEEGIKELGSQILKEHPVENTQLQNEKLYLYYLQNGRDMYVDQELDINRLSDYDVDHIVPQSFLKDDSIDNKVLTRSDKARGKSDNVPSEEVVKKMKNYWRQLLNAKLITQRKFDNLTKAERGGLSELDKAGFIKRQLVETRQITKHVAQILDSRMNTKYDENDKLIREVKVITLKSKLVSDFRKDFQFYKVREINNYHHAHDAYLNAVVGTALIKKYPKLESEFVYGDYKVYDVRKMIAKSEQEIGKATAKYFFYSNIMNFFKTEITLANGEIRKRPLIETNGETGEIVWDKGRDFATVRKVLSMPQVNIVKKTEVQTGGFSKESILPKRNSDKLIARKKDWDPKKYGGFDSPTVAYSVLVVAKVEKGKSKKLKSVKELLGITIMERSSFEKNPIDFLEAKGYKEVKKDLIIKLPKYSLFELENGRKRMLASAGELQKGNELALPSKYVNFLYLASHYEKLKGSPEDNEQKQLFVEQHKHYLDEIIEQISEFSKRVILADANLDKVLSAYNKHRDKPIREQAENIIHLFTLTNLGAPAAFKYFDTTIDRKRYTSTKEVLDATLIHQSITGLYETRIDLSQLGGDGGGGSGGSGGSGGSGGTAPLEEEYRLFLEAPIQNVTLLEQWKREIPKVWAEINPPGLASTQAPIHVQLLSTALPVRVRQYPITLEAKRSLRETIRKFRAAGILRPVHSPWNTPLLPVRKSGTSEYRMVQDLREVNKRVETIHPTVPNPYTLLSLLPPDRIWYSVLDLKDAFFCIPLAPESQLIFAFEWADAEEGESGQLTWTRLPQGFKNSPTLFNEALNRDLQGFRLDHPSVSLLQYVDDLLIAADTQAACLSATRDLLMTLAELGYRVSGKKAQLCQEEVTYLGFKIHKGSRSLSNSRTQAILQIPVPKTKRQVREFLGKIGYCRLFIPGFAELAQPLYAATRPGNDPLVWGEKEEEAFQSLKLALTQPPALALPSLDKPFQLFVEETSGAAKGVLTQALGPWKRPVAYLSKRLDPVAAGWPRCLRAIAAAALLTREASKLTFGQDIEITSSHNLESLLRSPPDKWLTNARITQYQVLLLDPPRVRFKQTAALNPATLLPETDDTLPIHHCLDTLDSLTSTRPDLTDQPLAQAEATLFTDGSSYIRDGKRYAGAAVVTLDSVIWAEPLPIGTSAQKAELIALTKALEWSKDKSVNIYTDSRYAFATLHVHGMIYRERGWLTAGGKAIKNAPEILALLTAVWLPKRVAVMHCKGHQKDDAPTSTGNRRADEVAREVAIRPLSTQATISAGKRTADGSEFEKRTADGSEFESPKKKAKVE

SEQ ID NO: 1399 - protein, 2102 aa, synthetic construct
MPAAKRVKLDGGDKKYSIGLDIGTNSVGWAVITDEYKVPSKKFKVLGNTDRHSIKKNLIGALLFDSGETAEATRLKRTARRRYTRRKNRICYLQEIFSNEMAKVDDSFFHRLEESFLVEEDKKHERHPIFGNIVDEVAYHEKYPTIYHLRKKLVDSTDKADLRLIYLALAHMIKFRGHFLIEGDLNPDNSDVDKLFIQLVQTYNQLFEENPINASGVDAKAILSARLSKSRRLENLIAQLPGEKKNGLFGNLIALSLGLTPNFKSNFDLAEDAKLQLSKDTYDDDLDNLLAQIGDQYADLFLAAKNLSDAILLSDILRVNTEITKAPLSASMIKRYDEHHQDLTLLKALVRQQLPEKYKEIFFDQSKNGYAGYIDGGASQEEFYKFIKPILEKMDGTEELLVKLNREDLLRKQRTFDNGSIPHQIHLGELHAILRRQEDFYPFLKDNREKIEKILTFRIPYYVGPLARGNSRFAWMTRKSEETITPWNFEEVVDKGASAQSFIERMTNFDKNLPNEKVLPKHSLLYEYFTVYNELTKVKYVTEGMRKPAFLSGEQKKAIVDLLFKTNRKVTVKQLKEDYFKKIECFDSVEISGVEDRFNASLGTYHDLLKIIKDKDFLDNEENEDILEDIVLTLTLFEDREMIEERLKTYAHLFDDKVMKQLKRRRYTGWGRLSRKLINGIRDKQSGKTILDFLKSDGFANRNFMQLIHDDSLTFKEDIQKAQVSGQGDSLHEHIANLAGSPAIKKGILQTVKVVDELVKVMGRHKPENIVIEMARENQTTQKGQKNSRERMKRIEEGIKELGSQILKEHPVENTQLQNEKLYLYYLQNGRDMYVDQELDINRLSDYDVDHIVPQSFLKDDSIDNKVLTRSDKARGKSDNVPSEEVVKKMKNYWRQLLNAKLITQRKFDNLTKAERGGLSELDKAGFIKRQLVETRQITKHVAQILDSRMNTKYDENDKLIREVKVITLKSKLVSDFRKDFQFYKVREINNYHHAHDAYLNAVVGTALIKKYPKLESEFVYGDYKVYDVRKMIAKSEQEIGKATAKYFFYSNIMNFFKTEITLANGEIRKRPLIETNGETGEIVWDKGRDFATVRKVLSMPQVNIVKKTEVQTGGFSKESILPKRNSDKLIARKKDWDPKKYGGFDSPTVAYSVLVVAKVEKGKSKKLKSVKELLGITIMERSSFEKNPIDFLEAKGYKEVKKDLIIKLPKYSLFELENGRKRMLASAGELQKGNELALPSKYVNFLYLASHYEKLKGSPEDNEQKQLFVEQHKHYLDEIIEQISEFSKRVILADANLDKVLSAYNKHRDKPIREQAENIIHLFTLTNLGAPAAFKYFDTTIDRKRYTSTKEVLDATLIHQSITGLYETRIDLSQLGGDGGEAAAKGGGGSEAAAKGGTAPLEEEYRLFLEAPIQNVTLLEQWKREIPKVWAEINPPGLASTQAPIHVQLLSTALPVRVRQYPITLEAKRSLRETIRKFRAAGILRPVHSPWNTPLLPVRKSGTSEYRMVQDLREVNKRVETIHPTVPNPYTLLSLLPPDRIWYSVLDLKDAFFCIPLAPESQLIFAFEWADAEEGESGQLTWTRLPQGFKNSPTLFNEALNRDLQGFRLDHPSVSLLQYVDDLLIAADTQAACLSATRDLLMTLAELGYRVSGKKAQLCQEEVTYLGFKIHKGSRSLSNSRTQAILQIPVPKTKRQVREFLGKIGYCRLFIPGFAELAQPLYAATRPGNDPLVWGEKEEEAFQSLKLALTQPPALALPSLDKPFQLFVEETSGAAKGVLTQALGPWKRPVAYLSKRLDPVAAGWPRCLRAIAAAALLTREASKLTFGQDIEITSSHNLESLLRSPPDKWLTNARITQYQVLLLDPPRVRFKQTAALNPATLLPETDDTLPIHHCLDTLDSLTSTRPDLTDQPLAQAEATLFTDGSSYIRDGKRYAGAAVVTLDSVIWAEPLPIGTSAQKAELIALTKALEWSKDKSVNIYTDSRYAFATLHVHGMIYRERGWLTAGGKAIKNAPEILALLTAVWLPKRVAVMHCKGHQKDDAPTSTGNRRADEVAREVAIRPLSTQATISAGKRTADGSEFEKRTADGSEFESPKKKAKVE

SEQ ID NO: 1400 - protein, 2112 aa, synthetic construct
MPAAKRVKLDGGDKKYSIGLDIGTNSVGWAVITDEYKVPSKKFKVLGNTDRHSIKKNLIGALLFDSGETAEATRLKRTARRRYTRRKNRICYLQEIFSNEMAKVDDSFFHRLEESFLVEEDKKHERHPIFGNIVDEVAYHEKYPTIYHLRKKLVDSTDKADLRLIYLALAHMIKFRGHFLIEGDLNPDNSDVDKLFIQLVQTYNQLFEENPINASGVDAKAILSARLSKSRRLENLIAQLPGEKKNGLFGNLIALSLGLTPNFKSNFDLAEDAKLQLSKDTYDDDLDNLLAQIGDQYADLFLAAKNLSDAILLSDILRVNTEITKAPLSASMIKRYDEHHQDLTLLKALVRQQLPEKYKEIFFDQSKNGYAGYIDGGASQEEFYKFIKPILEKMDGTEELLVKLNREDLLRKQRTFDNGSIPHQIHLGELHAILRRQEDFYPFLKDNREKIEKILTFRIPYYVGPLARGNSRFAWMTRKSEETITPWNFEEVVDKGASAQSFIERMTNFDKNLPNEKVLPKHSLLYEYFTVYNELTKVKYVTEGMRKPAFLSGEQKKAIVDLLFKTNRKVTVKQLKEDYFKKIECFDSVEISGVEDRFNASLGTYHDLLKIIKDKDFLDNEENEDILEDIVLTLTLFEDREMIEERLKTYAHLFDDKVMKQLKRRRYTGWGRLSRKLINGIRDKQSGKTILDFLKSDGFANRNFMQLIHDDSLTFKEDIQKAQVSGQGDSLHEHIANLAGSPAIKKGILQTVKVVDELVKVMGRHKPENIVIEMARENQTTQKGQKNSRERMKRIEEGIKELGSQILKEHPVENTQLQNEKLYLYYLQNGRDMYVDQELDINRLSDYDVDHIVPQSFLKDDSIDNKVLTRSDKARGKSDNVPSEEVVKKMKNYWRQLLNAKLITQRKFDNLTKAERGGLSELDKAGFIKRQLVETRQITKHVAQILDSRMNTKYDENDKLIREVKVITLKSKLVSDFRKDFQFYKVREINNYHHAHDAYLNAVVGTALIKKYPKLESEFVYGDYKVYDVRKMIAKSEQEIGKATAKYFFYSNIMNFFKTEITLANGEIRKRPLIETNGETGEIVWDKGRDFATVRKVLSMPQVNIVKKTEVQTGGFSKESILPKRNSDKLIARKKDWDPKKYGGFDSPTVAYSVLVVAKVEKGKSKKLKSVKELLGITIMERSSFEKNPIDFLEAKGYKEVKKDLIIKLPKYSLFELENGRKRMLASAGELQKGNELALPSKYVNFLYLASHYEKLKGSPEDNEQKQLFVEQHKHYLDEIIEQISEFSKRVILADANLDKVLSAYNKHRDKPIREQAENIIHLFTLTNLGAPAAFKYFDTTIDRKRYTSTKEVLDATLIHQSITGLYETRIDLSQLGGDGGEAAAKEAAAKEAAAKEAAAKEAAAKGGTAPLEEEYRLFLEAPIQNVTLLEQWKREIPKVWAEINPPGLASTQAPIHVQLLSTALPVRVRQYPITLEAKRSLRETIRKFRAAGILRPVHSPWNTPLLPVRKSGTSEYRMVQDLREVNKRVETIHPTVPNPYTLLSLLPPDRIWYSVLDLKDAFFCIPLAPESQLIFAFEWADAEEGESGQLTWTRLPQGFKNSPTLFNEALNRDLQGFRLDHPSVSLLQYVDDLLIAADTQAACLSATRDLLMTLAELGYRVSGKKAQLCQEEVTYLGFKIHKGSRSLSNSRTQAILQIPVPKTKRQVREFLGKIGYCRLFIPGFAELAQPLYAATRPGNDPLVWGEKEEEAFQSLKLALTQPPALALPSLDKPFQLFVEETSGAAKGVLTQALGPWKRPVAYLSKRLDPVAAGWPRCLRAIAAAALLTREASKLTFGQDIEITSSHNLESLLRSPPDKWLTNARITQYQVLLLDPPRVRFKQTAALNPATLLPETDDTLPIHHCLDTLDSLTSTRPDLTDQPLAQAEATLFTDGSSYIRDGKRYAGAAVVTLDSVIWAEPLPIGTSAQKAELIALTKALEWSKDKSVNIYTDSRYAFATLHVHGMIYRERGWLTAGGKAIKNAPEILALLTAVWLPKRVAVMHCKGHQKDDAPTSTGNRRADEVAREVAIRPLSTQATISAGKRTADGSEFEKRTADGSEFESPKKKAKVE

SEQ ID NO: 1401 - protein, 2096 aa, synthetic construct
MPAAKRVKLDGGDKKYSIGLDIGTNSVGWAVITDEYKVPSKKFKVLGNTDRHSIKKNLIGALLFDSGETAEATRLKRTARRRYTRRKNRICYLQEIFSNEMAKVDDSFFHRLEESFLVEEDKKHERHPIFGNIVDEVAYHEKYPTIYHLRKKLVDSTDKADLRLIYLALAHMIKFRGHFLIEGDLNPDNSDVDKLFIQLVQTYNQLFEENPINASGVDAKAILSARLSKSRRLENLIAQLPGEKKNGLFGNLIALSLGLTPNFKSNFDLAEDAKLQLSKDTYDDDLDNLLAQIGDQYADLFLAAKNLSDAILLSDILRVNTEITKAPLSASMIKRYDEHHQDLTLLKALVRQQLPEKYKEIFFDQSKNGYAGYIDGGASQEEFYKFIKPILEKMDGTEELLVKLNREDLLRKQRTFDNGSIPHQIHLGELHAILRRQEDFYPFLKDNREKIEKILTFRIPYYVGPLARGNSRFAWMTRKSEETITPWNFEEVVDKGASAQSFIERMTNFDKNLPNEKVLPKHSLLYEYFTVYNELTKVKYVTEGMRKPAFLSGEQKKAIVDLLFKTNRKVTVKQLKEDYFKKIECFDSVEISGVEDRFNASLGTYHDLLKIIKDKDFLDNEENEDILEDIVLTLTLFEDREMIEERLKTYAHLFDDKVMKQLKRRRYTGWGRLSRKLINGIRDKQSGKTILDFLKSDGFANRNFMQLIHDDSLTFKEDIQKAQVSGQGDSLHEHIANLAGSPAIKKGILQTVKVVDELVKVMGRHKPENIVIEMARENQTTQKGQKNSRERMKRIEEGIKELGSQILKEHPVENTQLQNEKLYLYYLQNGRDMYVDQELDINRLSDYDVDHIVPQSFLKDDSIDNKVLTRSDKARGKSDNVPSEEVVKKMKNYWRQLLNAKLITQRKFDNLTKAERGGLSELDKAGFIKRQLVETRQITKHVAQILDSRMNTKYDENDKLIREVKVITLKSKLVSDFRKDFQFYKVREINNYHHAHDAYLNAVVGTALIKKYPKLESEFVYGDYKVYDVRKMIAKSEQEIGKATAKYFFYSNIMNFFKTEITLANGEIRKRPLIETNGETGEIVWDKGRDFATVRKVLSMPQVNIVKKTEVQTGGFSKESILPKRNSDKLIARKKDWDPKKYGGFDSPTVAYSVLVVAKVEKGKSKKLKSVKELLGITIMERSSFEKNPIDFLEAKGYKEVKKDLIIKLPKYSLFELENGRKRMLASAGELQKGNELALPSKYVNFLYLASHYEKLKGSPEDNEQKQLFVEQHKHYLDEIIEQISEFSKRVILADANLDKVLSAYNKHRDKPIREQAENIIHLFTLTNLGAPAAFKYFDTTIDRKRYTSTKEVLDATLIHQSITGLYETRIDLSQLGGDGGPAPGSSGGSGGTAPLEEEYRLFLEAPIQNVTLLEQWKREIPKVWAEINPPGLASTQAPIHVQLLSTALPVRVRQYPITLEAKRSLRETIRKFRAAGILRPVHSPWNTPLLPVRKSGTSEYRMVQDLREVNKRVETIHPTVPNPYTLLSLLPPDRIWYSVLDLKDAFFCIPLAPESQLIFAFEWADAEEGESGQLTWTRLPQGFKNSPTLFNEALNRDLQGFRLDHPSVSLLQYVDDLLIAADTQAACLSATRDLLMTLAELGYRVSGKKAQLCQEEVTYLGFKIHKGSRSLSNSRTQAILQIPVPKTKRQVREFLGKIGYCRLFIPGFAELAQPLYAATRPGNDPLVWGEKEEEAFQSLKLALTQPPALALPSLDKPFQLFVEETSGAAKGVLTQALGPWKRPVAYLSKRLDPVAAGWPRCLRAIAAAALLTREASKLTFGQDIEITSSHNLESLLRSPPDKWLTNARITQYQVLLLDPPRVRFKQTAALNPATLLPETDDTLPIHHCLDTLDSLTSTRPDLTDQPLAQAEATLFTDGSSYIRDGKRYAGAAVVTLDSVIWAEPLPIGTSAQKAELIALTKALEWSKDKSVNIYTDSRYAFATLHVHGMIYRERGWLTAGGKAIKNAPEILALLTAVWLPKRVAVMHCKGHQKDDAPTSTGNRRADEVAREVAIRPLSTQATISAGKRTADGSEFEKRTADGSEFESPKKKAKVE

SEQ ID NO: 1402 - protein, 2096 aa, synthetic construct
MPAAKRVKLDGGDKKYSIGLDIGTNSVGWAVITDEYKVPSKKFKVLGNTDRHSIKKNLIGALLFDSGETAEATRLKRTARRRYTRRKNRICYLQEIFSNEMAKVDDSFFHRLEESFLVEEDKKHERHPIFGNIVDEVAYHEKYPTIYHLRKKLVDSTDKADLRLIYLALAHMIKFRGHFLIEGDLNPDNSDVDKLFIQLVQTYNQLFEENPINASGVDAKAILSARLSKSRRLENLIAQLPGEKKNGLFGNLIALSLGLTPNFKSNFDLAEDAKLQLSKDTYDDDLDNLLAQIGDQYADLFLAAKNLSDAILLSDILRVNTEITKAPLSASMIKRYDEHHQDLTLLKALVRQQLPEKYKEIFFDQSKNGYAGYIDGGASQEEFYKFIKPILEKMDGTEELLVKLNREDLLRKQRTFDNGSIPHQIHLGELHAILRRQEDFYPFLKDNREKIEKILTFRIPYYVGPLARGNSRFAWMTRKSEETITPWNFEEVVDKGASAQSFIERMTNFDKNLPNEKVLPKHSLLYEYFTVYNELTKVKYVTEGMRKPAFLSGEQKKAIVDLLFKTNRKVTVKQLKEDYFKKIECFDSVEISGVEDRFNASLGTYHDLLKIIKDKDFLDNEENEDILEDIVLTLTLFEDREMIEERLKTYAHLFDDKVMKQLKRRRYTGWGRLSRKLINGIRDKQSGKTILDFLKSDGFANRNFMQLIHDDSLTFKEDIQKAQVSGQGDSLHEHIANLAGSPAIKKGILQTVKVVDELVKVMGRHKPENIVIEMARENQTTQKGQKNSRERMKRIEEGIKELGSQILKEHPVENTQLQNEKLYLYYLQNGRDMYVDQELDINRLSDYDVDHIVPQSFLKDDSIDNKVLTRSDKARGKSDNVPSEEVVKKMKNYWRQLLNAKLITQRKFDNLTKAERGGLSELDKAGFIKRQLVETRQITKHVAQILDSRMNTKYDENDKLIREVKVITLKSKLVSDFRKDFQFYKVREINNYHHAHDAYLNAVVGTALIKKYPKLESEFVYGDYKVYDVRKMIAKSEQEIGKATAKYFFYSNIMNFFKTEITLANGEIRKRPLIETNGETGEIVWDKGRDFATVRKVLSMPQVNIVKKTEVQTGGFSKESILPKRNSDKLIARKKDWDPKKYGGFDSPTVAYSVLVVAKVEKGKSKKLKSVKELLGITIMERSSFEKNPIDFLEAKGYKEVKKDLIIKLPKYSLFELENGRKRMLASAGELQKGNELALPSKYVNFLYLASHYEKLKGSPEDNEQKQLFVEQHKHYLDEIIEQISEFSKRVILADANLDKVLSAYNKHRDKPIREQAENIIHLFTLTNLGAPAAFKYFDTTIDRKRYTSTKEVLDATLIHQSITGLYETRIDLSQLGGDGGGGGPAPGGSGGTAPLEEEYRLFLEAPIQNVTLLEQWKREIPKVWAEINPPGLASTQAPIHVQLLSTALPVRVRQYPITLEAKRSLRETIRKFRAAGILRPVHSPWNTPLLPVRKSGTSEYRMVQDLREVNKRVETIHPTVPNPYTLLSLLPPDRIWYSVLDLKDAFFCIPLAPESQLIFAFEWADAEEGESGQLTWTRLPQGFKNSPTLFNEALNRDLQGFRLDHPSVSLLQYVDDLLIAADTQAACLSATRDLLMTLAELGYRVSGKKAQLCQEEVTYLGFKIHKGSRSLSNSRTQAILQIPVPKTKRQVREFLGKIGYCRLFIPGFAELAQPLYAATRPGNDPLVWGEKEEEAFQSLKLALTQPPALALPSLDKPFQLFVEETSGAAKGVLTQALGPWKRPVAYLSKRLDPVAAGWPRCLRAIAAAALLTREASKLTFGQDIEITSSHNLESLLRSPPDKWLTNARITQYQVLLLDPPRVRFKQTAALNPATLLPETDDTLPIHHCLDTLDSLTSTRPDLTDQPLAQAEATLFTDGSSYIRDGKRYAGAAVVTLDSVIWAEPLPIGTSAQKAELIALTKALEWSKDKSVNIYTDSRYAFATLHVHGMIYRERGWLTAGGKAIKNAPEILALLTAVWLPKRVAVMHCKGHQKDDAPTSTGNRRADEVAREVAIRPLSTQATISAGKRTADGSEFEKRTADGSEFESPKKKAKVE

SEQ ID NO: 1403 - protein, 2096 aa, synthetic construct
MPAAKRVKLDGGDKKYSIGLDIGTNSVGWAVITDEYKVPSKKFKVLGNTDRHSIKKNLIGALLFDSGETAEATRLKRTARRRYTRRKNRICYLQEIFSNEMAKVDDSFFHRLEESFLVEEDKKHERHPIFGNIVDEVAYHEKYPTIYHLRKKLVDSTDKADLRLIYLALAHMIKFRGHFLIEGDLNPDNSDVDKLFIQLVQTYNQLFEENPINASGVDAKAILSARLSKSRRLENLIAQLPGEKKNGLFGNLIALSLGLTPNFKSNFDLAEDAKLQLSKDTYDDDLDNLLAQIGDQYADLFLAAKNLSDAILLSDILRVNTEITKAPLSASMIKRYDEHHQDLTLLKALVRQQLPEKYKEIFFDQSKNGYAGYIDGGASQEEFYKFIKPILEKMDGTEELLVKLNREDLLRKQRTFDNGSIPHQIHLGELHAILRRQEDFYPFLKDNREKIEKILTFRIPYYVGPLARGNSRFAWMTRKSEETITPWNFEEVVDKGASAQSFIERMTNFDKNLPNEKVLPKHSLLYEYFTVYNELTKVKYVTEGMRKPAFLSGEQKKAIVDLLFKTNRKVTVKQLKEDYFKKIECFDSVEISGVEDRFNASLGTYHDLLKIIKDKDFLDNEENEDILEDIVLTLTLFEDREMIEERLKTYAHLFDDKVMKQLKRRRYTGWGRLSRKLINGIRDKQSGKTILDFLKSDGFANRNFMQLIHDDSLTFKEDIQKAQVSGQGDSLHEHIANLAGSPAIKKGILQTVKVVDELVKVMGRHKPENIVIEMARENQTTQKGQKNSRERMKRIEEGIKELGSQILKEHPVENTQLQNEKLYLYYLQNGRDMYVDQELDINRLSDYDVDHIVPQSFLKDDSIDNKVLTRSDKARGKSDNVPSEEVVKKMKNYWRQLLNAKLITQRKFDNLTKAERGGLSELDKAGFIKRQLVETRQITKHVAQILDSRMNTKYDENDKLIREVKVITLKSKLVSDFRKDFQFYKVREINNYHHAHDAYLNAVVGTALIKKYPKLESEFVYGDYKVYDVRKMIAKSEQEIGKATAKYFFYSNIMNFFKTEITLANGEIRKRPLIETNGETGEIVWDKGRDFATVRKVLSMPQVNIVKKTEVQTGGFSKESILPKRNSDKLIARKKDWDPKKYGGFDSPTVAYSVLVVAKVEKGKSKKLKSVKELLGITIMERSSFEKNPIDFLEAKGYKEVKKDLIIKLPKYSLFELENGRKRMLASAGELQKGNELALPSKYVNFLYLASHYEKLKGSPEDNEQKQLFVEQHKHYLDEIIEQISEFSKRVILADANLDKVLSAYNKHRDKPIREQAENIIHLFTLTNLGAPAAFKYFDTTIDRKRYTSTKEVLDATLIHQSITGLYETRIDLSQLGGDGGPAPGGSGGGGGTAPLEEEYRLFLEAPIQNVTLLEQWKREIPKVWAEINPPGLASTQAPIHVQLLSTALPVRVRQYPITLEAKRSLRETIRKFRAAGILRPVHSPWNTPLLPVRKSGTSEYRMVQDLREVNKRVETIHPTVPNPYTLLSLLPPDRIWYSVLDLKDAFFCIPLAPESQLIFAFEWADAEEGESGQLTWTRLPQGFKNSPTLFNEALNRDLQGFRLDHPSVSLLQYVDDLLIAADTQAACLSATRDLLMTLAELGYRVSGKKAQLCQEEVTYLGFKIHKGSRSLSNSRTQAILQIPVPKTKRQVREFLGKIGYCRLFIPGFAELAQPLYAATRPGNDPLVWGEKEEEAFQSLKLALTQPPALALPSLDKPFQLFVEETSGAAKGVLTQALGPWKRPVAYLSKRLDPVAAGWPRCLRAIAAAALLTREASKLTFGQDIEITSSHNLESLLRSPPDKWLTNARITQYQVLLLDPPRVRFKQTAALNPATLLPETDDTLPIHHCLDTLDSLTSTRPDLTDQPLAQAEATLFTDGSSYIRDGKRYAGAAVVTLDSVIWAEPLPIGTSAQKAELIALTKALEWSKDKSVNIYTDSRYAFATLHVHGMIYRERGWLTAGGKAIKNAPEILALLTAVWLPKRVAVMHCKGHQKDDAPTSTGNRRADEVAREVAIRPLSTQATISAGKRTADGSEFEKRTADGSEFESPKKKAKVE

SEQ ID NO: 1404 - protein, 2098 aa, synthetic construct
MPAAKRVKLDGGDKKYSIGLDIGTNSVGWAVITDEYKVPSKKFKVLGNTDRHSIKKNLIGALLFDSGETAEATRLKRTARRRYTRRKNRICYLQEIFSNEMAKVDDSFFHRLEESFLVEEDKKHERHPIFGNIVDEVAYHEKYPTIYHLRKKLVDSTDKADLRLIYLALAHMIKFRGHFLIEGDLNPDNSDVDKLFIQLVQTYNQLFEENPINASGVDAKAILSARLSKSRRLENLIAQLPGEKKNGLFGNLIALSLGLTPNFKSNFDLAEDAKLQLSKDTYDDDLDNLLAQIGDQYADLFLAAKNLSDAILLSDILRVNTEITKAPLSASMIKRYDEHHQDLTLLKALVRQQLPEKYKEIFFDQSKNGYAGYIDGGASQEEFYKFIKPILEKMDGTEELLVKLNREDLLRKQRTFDNGSIPHQIHLGELHAILRRQEDFYPFLKDNREKIEKILTFRIPYYVGPLARGNSRFAWMTRKSEETITPWNFEEVVDKGASAQSFIERMTNFDKNLPNEKVLPKHSLLYEYFTVYNELTKVKYVTEGMRKPAFLSGEQKKAIVDLLFKTNRKVTVKQLKEDYFKKIECFDSVEISGVEDRFNASLGTYHDLLKIIKDKDFLDNEENEDILEDIVLTLTLFEDREMIEERLKTYAHLFDDKVMKQLKRRRYTGWGRLSRKLINGIRDKQSGKTILDFLKSDGFANRNFMQLIHDDSLTFKEDIQKAQVSGQGDSLHEHIANLAGSPAIKKGILQTVKVVDELVKVMGRHKPENIVIEMARENQTTQKGQKNSRERMKRIEEGIKELGSQILKEHPVENTQLQNEKLYLYYLQNGRDMYVDQELDINRLSDYDVDHIVPQSFLKDDSIDNKVLTRSDKARGKSDNVPSEEVVKKMKNYWRQLLNAKLITQRKFDNLTKAERGGLSELDKAGFIKRQLVETRQITKHVAQILDSRMNTKYDENDKLIREVKVITLKSKLVSDFRKDFQFYKVREINNYHHAHDAYLNAVVGTALIKKYPKLESEFVYGDYKVYDVRKMIAKSEQEIGKATAKYFFYSNIMNFFKTEITLANGEIRKRPLIETNGETGEIVWDKGRDFATVRKVLSMPQVNIVKKTEVQTGGFSKESILPKRNSDKLIARKKDWDPKKYGGFDSPTVAYSVLVVAKVEKGKSKKLKSVKELLGITIMERSSFEKNPIDFLEAKGYKEVKKDLIIKLPKYSLFELENGRKRMLASAGELQKGNELALPSKYVNFLYLASHYEKLKGSPEDNEQKQLFVEQHKHYLDEIIEQISEFSKRVILADANLDKVLSAYNKHRDKPIREQAENIIHLFTLTNLGAPAAFKYFDTTIDRKRYTSTKEVLDATLIHQSITGLYETRIDLSQLGGDGGGGGGSSEAAAKGGTAPLEEEYRLFLEAPIQNVTLLEQWKREIPKVWAEINPPGLASTQAPIHVQLLSTALPVRVRQYPITLEAKRSLRETIRKFRAAGILRPVHSPWNTPLLPVRKSGTSEYRMVQDLREVNKRVETIHPTVPNPYTLLSLLPPDRIWYSVLDLKDAFFCIPLAPESQLIFAFEWADAEEGESGQLTWTRLPQGFKNSPTLFNEALNRDLQGFRLDHPSVSLLQYVDDLLIAADTQAACLSATRDLLMTLAELGYRVSGKKAQLCQEEVTYLGFKIHKGSRSLSNSRTQAILQIPVPKTKRQVREFLGKIGYCRLFIPGFAELAQPLYAATRPGNDPLVWGEKEEEAFQSLKLALTQPPALALPSLDKPFQLFVEETSGAAKGVLTQALGPWKRPVAYLSKRLDPVAAGWPRCLRAIAAAALLTREASKLTFGQDIEITSSHNLESLLRSPPDKWLTNARITQYQVLLLDPPRVRFKQTAALNPATLLPETDDTLPIHHCLDTLDSLTSTRPDLTDQPLAQAEATLFTDGSSYIRDGKRYAGAAVVTLDSVIWAEPLPIGTSAQKAELIALTKALEWSKDKSVNIYTDSRYAFATLHVHGMIYRERGWLTAGGKAIKNAPEILALLTAVWLPKRVAVMHCKGHQKDDAPTSTGNRRADEVAREVAIRPLSTQATISAGKRTADGSEFEKRTADGSEFESPKKKAKVE

SEQ ID NO: 1405 - protein, 2095 aa, synthetic construct
MPAAKRVKLDGGDKKYSIGLDIGTNSVGWAVITDEYKVPSKKFKVLGNTDRHSIKKNLIGALLFDSGETAEATRLKRTARRRYTRRKNRICYLQEIFSNEMAKVDDSFFHRLEESFLVEEDKKHERHPIFGNIVDEVAYHEKYPTIYHLRKKLVDSTDKADLRLIYLALAHMIKFRGHFLIEGDLNPDNSDVDKLFIQLVQTYNQLFEENPINASGVDAKAILSARLSKSRRLENLIAQLPGEKKNGLFGNLIALSLGLTPNFKSNFDLAEDAKLQLSKDTYDDDLDNLLAQIGDQYADLFLAAKNLSDAILLSDILRVNTEITKAPLSASMIKRYDEHHQDLTLLKALVRQQLPEKYKEIFFDQSKNGYAGYIDGGASQEEFYKFIKPILEKMDGTEELLVKLNREDLLRKQRTFDNGSIPHQIHLGELHAILRRQEDFYPFLKDNREKIEKILTFRIPYYVGPLARGNSRFAWMTRKSEETITPWNFEEVVDKGASAQSFIERMTNFDKNLPNEKVLPKHSLLYEYFTVYNELTKVKYVTEGMRKPAFLSGEQKKAIVDLLFKTNRKVTVKQLKEDYFKKIECFDSVEISGVEDRFNASLGTYHDLLKIIKDKDFLDNEENEDILEDIVLTLTLFEDREMIEERLKTYAHLFDDKVMKQLKRRRYTGWGRLSRKLINGIRDKQSGKTILDFLKSDGFANRNFMQLIHDDSLTFKEDIQKAQVSGQGDSLHEHIANLAGSPAIKKGILQTVKVVDELVKVMGRHKPENIVIEMARENQTTQKGQKNSRERMKRIEEGIKELGSQILKEHPVENTQLQNEKLYLYYLQNGRDMYVDQELDINRLSDYDVDHIVPQSFLKDDSIDNKVLTRSDKARGKSDNVPSEEVVKKMKNYWRQLLNAKLITQRKFDNLTKAERGGLSELDKAGFIKRQLVETRQITKHVAQILDSRMNTKYDENDKLIREVKVITLKSKLVSDFRKDFQFYKVREINNYHHAHDAYLNAVVGTALIKKYPKLESEFVYGDYKVYDVRKMIAKSEQEIGKATAKYFFYSNIMNFFKTEITLANGEIRKRPLIETNGETGEIVWDKGRDFATVRKVLSMPQVNIVKKTEVQTGGFSKESILPKRNSDKLIARKKDWDPKKYGGFDSPTVAYSVLVVAKVEKGKSKKLKSVKELLGITIMERSSFEKNPIDFLEAKGYKEVKKDLIIKLPKYSLFELENGRKRMLASAGELQKGNELALPSKYVNFLYLASHYEKLKGSPEDNEQKQLFVEQHKHYLDEIIEQISEFSKRVILADANLDKVLSAYNKHRDKPIREQAENIIHLFTLTNLGAPAAFKYFDTTIDRKRYTSTKEVLDATLIHQSITGLYETRIDLSQLGGDGGGSSEAAAKGGTAPLEEEYRLFLEAPIQNVTLLEQWKREIPKVWAEINPPGLASTQAPIHVQLLSTALPVRVRQYPITLEAKRSLRETIRKFRAAGILRPVHSPWNTPLLPVRKSGTSEYRMVQDLREVNKRVETIHPTVPNPYTLLSLLPPDRIWYSVLDLKDAFFCIPLAPESQLIFAFEWADAEEGESGQLTWTRLPQGFKNSPTLFNEALNRDLQGFRLDHPSVSLLQYVDDLLIAADTQAACLSATRDLLMTLAELGYRVSGKKAQLCQEEVTYLGFKIHKGSRSLSNSRTQAILQIPVPKTKRQVREFLGKIGYCRLFIPGFAELAQPLYAATRPGNDPLVWGEKEEEAFQSLKLALTQPPALALPSLDKPFQLFVEETSGAAKGVLTQALGPWKRPVAYLSKRLDPVAAGWPRCLRAIAAAALLTREASKLTFGQDIEITSSHNLESLLRSPPDKWLTNARITQYQVLLLDPPRVRFKQTAALNPATLLPETDDTLPIHHCLDTLDSLTSTRPDLTDQPLAQAEATLFTDGSSYIRDGKRYAGAAVVTLDSVIWAEPLPIGTSAQKAELIALTKALEWSKDKSVNIYTDSRYAFATLHVHGMIYRERGWLTAGGKAIKNAPEILALLTAVWLPKRVAVMHCKGHQKDDAPTSTGNRRADEVAREVAIRPLSTQATISAGKRTADGSEFEKRTADGSEFESPKKKAKVE

SEQ ID NO: 1406 - protein, 2098 aa, synthetic construct
MPAAKRVKLDGGDKKYSIGLDIGTNSVGWAVITDEYKVPSKKFKVLGNTDRHSIKKNLIGALLFDSGETAEATRLKRTARRRYTRRKNRICYLQEIFSNEMAKVDDSFFHRLEESFLVEEDKKHERHPIFGNIVDEVAYHEKYPTIYHLRKKLVDSTDKADLRLIYLALAHMIKFRGHFLIEGDLNPDNSDVDKLFIQLVQTYNQLFEENPINASGVDAKAILSARLSKSRRLENLIAQLPGEKKNGLFGNLIALSLGLTPNFKSNFDLAEDAKLQLSKDTYDDDLDNLLAQIGDQYADLFLAAKNLSDAILLSDILRVNTEITKAPLSASMIKRYDEHHQDLTLLKALVRQQLPEKYKEIFFDQSKNGYAGYIDGGASQEEFYKFIKPILEKMDGTEELLVKLNREDLLRKQRTFDNGSIPHQIHLGELHAILRRQEDFYPFLKDNREKIEKILTFRIPYYVGPLARGNSRFAWMTRKSEETITPWNFEEVVDKGASAQSFIERMTNFDKNLPNEKVLPKHSLLYEYFTVYNELTKVKYVTEGMRKPAFLSGEQKKAIVDLLFKTNRKVTVKQLKEDYFKKIECFDSVEISGVEDRFNASLGTYHDLLKIIKDKDFLDNEENEDILEDIVLTLTLFEDREMIEERLKTYAHLFDDKVMKQLKRRRYTGWGRLSRKLINGIRDKQSGKTILDFLKSDGFANRNFMQLIHDDSLTFKEDIQKAQVSGQGDSLHEHIANLAGSPAIKKGILQTVKVVDELVKVMGRHKPENIVIEMARENQTTQKGQKNSRERMKRIEEGIKELGSQILKEHPVENTQLQNEKLYLYYLQNGRDMYVDQELDINRLSDYDVDHIVPQSFLKDDSIDNKVLTRSDKARGKSDNVPSEEVVKKMKNYWRQLLNAKLITQRKFDNLTKAERGGLSELDKAGFIKRQLVETRQITKHVAQILDSRMNTKYDENDKLIREVKVITLKSKLVSDFRKDFQFYKVREINNYHHAHDAYLNAVVGTALIKKYPKLESEFVYGDYKVYDVRKMIAKSEQEIGKATAKYFFYSNIMNFFKTEITLANGEIRKRPLIETNGETGEIVWDKGRDFATVRKVLSMPQVNIVKKTEVQTGGFSKESILPKRNSDKLIARKKDWDPKKYGGFDSPTVAYSVLVVAKVEKGKSKKLKSVKELLGITIMERSSFEKNPIDFLEAKGYKEVKKDLIIKLPKYSLFELENGRKRMLASAGELQKGNELALPSKYVNFLYLASHYEKLKGSPEDNEQKQLFVEQHKHYLDEIIEQISEFSKRVILADANLDKVLSAYNKHRDKPIREQAENIIHLFTLTNLGAPAAFKYFDTTIDRKRYTSTKEVLDATLIHQSITGLYETRIDLSQLGGDGGEAAAKGGSGSSGGTAPLEEEYRLFLEAPIQNVTLLEQWKREIPKVWAEINPPGLASTQAPIHVQLLSTALPVRVRQYPITLEAKRSLRETIRKFRAAGILRPVHSPWNTPLLPVRKSGTSEYRMVQDLREVNKRVETIHPTVPNPYTLLSLLPPDRIWYSVLDLKDAFFCIPLAPESQLIFAFEWADAEEGESGQLTWTRLPQGFKNSPTLFNEALNRDLQGFRLDHPSVSLLQYVDDLLIAADTQAACLSATRDLLMTLAELGYRVSGKKAQLCQEEVTYLGFKIHKGSRSLSNSRTQAILQIPVPKTKRQVREFLGKIGYCRLFIPGFAELAQPLYAATRPGNDPLVWGEKEEEAFQSLKLALTQPPALALPSLDKPFQLFVEETSGAAKGVLTQALGPWKRPVAYLSKRLDPVAAGWPRCLRAIAAAALLTREASKLTFGQDIEITSSHNLESLLRSPPDKWLTNARITQYQVLLLDPPRVRFKQTAALNPATLLPETDDTLPIHHCLDTLDSLTSTRPDLTDQPLAQAEATLFTDGSSYIRDGKRYAGAAVVTLDSVIWAEPLPIGTSAQKAELIALTKALEWSKDKSVNIYTDSRYAFATLHVHGMIYRERGWLTAGGKAIKNAPEILALLTAVWLPKRVAVMHCKGHQKDDAPTSTGNRRADEVAREVAIRPLSTQATISAGKRTADGSEFEKRTADGSEFESPKKKAKVE

SEQ ID NO: 1407 - protein, 2095 aa, synthetic construct
MPAAKRVKLDGGDKKYSIGLDIGTNSVGWAVITDEYKVPSKKFKVLGNTDRHSIKKNLIGALLFDSGETAEATRLKRTARRRYTRRKNRICYLQEIFSNEMAKVDDSFFHRLEESFLVEEDKKHERHPIFGNIVDEVAYHEKYPTIYHLRKKLVDSTDKADLRLIYLALAHMIKFRGHFLIEGDLNPDNSDVDKLFIQLVQTYNQLFEENPINASGVDAKAILSARLSKSRRLENLIAQLPGEKKNGLFGNLIALSLGLTPNFKSNFDLAEDAKLQLSKDTYDDDLDNLLAQIGDQYADLFLAAKNLSDAILLSDILRVNTEITKAPLSASMIKRYDEHHQDLTLLKALVRQQLPEKYKEIFFDQSKNGYAGYIDGGASQEEFYKFIKPILEKMDGTEELLVKLNREDLLRKQRTFDNGSIPHQIHLGELHAILRRQEDFYPFLKDNREKIEKILTFRIPYYVGPLARGNSRFAWMTRKSEETITPWNFEEVVDKGASAQSFIERMTNFDKNLPNEKVLPKHSLLYEYFTVYNELTKVKYVTEGMRKPAFLSGEQKKAIVDLLFKTNRKVTVKQLKEDYFKKIECFDSVEISGVEDRFNASLGTYHDLLKIIKDKDFLDNEENEDILEDIVLTLTLFEDREMIEERLKTYAHLFDDKVMKQLKRRRYTGWGRLSRKLINGIRDKQSGKTILDFLKSDGFANRNFMQLIHDDSLTFKEDIQKAQVSGQGDSLHEHIANLAGSPAIKKGILQTVKVVDELVKVMGRHKPENIVIEMARENQTTQKGQKNSRERMKRIEEGIKELGSQILKEHPVENTQLQNEKLYLYYLQNGRDMYVDQELDINRLSDYDVDHIVPQSFLKDDSIDNKVLTRSDKARGKSDNVPSEEVVKKMKNYWRQLLNAKLITQRKFDNLTKAERGGLSELDKAGFIKRQLVETRQITKHVAQILDSRMNTKYDENDKLIREVKVITLKSKLVSDFRKDFQFYKVREINNYHHAHDAYLNAVVGTALIKKYPKLESEFVYGDYKVYDVRKMIAKSEQEIGKATAKYFFYSNIMNFFKTEITLANGEIRKRPLIETNGETGEIVWDKGRDFATVRKVLSMPQVNIVKKTEVQTGGFSKESILPKRNSDKLIARKKDWDPKKYGGFDSPTVAYSVLVVAKVEKGKSKKLKSVKELLGITIMERSSFEKNPIDFLEAKGYKEVKKDLIIKLPKYSLFELENGRKRMLASAGELQKGNELALPSKYVNFLYLASHYEKLKGSPEDNEQKQLFVEQHKHYLDEIIEQISEFSKRVILADANLDKVLSAYNKHRDKPIREQAENIIHLFTLTNLGAPAAFKYFDTTIDRKRYTSTKEVLDATLIHQSITGLYETRIDLSQLGGDGGPAPEAAAKGGTAPLEEEYRLFLEAPIQNVTLLEQWKREIPKVWAEINPPGLASTQAPIHVQLLSTALPVRVRQYPITLEAKRSLRETIRKFRAAGILRPVHSPWNTPLLPVRKSGTSEYRMVQDLREVNKRVETIHPTVPNPYTLLSLLPPDRIWYSVLDLKDAFFCIPLAPESQLIFAFEWADAEEGESGQLTWTRLPQGFKNSPTLFNEALNRDLQGFRLDHPSVSLLQYVDDLLIAADTQAACLSATRDLLMTLAELGYRVSGKKAQLCQEEVTYLGFKIHKGSRSLSNSRTQAILQIPVPKTKRQVREFLGKIGYCRLFIPGFAELAQPLYAATRPGNDPLVWGEKEEEAFQSLKLALTQPPALALPSLDKPFQLFVEETSGAAKGVLTQALGPWKRPVAYLSKRLDPVAAGWPRCLRAIAAAALLTREASKLTFGQDIEITSSHNLESLLRSPPDKWLTNARITQYQVLLLDPPRVRFKQTAALNPATLLPETDDTLPIHHCLDTLDSLTSTRPDLTDQPLAQAEATLFTDGSSYIRDGKRYAGAAVVTLDSVIWAEPLPIGTSAQKAELIALTKALEWSKDKSVNIYTDSRYAFATLHVHGMIYRERGWLTAGGKAIKNAPEILALLTAVWLPKRVAVMHCKGHQKDDAPTSTGNRRADEVAREVAIRPLSTQATISAGKRTADGSEFEKRTADGSEFESPKKKAKVE

SEQ ID NO: 1408 - protein, 2099 aa, synthetic construct
MPAAKRVKLDGGDKKYSIGLDIGTNSVGWAVITDEYKVPSKKFKVLGNTDRHSIKKNLIGALLFDSGETAEATRLKRTARRRYTRRKNRICYLQEIFSNEMAKVDDSFFHRLEESFLVEEDKKHERHPIFGNIVDEVAYHEKYPTIYHLRKKLVDSTDKADLRLIYLALAHMIKFRGHFLIEGDLNPDNSDVDKLFIQLVQTYNQLFEENPINASGVDAKAILSARLSKSRRLENLIAQLPGEKKNGLFGNLIALSLGLTPNFKSNFDLAEDAKLQLSKDTYDDDLDNLLAQIGDQYADLFLAAKNLSDAILLSDILRVNTEITKAPLSASMIKRYDEHHQDLTLLKALVRQQLPEKYKEIFFDQSKNGYAGYIDGGASQEEFYKFIKPILEKMDGTEELLVKLNREDLLRKQRTFDNGSIPHQIHLGELHAILRRQEDFYPFLKDNREKIEKILTFRIPYYVGPLARGNSRFAWMTRKSEETITPWNFEEVVDKGASAQSFIERMTNFDKNLPNEKVLPKHSLLYEYFTVYNELTKVKYVTEGMRKPAFLSGEQKKAIVDLLFKTNRKVTVKQLKEDYFKKIECFDSVEISGVEDRFNASLGTYHDLLKIIKDKDFLDNEENEDILEDIVLTLTLFEDREMIEERLKTYAHLFDDKVMKQLKRRRYTGWGRLSRKLINGIRDKQSGKTILDFLKSDGFANRNFMQLIHDDSLTFKEDIQKAQVSGQGDSLHEHIANLAGSPAIKKGILQTVKVVDELVKVMGRHKPENIVIEMARENQTTQKGQKNSRERMKRIEEGIKELGSQILKEHPVENTQLQNEKLYLYYLQNGRDMYVDQELDINRLSDYDVDHIVPQSFLKDDSIDNKVLTRSDKARGKSDNVPSEEVVKKMKNYWRQLLNAKLITQRKFDNLTKAERGGLSELDKAGFIKRQLVETRQITKHVAQILDSRMNTKYDENDKLIREVKVITLKSKLVSDFRKDFQFYKVREINNYHHAHDAYLNAVVGTALIKKYPKLESEFVYGDYKVYDVRKMIAKSEQEIGKATAKYFFYSNIMNFFKTEITLANGEIRKRPLIETNGETGEIVWDKGRDFATVRKVLSMPQVNIVKKTEVQTGGFSKESILPKRNSDKLIARKKDWDPKKYGGFDSPTVAYSVLVVAKVEKGKSKKLKSVKELLGITIMERSSFEKNPIDFLEAKGYKEVKKDLIIKLPKYSLFELENGRKRMLASAGELQKGNELALPSKYVNFLYLASHYEKLKGSPEDNEQKQLFVEQHKHYLDEIIEQISEFSKRVILADANLDKVLSAYNKHRDKPIREQAENIIHLFTLTNLGAPAAFKYFDTTIDRKRYTSTKEVLDATLIHQSITGLYETRIDLSQLGGDGGGSAGSAAGSGEFGGTAPLEEEYRLFLEAPIQNVTLLEQWKREIPKVWAEINPPGLASTQAPIHVQLLSTALPVRVRQYPITLEAKRSLRETIRKFRAAGILRPVHSPWNTPLLPVRKSGTSEYRMVQDLREVNKRVETIHPTVPNPYTLLSLLPPDRIWYSVLDLKDAFFCIPLAPESQLIFAFEWADAEEGESGQLTWTRLPQGFKNSPTLFNEALNRDLQGFRLDHPSVSLLQYVDDLLIAADTQAACLSATRDLLMTLAELGYRVSGKKAQLCQEEVTYLGFKIHKGSRSLSNSRTQAILQIPVPKTKRQVREFLGKIGYCRLFIPGFAELAQPLYAATRPGNDPLVWGEKEEEAFQSLKLALTQPPALALPSLDKPFQLFVEETSGAAKGVLTQALGPWKRPVAYLSKRLDPVAAGWPRCLRAIAAAALLTREASKLTFGQDIEITSSHNLESLLRSPPDKWLTNARITQYQVLLLDPPRVRFKQTAALNPATLLPETDDTLPIHHCLDTLDSLTSTRPDLTDQPLAQAEATLFTDGSSYIRDGKRYAGAAVVTLDSVIWAEPLPIGTSAQKAELIALTKALEWSKDKSVNIYTDSRYAFATLHVHGMIYRERGWLTAGGKAIKNAPEILALLTAVWLPKRVAVMHCKGHQKDDAPTSTGNRRADEVAREVAIRPLSTQATISAGKRTADGSEFEKRTADGSEFESPKKKAKVE

SEQ ID NO: 1409 - protein, 2096 aa, synthetic construct
MPAAKRVKLDGGDKKYSIGLDIGTNSVGWAVITDEYKVPSKKFKVLGNTDRHSIKKNLIGALLFDSGETAEATRLKRTARRRYTRRKNRICYLQEIFSNEMAKVDDSFFHRLEESFLVEEDKKHERHPIFGNIVDEVAYHEKYPTIYHLRKKLVDSTDKADLRLIYLALAHMIKFRGHFLIEGDLNPDNSDVDKLFIQLVQTYNQLFEENPINASGVDAKAILSARLSKSRRLENLIAQLPGEKKNGLFGNLIALSLGLTPNFKSNFDLAEDAKLQLSKDTYDDDLDNLLAQIGDQYADLFLAAKNLSDAILLSDILRVNTEITKAPLSASMIKRYDEHHQDLTLLKALVRQQLPEKYKEIFFDQSKNGYAGYIDGGASQEEFYKFIKPILEKMDGTEELLVKLNREDLLRKQRTFDNGSIPHQIHLGELHAILRRQEDFYPFLKDNREKIEKILTFRIPYYVGPLARGNSRFAWMTRKSEETITPWNFEEVVDKGASAQSFIERMTNFDKNLPNEKVLPKHSLLYEYFTVYNELTKVKYVTEGMRKPAFLSGEQKKAIVDLLFKTNRKVTVKQLKEDYFKKIECFDSVEISGVEDRFNASLGTYHDLLKIIKDKDFLDNEENEDILEDIVLTLTLFEDREMIEERLKTYAHLFDDKVMKQLKRRRYTGWGRLSRKLINGIRDKQSGKTILDFLKSDGFANRNFMQLIHDDSLTFKEDIQKAQVSGQGDSLHEHIANLAGSPAIKKGILQTVKVVDELVKVMGRHKPENIVIEMARENQTTQKGQKNSRERMKRIEEGIKELGSQILKEHPVENTQLQNEKLYLYYLQNGRDMYVDQELDINRLSDYDVDHIVPQSFLKDDSIDNKVLTRSDKARGKSDNVPSEEVVKKMKNYWRQLLNAKLITQRKFDNLTKAERGGLSELDKAGFIKRQLVETRQITKHVAQILDSRMNTKYDENDKLIREVKVITLKSKLVSDFRKDFQFYKVREINNYHHAHDAYLNAVVGTALIKKYPKLESEFVYGDYKVYDVRKMIAKSEQEIGKATAKYFFYSNIMNFFKTEITLANGEIRKRPLIETNGETGEIVWDKGRDFATVRKVLSMPQVNIVKKTEVQTGGFSKESILPKRNSDKLIARKKDWDPKKYGGFDSPTVAYSVLVVAKVEKGKSKKLKSVKELLGITIMERSSFEKNPIDFLEAKGYKEVKKDLIIKLPKYSLFELENGRKRMLASAGELQKGNELALPSKYVNFLYLASHYEKLKGSPEDNEQKQLFVEQHKHYLDEIIEQISEFSKRVILADANLDKVLSAYNKHRDKPIREQAENIIHLFTLTNLGAPAAFKYFDTTIDRKRYTSTKEVLDATLIHQSITGLYETRIDLSQLGGDGGGGSPAPGSSGGTAPLEEEYRLFLEAPIQNVTLLEQWKREIPKVWAEINPPGLASTQAPIHVQLLSTALPVRVRQYPITLEAKRSLRETIRKFRAAGILRPVHSPWNTPLLPVRKSGTSEYRMVQDLREVNKRVETIHPTVPNPYTLLSLLPPDRIWYSVLDLKDAFFCIPLAPESQLIFAFEWADAEEGESGQLTWTRLPQGFKNSPTLFNEALNRDLQGFRLDHPSVSLLQYVDDLLIAADTQAACLSATRDLLMTLAELGYRVSGKKAQLCQEEVTYLGFKIHKGSRSLSNSRTQAILQIPVPKTKRQVREFLGKIGYCRLFIPGFAELAQPLYAATRPGNDPLVWGEKEEEAFQSLKLALTQPPALALPSLDKPFQLFVEETSGAAKGVLTQALGPWKRPVAYLSKRLDPVAAGWPRCLRAIAAAALLTREASKLTFGQDIEITSSHNLESLLRSPPDKWLTNARITQYQVLLLDPPRVRFKQTAALNPATLLPETDDTLPIHHCLDTLDSLTSTRPDLTDQPLAQAEATLFTDGSSYIRDGKRYAGAAVVTLDSVIWAEPLPIGTSAQKAELIALTKALEWSKDKSVNIYTDSRYAFATLHVHGMIYRERGWLTAGGKAIKNAPEILALLTAVWLPKRVAVMHCKGHQKDDAPTSTGNRRADEVAREVAIRPLSTQATISAGKRTADGSEFEKRTADGSEFESPKKKAKVE

SEQ ID NO: 1410 - protein, 2093 aa, synthetic construct
MPAAKRVKLDGGDKKYSIGLDIGTNSVGWAVITDEYKVPSKKFKVLGNTDRHSIKKNLIGALLFDSGETAEATRLKRTARRRYTRRKNRICYLQEIFSNEMAKVDDSFFHRLEESFLVEEDKKHERHPIFGNIVDEVAYHEKYPTIYHLRKKLVDSTDKADLRLIYLALAHMIKFRGHFLIEGDLNPDNSDVDKLFIQLVQTYNQLFEENPINASGVDAKAILSARLSKSRRLENLIAQLPGEKKNGLFGNLIALSLGLTPNFKSNFDLAEDAKLQLSKDTYDDDLDNLLAQIGDQYADLFLAAKNLSDAILLSDILRVNTEITKAPLSASMIKRYDEHHQDLTLLKALVRQQLPEKYKEIFFDQSKNGYAGYIDGGASQEEFYKFIKPILEKMDGTEELLVKLNREDLLRKQRTFDNGSIPHQIHLGELHAILRRQEDFYPFLKDNREKIEKILTFRIPYYVGPLARGNSRFAWMTRKSEETITPWNFEEVVDKGASAQSFIERMTNFDKNLPNEKVLPKHSLLYEYFTVYNELTKVKYVTEGMRKPAFLSGEQKKAIVDLLFKTNRKVTVKQLKEDYFKKIECFDSVEISGVEDRFNASLGTYHDLLKIIKDKDFLDNEENEDILEDIVLTLTLFEDREMIEERLKTYAHLFDDKVMKQLKRRRYTGWGRLSRKLINGIRDKQSGKTILDFLKSDGFANRNFMQLIHDDSLTFKEDIQKAQVSGQGDSLHEHIANLAGSPAIKKGILQTVKVVDELVKVMGRHKPENIVIEMARENQTTQKGQKNSRERMKRIEEGIKELGSQILKEHPVENTQLQNEKLYLYYLQNGRDMYVDQELDINRLSDYDVDHIVPQSFLKDDSIDNKVLTRSDKARGKSDNVPSEEVVKKMKNYWRQLLNAKLITQRKFDNLTKAERGGLSELDKAGFIKRQLVETRQITKHVAQILDSRMNTKYDENDKLIREVKVITLKSKLVSDFRKDFQFYKVREINNYHHAHDAYLNAVVGTALIKKYPKLESEFVYGDYKVYDVRKMIAKSEQEIGKATAKYFFYSNIMNFFKTEITLANGEIRKRPLIETNGETGEIVWDKGRDFATVRKVLSMPQVNIVKKTEVQTGGFSKESILPKRNSDKLIARKKDWDPKKYGGFDSPTVAYSVLVVAKVEKGKSKKLKSVKELLGITIMERSSFEKNPIDFLEAKGYKEVKKDLIIKLPKYSLFELENGRKRMLASAGELQKGNELALPSKYVNFLYLASHYEKLKGSPEDNEQKQLFVEQHKHYLDEIIEQISEFSKRVILADANLDKVLSAYNKHRDKPIREQAENIIHLFTLTNLGAPAAFKYFDTTIDRKRYTSTKEVLDATLIHQSITGLYETRIDLSQLGGDGGPAPGGGGGTAPLEEEYRLFLEAPIQNVTLLEQWKREIPKVWAEINPPGLASTQAPIHVQLLSTALPVRVRQYPITLEAKRSLRETIRKFRAAGILRPVHSPWNTPLLPVRKSGTSEYRMVQDLREVNKRVETIHPTVPNPYTLLSLLPPDRIWYSVLDLKDAFFCIPLAPESQLIFAFEWADAEEGESGQLTWTRLPQGFKNSPTLFNEALNRDLQGFRLDHPSVSLLQYVDDLLIAADTQAACLSATRDLLMTLAELGYRVSGKKAQLCQEEVTYLGFKIHKGSRSLSNSRTQAILQIPVPKTKRQVREFLGKIGYCRLFIPGFAELAQPLYAATRPGNDPLVWGEKEEEAFQSLKLALTQPPALALPSLDKPFQLFVEETSGAAKGVLTQALGPWKRPVAYLSKRLDPVAAGWPRCLRAIAAAALLTREASKLTFGQDIEITSSHNLESLLRSPPDKWLTNARITQYQVLLLDPPRVRFKQTAALNPATLLPETDDTLPIHHCLDTLDSLTSTRPDLTDQPLAQAEATLFTDGSSYIRDGKRYAGAAVVTLDSVIWAEPLPIGTSAQKAELIALTKALEWSKDKSVNIYTDSRYAFATLHVHGMIYRERGWLTAGGKAIKNAPEILALLTAVWLPKRVAVMHCKGHQKDDAPTSTGNRRADEVAREVAIRPLSTQATISAGKRTADGSEFEKRTADGSEFESPKKKAKVE

SEQ ID NO: 1411 - protein, 2096 aa, synthetic construct
MPAAKRVKLDGGDKKYSIGLDIGTNSVGWAVITDEYKVPSKKFKVLGNTDRHSIKKNLIGALLFDSGETAEATRLKRTARRRYTRRKNRICYLQEIFSNEMAKVDDSFFHRLEESFLVEEDKKHERHPIFGNIVDEVAYHEKYPTIYHLRKKLVDSTDKADLRLIYLALAHMIKFRGHFLIEGDLNPDNSDVDKLFIQLVQTYNQLFEENPINASGVDAKAILSARLSKSRRLENLIAQLPGEKKNGLFGNLIALSLGLTPNFKSNFDLAEDAKLQLSKDTYDDDLDNLLAQIGDQYADLFLAAKNLSDAILLSDILRVNTEITKAPLSASMIKRYDEHHQDLTLLKALVRQQLPEKYKEIFFDQSKNGYAGYIDGGASQEEFYKFIKPILEKMDGTEELLVKLNREDLLRKQRTFDNGSIPHQIHLGELHAILRRQEDFYPFLKDNREKIEKILTFRIPYYVGPLARGNSRFAWMTRKSEETITPWNFEEVVDKGASAQSFIERMTNFDKNLPNEKVLPKHSLLYEYFTVYNELTKVKYVTEGMRKPAFLSGEQKKAIVDLLFKTNRKVTVKQLKEDYFKKIECFDSVEISGVEDRFNASLGTYHDLLKIIKDKDFLDNEENEDILEDIVLTLTLFEDREMIEERLKTYAHLFDDKVMKQLKRRRYTGWGRLSRKLINGIRDKQSGKTILDFLKSDGFANRNFMQLIHDDSLTFKEDIQKAQVSGQGDSLHEHIANLAGSPAIKKGILQTVKVVDELVKVMGRHKPENIVIEMARENQTTQKGQKNSRERMKRIEEGIKELGSQILKEHPVENTQLQNEKLYLYYLQNGRDMYVDQELDINRLSDYDVDHIVPQSFLKDDSIDNKVLTRSDKARGKSDNVPSEEVVKKMKNYWRQLLNAKLITQRKFDNLTKAERGGLSELDKAGFIKRQLVETRQITKHVAQILDSRMNTKYDENDKLIREVKVITLKSKLVSDFRKDFQFYKVREINNYHHAHDAYLNAVVGTALIKKYPKLESEFVYGDYKVYDVRKMIAKSEQEIGKATAKYFFYSNIMNFFKTEITLANGEIRKRPLIETNGETGEIVWDKGRDFATVRKVLSMPQVNIVKKTEVQTGGFSKESILPKRNSDKLIARKKDWDPKKYGGFDSPTVAYSVLVVAKVEKGKSKKLKSVKELLGITIMERSSFEKNPIDFLEAKGYKEVKKDLIIKLPKYSLFELENGRKRMLASAGELQKGNELALPSKYVNFLYLASHYEKLKGSPEDNEQKQLFVEQHKHYLDEIIEQISEFSKRVILADANLDKVLSAYNKHRDKPIREQAENIIHLFTLTNLGAPAAFKYFDTTIDRKRYTSTKEVLDATLIHQSITGLYETRIDLSQLGGDGGGGGPAPGSSGGTAPLEEEYRLFLEAPIQNVTLLEQWKREIPKVWAEINPPGLASTQAPIHVQLLSTALPVRVRQYPITLEAKRSLRETIRKFRAAGILRPVHSPWNTPLLPVRKSGTSEYRMVQDLREVNKRVETIHPTVPNPYTLLSLLPPDRIWYSVLDLKDAFFCIPLAPESQLIFAFEWADAEEGESGQLTWTRLPQGFKNSPTLFNEALNRDLQGFRLDHPSVSLLQYVDDLLIAADTQAACLSATRDLLMTLAELGYRVSGKKAQLCQEEVTYLGFKIHKGSRSLSNSRTQAILQIPVPKTKRQVREFLGKIGYCRLFIPGFAELAQPLYAATRPGNDPLVWGEKEEEAFQSLKLALTQPPALALPSLDKPFQLFVEETSGAAKGVLTQALGPWKRPVAYLSKRLDPVAAGWPRCLRAIAAAALLTREASKLTFGQDIEITSSHNLESLLRSPPDKWLTNARITQYQVLLLDPPRVRFKQTAALNPATLLPETDDTLPIHHCLDTLDSLTSTRPDLTDQPLAQAEATLFTDGSSYIRDGKRYAGAAVVTLDSVIWAEPLPIGTSAQKAELIALTKALEWSKDKSVNIYTDSRYAFATLHVHGMIYRERGWLTAGGKAIKNAPEILALLTAVWLPKRVAVMHCKGHQKDDAPTSTGNRRADEVAREVAIRPLSTQATISAGKRTADGSEFEKRTADGSEFESPKKKAKVE

SEQ ID NO: 1412 - protein, 2093 aa, synthetic construct
MPAAKRVKLDGGDKKYSIGLDIGTNSVGWAVITDEYKVPSKKFKVLGNTDRHSIKKNLIGALLFDSGETAEATRLKRTARRRYTRRKNRICYLQEIFSNEMAKVDDSFFHRLEESFLVEEDKKHERHPIFGNIVDEVAYHEKYPTIYHLRKKLVDSTDKADLRLIYLALAHMIKFRGHFLIEGDLNPDNSDVDKLFIQLVQTYNQLFEENPINASGVDAKAILSARLSKSRRLENLIAQLPGEKKNGLFGNLIALSLGLTPNFKSNFDLAEDAKLQLSKDTYDDDLDNLLAQIGDQYADLFLAAKNLSDAILLSDILRVNTEITKAPLSASMIKRYDEHHQDLTLLKALVRQQLPEKYKEIFFDQSKNGYAGYIDGGASQEEFYKFIKPILEKMDGTEELLVKLNREDLLRKQRTFDNGSIPHQIHLGELHAILRRQEDFYPFLKDNREKIEKILTFRIPYYVGPLARGNSRFAWMTRKSEETITPWNFEEVVDKGASAQSFIERMTNFDKNLPNEKVLPKHSLLYEYFTVYNELTKVKYVTEGMRKPAFLSGEQKKAIVDLLFKTNRKVTVKQLKEDYFKKIECFDSVEISGVEDRFNASLGTYHDLLKIIKDKDFLDNEENEDILEDIVLTLTLFEDREMIEERLKTYAHLFDDKVMKQLKRRRYTGWGRLSRKLINGIRDKQSGKTILDFLKSDGFANRNFMQLIHDDSLTFKEDIQKAQVSGQGDSLHEHIANLAGSPAIKKGILQTVKVVDELVKVMGRHKPENIVIEMARENQTTQKGQKNSRERMKRIEEGIKELGSQILKEHPVENTQLQNEKLYLYYLQNGRDMYVDQELDINRLSDYDVDHIVPQSFLKDDSIDNKVLTRSDKARGKSDNVPSEEVVKKMKNYWRQLLNAKLITQRKFDNLTKAERGGLSELDKAGFIKRQLVETRQITKHVAQILDSRMNTKYDENDKLIREVKVITLKSKLVSDFRKDFQFYKVREINNYHHAHDAYLNAVVGTALIKKYPKLESEFVYGDYKVYDVRKMIAKSEQEIGKATAKYFFYSNIMNFFKTEITLANGEIRKRPLIETNGETGEIVWDKGRDFATVRKVLSMPQVNIVKKTEVQTGGFSKESILPKRNSDKLIARKKDWDPKKYGGFDSPTVAYSVLVVAKVEKGKSKKLKSVKELLGITIMERSSFEKNPIDFLEAKGYKEVKKDLIIKLPKYSLFELENGRKRMLASAGELQKGNELALPSKYVNFLYLASHYEKLKGSPEDNEQKQLFVEQHKHYLDEIIEQISEFSKRVILADANLDKVLSAYNKHRDKPIREQAENIIHLFTLTNLGAPAAFKYFDTTIDRKRYTSTKEVLDATLIHQSITGLYETRIDLSQLGGDGGGGSGSSGGTAPLEEEYRLFLEAPIQNVTLLEQWKREIPKVWAEINPPGLASTQAPIHVQLLSTALPVRVRQYPITLEAKRSLRETIRKFRAAGILRPVHSPWNTPLLPVRKSGTSEYRMVQDLREVNKRVETIHPTVPNPYTLLSLLPPDRIWYSVLDLKDAFFCIPLAPESQLIFAFEWADAEEGESGQLTWTRLPQGFKNSPTLFNEALNRDLQGFRLDHPSVSLLQYVDDLLIAADTQAACLSATRDLLMTLAELGYRVSGKKAQLCQEEVTYLGFKIHKGSRSLSNSRTQAILQIPVPKTKRQVREFLGKIGYCRLFIPGFAELAQPLYAATRPGNDPLVWGEKEEEAFQSLKLALTQPPALALPSLDKPFQLFVEETSGAAKGVLTQALGPWKRPVAYLSKRLDPVAAGWPRCLRAIAAAALLTREASKLTFGQDIEITSSHNLESLLRSPPDKWLTNARITQYQVLLLDPPRVRFKQTAALNPATLLPETDDTLPIHHCLDTLDSLTSTRPDLTDQPLAQAEATLFTDGSSYIRDGKRYAGAAVVTLDSVIWAEPLPIGTSAQKAELIALTKALEWSKDKSVNIYTDSRYAFATLHVHGMIYRERGWLTAGGKAIKNAPEILALLTAVWLPKRVAVMHCKGHQKDDAPTSTGNRRADEVAREVAIRPLSTQATISAGKRTADGSEFEKRTADGSEFESPKKKAKVE

SEQ ID NO: 1413 - protein, 2096 aa, synthetic construct
MPAAKRVKLDGGDKKYSIGLDIGTNSVGWAVITDEYKVPSKKFKVLGNTDRHSIKKNLIGALLFDSGETAEATRLKRTARRRYTRRKNRICYLQEIFSNEMAKVDDSFFHRLEESFLVEEDKKHERHPIFGNIVDEVAYHEKYPTIYHLRKKLVDSTDKADLRLIYLALAHMIKFRGHFLIEGDLNPDNSDVDKLFIQLVQTYNQLFEENPINASGVDAKAILSARLSKSRRLENLIAQLPGEKKNGLFGNLIALSLGLTPNFKSNFDLAEDAKLQLSKDTYDDDLDNLLAQIGDQYADLFLAAKNLSDAILLSDILRVNTEITKAPLSASMIKRYDEHHQDLTLLKALVRQQLPEKYKEIFFDQSKNGYAGYIDGGASQEEFYKFIKPILEKMDGTEELLVKLNREDLLRKQRTFDNGSIPHQIHLGELHAILRRQEDFYPFLKDNREKIEKILTFRIPYYVGPLARGNSRFAWMTRKSEETITPWNFEEVVDKGASAQSFIERMTNFDKNLPNEKVLPKHSLLYEYFTVYNELTKVKYVTEGMRKPAFLSGEQKKAIVDLLFKTNRKVTVKQLKEDYFKKIECFDSVEISGVEDRFNASLGTYHDLLKIIKDKDFLDNEENEDILEDIVLTLTLFEDREMIEERLKTYAHLFDDKVMKQLKRRRYTGWGRLSRKLINGIRDKQSGKTILDFLKSDGFANRNFMQLIHDDSLTFKEDIQKAQVSGQGDSLHEHIANLAGSPAIKKGILQTVKVVDELVKVMGRHKPENIVIEMARENQTTQKGQKNSRERMKRIEEGIKELGSQILKEHPVENTQLQNEKLYLYYLQNGRDMYVDQELDINRLSDYDVDHIVPQSFLKDDSIDNKVLTRSDKARGKSDNVPSEEVVKKMKNYWRQLLNAKLITQRKFDNLTKAERGGLSELDKAGFIKRQLVETRQITKHVAQILDSRMNTKYDENDKLIREVKVITLKSKLVSDFRKDFQFYKVREINNYHHAHDAYLNAVVGTALIKKYPKLESEFVYGDYKVYDVRKMIAKSEQEIGKATAKYFFYSNIMNFFKTEITLANGEIRKRPLIETNGETGEIVWDKGRDFATVRKVLSMPQVNIVKKTEVQTGGFSKESILPKRNSDKLIARKKDWDPKKYGGFDSPTVAYSVLVVAKVEKGKSKKLKSVKELLGITIMERSSFEKNPIDFLEAKGYKEVKKDLIIKLPKYSLFELENGRKRMLASAGELQKGNELALPSKYVNFLYLASHYEKLKGSPEDNEQKQLFVEQHKHYLDEIIEQISEFSKRVILADANLDKVLSAYNKHRDKPIREQAENIIHLFTLTNLGAPAAFKYFDTTIDRKRYTSTKEVLDATLIHQSITGLYETRIDLSQLGGDGGGSSGGGGGSGGTAPLEEEYRLFLEAPIQNVTLLEQWKREIPKVWAEINPPGLASTQAPIHVQLLSTALPVRVRQYPITLEAKRSLRETIRKFRAAGILRPVHSPWNTPLLPVRKSGTSEYRMVQDLREVNKRVETIHPTVPNPYTLLSLLPPDRIWYSVLDLKDAFFCIPLAPESQLIFAFEWADAEEGESGQLTWTRLPQGFKNSPTLFNEALNRDLQGFRLDHPSVSLLQYVDDLLIAADTQAACLSATRDLLMTLAELGYRVSGKKAQLCQEEVTYLGFKIHKGSRSLSNSRTQAILQIPVPKTKRQVREFLGKIGYCRLFIPGFAELAQPLYAATRPGNDPLVWGEKEEEAFQSLKLALTQPPALALPSLDKPFQLFVEETSGAAKGVLTQALGPWKRPVAYLSKRLDPVAAGWPRCLRAIAAAALLTREASKLTFGQDIEITSSHNLESLLRSPPDKWLTNARITQYQVLLLDPPRVRFKQTAALNPATLLPETDDTLPIHHCLDTLDSLTSTRPDLTDQPLAQAEATLFTDGSSYIRDGKRYAGAAVVTLDSVIWAEPLPIGTSAQKAELIALTKALEWSKDKSVNIYTDSRYAFATLHVHGMIYRERGWLTAGGKAIKNAPEILALLTAVWLPKRVAVMHCKGHQKDDAPTSTGNRRADEVAREVAIRPLSTQATISAGKRTADGSEFEKRTADGSEFESPKKKAKVE

SEQ ID NO: 1414 - protein, 2090 aa, synthetic construct
MPAAKRVKLDGGDKKYSIGLDIGTNSVGWAVITDEYKVPSKKFKVLGNTDRHSIKKNLIGALLFDSGETAEATRLKRTARRRYTRRKNRICYLQEIFSNEMAKVDDSFFHRLEESFLVEEDKKHERHPIFGNIVDEVAYHEKYPTIYHLRKKLVDSTDKADLRLIYLALAHMIKFRGHFLIEGDLNPDNSDVDKLFIQLVQTYNQLFEENPINASGVDAKAILSARLSKSRRLENLIAQLPGEKKNGLFGNLIALSLGLTPNFKSNFDLAEDAKLQLSKDTYDDDLDNLLAQIGDQYADLFLAAKNLSDAILLSDILRVNTEITKAPLSASMIKRYDEHHQDLTLLKALVRQQLPEKYKEIFFDQSKNGYAGYIDGGASQEEFYKFIKPILEKMDGTEELLVKLNREDLLRKQRTFDNGSIPHQIHLGELHAILRRQEDFYPFLKDNREKIEKILTFRIPYYVGPLARGNSRFAWMTRKSEETITPWNFEEVVDKGASAQSFIERMTNFDKNLPNEKVLPKHSLLYEYFTVYNELTKVKYVTEGMRKPAFLSGEQKKAIVDLLFKTNRKVTVKQLKEDYFKKIECFDSVEISGVEDRFNASLGTYHDLLKIIKDKDFLDNEENEDILEDIVLTLTLFEDREMIEERLKTYAHLFDDKVMKQLKRRRYTGWGRLSRKLINGIRDKQSGKTILDFLKSDGFANRNFMQLIHDDSLTFKEDIQKAQVSGQGDSLHEHIANLAGSPAIKKGILQTVKVVDELVKVMGRHKPENIVIEMARENQTTQKGQKNSRERMKRIEEGIKELGSQILKEHPVENTQLQNEKLYLYYLQNGRDMYVDQELDINRLSDYDVDHIVPQSFLKDDSIDNKVLTRSDKARGKSDNVPSEEVVKKMKNYWRQLLNAKLITQRKFDNLTKAERGGLSELDKAGFIKRQLVETRQITKHVAQILDSRMNTKYDENDKLIREVKVITLKSKLVSDFRKDFQFYKVREINNYHHAHDAYLNAVVGTALIKKYPKLESEFVYGDYKVYDVRKMIAKSEQEIGKATAKYFFYSNIMNFFKTEITLANGEIRKRPLIETNGETGEIVWDKGRDFATVRKVLSMPQVNIVKKTEVQTGGFSKESILPKRNSDKLIARKKDWDPKKYGGFDSPTVAYSVLVVAKVEKGKSKKLKSVKELLGITIMERSSFEKNPIDFLEAKGYKEVKKDLIIKLPKYSLFELENGRKRMLASAGELQKGNELALPSKYVNFLYLASHYEKLKGSPEDNEQKQLFVEQHKHYLDEIIEQISEFSKRVILADANLDKVLSAYNKHRDKPIREQAENIIHLFTLTNLGAPAAFKYFDTTIDRKRYTSTKEVLDATLIHQSITGLYETRIDLSQLGGDGGPAPGGTAPLEEEYRLFLEAPIQNVTLLEQWKREIPKVWAEINPPGLASTQAPIHVQLLSTALPVRVRQYPITLEAKRSLRETIRKFRAAGILRPVHSPWNTPLLPVRKSGTSEYRMVQDLREVNKRVETIHPTVPNPYTLLSLLPPDRIWYSVLDLKDAFFCIPLAPESQLIFAFEWADAEEGESGQLTWTRLPQGFKNSPTLFNEALNRDLQGFRLDHPSVSLLQYVDDLLIAADTQAACLSATRDLLMTLAELGYRVSGKKAQLCQEEVTYLGFKIHKGSRSLSNSRTQAILQIPVPKTKRQVREFLGKIGYCRLFIPGFAELAQPLYAATRPGNDPLVWGEKEEEAFQSLKLALTQPPALALPSLDKPFQLFVEETSGAAKGVLTQALGPWKRPVAYLSKRLDPVAAGWPRCLRAIAAAALLTREASKLTFGQDIEITSSHNLESLLRSPPDKWLTNARITQYQVLLLDPPRVRFKQTAALNPATLLPETDDTLPIHHCLDTLDSLTSTRPDLTDQPLAQAEATLFTDGSSYIRDGKRYAGAAVVTLDSVIWAEPLPIGTSAQKAELIALTKALEWSKDKSVNIYTDSRYAFATLHVHGMIYRERGWLTAGGKAIKNAPEILALLTAVWLPKRVAVMHCKGHQKDDAPTSTGNRRADEVAREVAIRPLSTQATISAGKRTADGSEFEKRTADGSEFESPKKKAKVE

SEQ ID NO: 1415 - protein, 2098 aa, synthetic construct
MPAAKRVKLDGGDKKYSIGLDIGTNSVGWAVITDEYKVPSKKFKVLGNTDRHSIKKNLIGALLFDSGETAEATRLKRTARRRYTRRKNRICYLQEIFSNEMAKVDDSFFHRLEESFLVEEDKKHERHPIFGNIVDEVAYHEKYPTIYHLRKKLVDSTDKADLRLIYLALAHMIKFRGHFLIEGDLNPDNSDVDKLFIQLVQTYNQLFEENPINASGVDAKAILSARLSKSRRLENLIAQLPGEKKNGLFGNLIALSLGLTPNFKSNFDLAEDAKLQLSKDTYDDDLDNLLAQIGDQYADLFLAAKNLSDAILLSDILRVNTEITKAPLSASMIKRYDEHHQDLTLLKALVRQQLPEKYKEIFFDQSKNGYAGYIDGGASQEEFYKFIKPILEKMDGTEELLVKLNREDLLRKQRTFDNGSIPHQIHLGELHAILRRQEDFYPFLKDNREKIEKILTFRIPYYVGPLARGNSRFAWMTRKSEETITPWNFEEVVDKGASAQSFIERMTNFDKNLPNEKVLPKHSLLYEYFTVYNELTKVKYVTEGMRKPAFLSGEQKKAIVDLLFKTNRKVTVKQLKEDYFKKIECFDSVEISGVEDRFNASLGTYHDLLKIIKDKDFLDNEENEDILEDIVLTLTLFEDREMIEERLKTYAHLFDDKVMKQLKRRRYTGWGRLSRKLINGIRDKQSGKTILDFLKSDGFANRNFMQLIHDDSLTFKEDIQKAQVSGQGDSLHEHIANLAGSPAIKKGILQTVKVVDELVKVMGRHKPENIVIEMARENQTTQKGQKNSRERMKRIEEGIKELGSQILKEHPVENTQLQNEKLYLYYLQNGRDMYVDQELDINRLSDYDVDHIVPQSFLKDDSIDNKVLTRSDKARGKSDNVPSEEVVKKMKNYWRQLLNAKLITQRKFDNLTKAERGGLSELDKAGFIKRQLVETRQITKHVAQILDSRMNTKYDENDKLIREVKVITLKSKLVSDFRKDFQFYKVREINNYHHAHDAYLNAVVGTALIKKYPKLESEFVYGDYKVYDVRKMIAKSEQEIGKATAKYFFYSNIMNFFKTEITLANGEIRKRPLIETNGETGEIVWDKGRDFATVRKVLSMPQVNIVKKTEVQTGGFSKESILPKRNSDKLIARKKDWDPKKYGGFDSPTVAYSVLVVAKVEKGKSKKLKSVKELLGITIMERSSFEKNPIDFLEAKGYKEVKKDLIIKLPKYSLFELENGRKRMLASAGELQKGNELALPSKYVNFLYLASHYEKLKGSPEDNEQKQLFVEQHKHYLDEIIEQISEFSKRVILADANLDKVLSAYNKHRDKPIREQAENIIHLFTLTNLGAPAAFKYFDTTIDRKRYTSTKEVLDATLIHQSITGLYETRIDLSQLGGDGGGGGPAPEAAAKGGTAPLEEEYRLFLEAPIQNVTLLEQWKREIPKVWAEINPPGLASTQAPIHVQLLSTALPVRVRQYPITLEAKRSLRETIRKFRAAGILRPVHSPWNTPLLPVRKSGTSEYRMVQDLREVNKRVETIHPTVPNPYTLLSLLPPDRIWYSVLDLKDAFFCIPLAPESQLIFAFEWADAEEGESGQLTWTRLPQGFKNSPTLFNEALNRDLQGFRLDHPSVSLLQYVDDLLIAADTQAACLSATRDLLMTLAELGYRVSGKKAQLCQEEVTYLGFKIHKGSRSLSNSRTQAILQIPVPKTKRQVREFLGKIGYCRLFIPGFAELAQPLYAATRPGNDPLVWGEKEEEAFQSLKLALTQPPALALPSLDKPFQLFVEETSGAAKGVLTQALGPWKRPVAYLSKRLDPVAAGWPRCLRAIAAAALLTREASKLTFGQDIEITSSHNLESLLRSPPDKWLTNARITQYQVLLLDPPRVRFKQTAALNPATLLPETDDTLPIHHCLDTLDSLTSTRPDLTDQPLAQAEATLFTDGSSYIRDGKRYAGAAVVTLDSVIWAEPLPIGTSAQKAELIALTKALEWSKDKSVNIYTDSRYAFATLHVHGMIYRERGWLTAGGKAIKNAPEILALLTAVWLPKRVAVMHCKGHQKDDAPTSTGNRRADEVAREVAIRPLSTQATISAGKRTADGSEFEKRTADGSEFESPKKKAKVE

SEQ ID NO: 1416 - protein, 2098 aa, synthetic construct
MPAAKRVKLDGGDKKYSIGLDIGTNSVGWAVITDEYKVPSKKFKVLGNTDRHSIKKNLIGALLFDSGETAEATRLKRTARRRYTRRKNRICYLQEIFSNEMAKVDDSFFHRLEESFLVEEDKKHERHPIFGNIVDEVAYHEKYPTIYHLRKKLVDSTDKADLRLIYLALAHMIKFRGHFLIEGDLNPDNSDVDKLFIQLVQTYNQLFEENPINASGVDAKAILSARLSKSRRLENLIAQLPGEKKNGLFGNLIALSLGLTPNFKSNFDLAEDAKLQLSKDTYDDDLDNLLAQIGDQYADLFLAAKNLSDAILLSDILRVNTEITKAPLSASMIKRYDEHHQDLTLLKALVRQQLPEKYKEIFFDQSKNGYAGYIDGGASQEEFYKFIKPILEKMDGTEELLVKLNREDLLRKQRTFDNGSIPHQIHLGELHAILRRQEDFYPFLKDNREKIEKILTFRIPYYVGPLARGNSRFAWMTRKSEETITPWNFEEVVDKGASAQSFIERMTNFDKNLPNEKVLPKHSLLYEYFTVYNELTKVKYVTEGMRKPAFLSGEQKKAIVDLLFKTNRKVTVKQLKEDYFKKIECFDSVEISGVEDRFNASLGTYHDLLKIIKDKDFLDNEENEDILEDIVLTLTLFEDREMIEERLKTYAHLFDDKVMKQLKRRRYTGWGRLSRKLINGIRDKQSGKTILDFLKSDGFANRNFMQLIHDDSLTFKEDIQKAQVSGQGDSLHEHIANLAGSPAIKKGILQTVKVVDELVKVMGRHKPENIVIEMARENQTTQKGQKNSRERMKRIEEGIKELGSQILKEHPVENTQLQNEKLYLYYLQNGRDMYVDQELDINRLSDYDVDHIVPQSFLKDDSIDNKVLTRSDKARGKSDNVPSEEVVKKMKNYWRQLLNAKLITQRKFDNLTKAERGGLSELDKAGFIKRQLVETRQITKHVAQILDSRMNTKYDENDKLIREVKVITLKSKLVSDFRKDFQFYKVREINNYHHAHDAYLNAVVGTALIKKYPKLESEFVYGDYKVYDVRKMIAKSEQEIGKATAKYFFYSNIMNFFKTEITLANGEIRKRPLIETNGETGEIVWDKGRDFATVRKVLSMPQVNIVKKTEVQTGGFSKESILPKRNSDKLIARKKDWDPKKYGGFDSPTVAYSVLVVAKVEKGKSKKLKSVKELLGITIMERSSFEKNPIDFLEAKGYKEVKKDLIIKLPKYSLFELENGRKRMLASAGELQKGNELALPSKYVNFLYLASHYEKLKGSPEDNEQKQLFVEQHKHYLDEIIEQISEFSKRVILADANLDKVLSAYNKHRDKPIREQAENIIHLFTLTNLGAPAAFKYFDTTIDRKRYTSTKEVLDATLIHQSITGLYETRIDLSQLGGDGGEAAAKGSSPAPGGTAPLEEEYRLFLEAPIQNVTLLEQWKREIPKVWAEINPPGLASTQAPIHVQLLSTALPVRVRQYPITLEAKRSLRETIRKFRAAGILRPVHSPWNTPLLPVRKSGTSEYRMVQDLREVNKRVETIHPTVPNPYTLLSLLPPDRIWYSVLDLKDAFFCIPLAPESQLIFAFEWADAEEGESGQLTWTRLPQGFKNSPTLFNEALNRDLQGFRLDHPSVSLLQYVDDLLIAADTQAACLSATRDLLMTLAELGYRVSGKKAQLCQEEVTYLGFKIHKGSRSLSNSRTQAILQIPVPKTKRQVREFLGKIGYCRLFIPGFAELAQPLYAATRPGNDPLVWGEKEEEAFQSLKLALTQPPALALPSLDKPFQLFVEETSGAAKGVLTQALGPWKRPVAYLSKRLDPVAAGWPRCLRAIAAAALLTREASKLTFGQDIEITSSHNLESLLRSPPDKWLTNARITQYQVLLLDPPRVRFKQTAALNPATLLPETDDTLPIHHCLDTLDSLTSTRPDLTDQPLAQAEATLFTDGSSYIRDGKRYAGAAVVTLDSVIWAEPLPIGTSAQKAELIALTKALEWSKDKSVNIYTDSRYAFATLHVHGMIYRERGWLTAGGKAIKNAPEILALLTAVWLPKRVAVMHCKGHQKDDAPTSTGNRRADEVAREVAIRPLSTQATISAGKRTADGSEFEKRTADGSEFESPKKKAKVE

SEQ ID NO: 1417 - protein, 2090 aa, synthetic construct
MPAAKRVKLDGGDKKYSIGLDIGTNSVGWAVITDEYKVPSKKFKVLGNTDRHSIKKNLIGALLFDSGETAEATRLKRTARRRYTRRKNRICYLQEIFSNEMAKVDDSFFHRLEESFLVEEDKKHERHPIFGNIVDEVAYHEKYPTIYHLRKKLVDSTDKADLRLIYLALAHMIKFRGHFLIEGDLNPDNSDVDKLFIQLVQTYNQLFEENPINASGVDAKAILSARLSKSRRLENLIAQLPGEKKNGLFGNLIALSLGLTPNFKSNFDLAEDAKLQLSKDTYDDDLDNLLAQIGDQYADLFLAAKNLSDAILLSDILRVNTEITKAPLSASMIKRYDEHHQDLTLLKALVRQQLPEKYKEIFFDQSKNGYAGYIDGGASQEEFYKFIKPILEKMDGTEELLVKLNREDLLRKQRTFDNGSIPHQIHLGELHAILRRQEDFYPFLKDNREKIEKILTFRIPYYVGPLARGNSRFAWMTRKSEETITPWNFEEVVDKGASAQSFIERMTNFDKNLPNEKVLPKHSLLYEYFTVYNELTKVKYVTEGMRKPAFLSGEQKKAIVDLLFKTNRKVTVKQLKEDYFKKIECFDSVEISGVEDRFNASLGTYHDLLKIIKDKDFLDNEENEDILEDIVLTLTLFEDREMIEERLKTYAHLFDDKVMKQLKRRRYTGWGRLSRKLINGIRDKQSGKTILDFLKSDGFANRNFMQLIHDDSLTFKEDIQKAQVSGQGDSLHEHIANLAGSPAIKKGILQTVKVVDELVKVMGRHKPENIVIEMARENQTTQKGQKNSRERMKRIEEGIKELGSQILKEHPVENTQLQNEKLYLYYLQNGRDMYVDQELDINRLSDYDVDHIVPQSFLKDDSIDNKVLTRSDKARGKSDNVPSEEVVKKMKNYWRQLLNAKLITQRKFDNLTKAERGGLSELDKAGFIKRQLVETRQITKHVAQILDSRMNTKYDENDKLIREVKVITLKSKLVSDFRKDFQFYKVREINNYHHAHDAYLNAVVGTALIKKYPKLESEFVYGDYKVYDVRKMIAKSEQEIGKATAKYFFYSNIMNFFKTEITLANGEIRKRPLIETNGETGEIVWDKGRDFATVRKVLSMPQVNIVKKTEVQTGGFSKESILPKRNSDKLIARKKDWDPKKYGGFDSPTVAYSVLVVAKVEKGKSKKLKSVKELLGITIMERSSFEKNPIDFLEAKGYKEVKKDLIIKLPKYSLFELENGRKRMLASAGELQKGNELALPSKYVNFLYLASHYEKLKGSPEDNEQKQLFVEQHKHYLDEIIEQISEFSKRVILADANLDKVLSAYNKHRDKPIREQAENIIHLFTLTNLGAPAAFKYFDTTIDRKRYTSTKEVLDATLIHQSITGLYETRIDLSQLGGDGGGSSGGTAPLEEEYRLFLEAPIQNVTLLEQWKREIPKVWAEINPPGLASTQAPIHVQLLSTALPVRVRQYPITLEAKRSLRETIRKFRAAGILRPVHSPWNTPLLPVRKSGTSEYRMVQDLREVNKRVETIHPTVPNPYTLLSLLPPDRIWYSVLDLKDAFFCIPLAPESQLIFAFEWADAEEGESGQLTWTRLPQGFKNSPTLFNEALNRDLQGFRLDHPSVSLLQYVDDLLIAADTQAACLSATRDLLMTLAELGYRVSGKKAQLCQEEVTYLGFKIHKGSRSLSNSRTQAILQIPVPKTKRQVREFLGKIGYCRLFIPGFAELAQPLYAATRPGNDPLVWGEKEEEAFQSLKLALTQPPALALPSLDKPFQLFVEETSGAAKGVLTQALGPWKRPVAYLSKRLDPVAAGWPRCLRAIAAAALLTREASKLTFGQDIEITSSHNLESLLRSPPDKWLTNARITQYQVLLLDPPRVRFKQTAALNPATLLPETDDTLPIHHCLDTLDSLTSTRPDLTDQPLAQAEATLFTDGSSYIRDGKRYAGAAVVTLDSVIWAEPLPIGTSAQKAELIALTKALEWSKDKSVNIYTDSRYAFATLHVHGMIYRERGWLTAGGKAIKNAPEILALLTAVWLPKRVAVMHCKGHQKDDAPTSTGNRRADEVAREVAIRPLSTQATISAGKRTADGSEFEKRTADGSEFESPKKKAKVE

SEQ ID NO: 1418 - protein, 2096 aa, synthetic construct
MPAAKRVKLDGGDKKYSIGLDIGTNSVGWAVITDEYKVPSKKFKVLGNTDRHSIKKNLIGALLFDSGETAEATRLKRTARRRYTRRKNRICYLQEIFSNEMAKVDDSFFHRLEESFLVEEDKKHERHPIFGNIVDEVAYHEKYPTIYHLRKKLVDSTDKADLRLIYLALAHMIKFRGHFLIEGDLNPDNSDVDKLFIQLVQTYNQLFEENPINASGVDAKAILSARLSKSRRLENLIAQLPGEKKNGLFGNLIALSLGLTPNFKSNFDLAEDAKLQLSKDTYDDDLDNLLAQIGDQYADLFLAAKNLSDAILLSDILRVNTEITKAPLSASMIKRYDEHHQDLTLLKALVRQQLPEKYKEIFFDQSKNGYAGYIDGGASQEEFYKFIKPILEKMDGTEELLVKLNREDLLRKQRTFDNGSIPHQIHLGELHAILRRQEDFYPFLKDNREKIEKILTFRIPYYVGPLARGNSRFAWMTRKSEETITPWNFEEVVDKGASAQSFIERMTNFDKNLPNEKVLPKHSLLYEYFTVYNELTKVKYVTEGMRKPAFLSGEQKKAIVDLLFKTNRKVTVKQLKEDYFKKIECFDSVEISGVEDRFNASLGTYHDLLKIIKDKDFLDNEENEDILEDIVLTLTLFEDREMIEERLKTYAHLFDDKVMKQLKRRRYTGWGRLSRKLINGIRDKQSGKTILDFLKSDGFANRNFMQLIHDDSLTFKEDIQKAQVSGQGDSLHEHIANLAGSPAIKKGILQTVKVVDELVKVMGRHKPENIVIEMARENQTTQKGQKNSRERMKRIEEGIKELGSQILKEHPVENTQLQNEKLYLYYLQNGRDMYVDQELDINRLSDYDVDHIVPQSFLKDDSIDNKVLTRSDKARGKSDNVPSEEVVKKMKNYWRQLLNAKLITQRKFDNLTKAERGGLSELDKAGFIKRQLVETRQITKHVAQILDSRMNTKYDENDKLIREVKVITLKSKLVSDFRKDFQFYKVREINNYHHAHDAYLNAVVGTALIKKYPKLESEFVYGDYKVYDVRKMIAKSEQEIGKATAKYFFYSNIMNFFKTEITLANGEIRKRPLIETNGETGEIVWDKGRDFATVRKVLSMPQVNIVKKTEVQTGGFSKESILPKRNSDKLIARKKDWDPKKYGGFDSPTVAYSVLVVAKVEKGKSKKLKSVKELLGITIMERSSFEKNPIDFLEAKGYKEVKKDLIIKLPKYSLFELENGRKRMLASAGELQKGNELALPSKYVNFLYLASHYEKLKGSPEDNEQKQLFVEQHKHYLDEIIEQISEFSKRVILADANLDKVLSAYNKHRDKPIREQAENIIHLFTLTNLGAPAAFKYFDTTIDRKRYTSTKEVLDATLIHQSITGLYETRIDLSQLGGDGGGGSGSSGGGGGTAPLEEEYRLFLEAPIQNVTLLEQWKREIPKVWAEINPPGLASTQAPIHVQLLSTALPVRVRQYPITLEAKRSLRETIRKFRAAGILRPVHSPWNTPLLPVRKSGTSEYRMVQDLREVNKRVETIHPTVPNPYTLLSLLPPDRIWYSVLDLKDAFFCIPLAPESQLIFAFEWADAEEGESGQLTWTRLPQGFKNSPTLFNEALNRDLQGFRLDHPSVSLLQYVDDLLIAADTQAACLSATRDLLMTLAELGYRVSGKKAQLCQEEVTYLGFKIHKGSRSLSNSRTQAILQIPVPKTKRQVREFLGKIGYCRLFIPGFAELAQPLYAATRPGNDPLVWGEKEEEAFQSLKLALTQPPALALPSLDKPFQLFVEETSGAAKGVLTQALGPWKRPVAYLSKRLDPVAAGWPRCLRAIAAAALLTREASKLTFGQDIEITSSHNLESLLRSPPDKWLTNARITQYQVLLLDPPRVRFKQTAALNPATLLPETDDTLPIHHCLDTLDSLTSTRPDLTDQPLAQAEATLFTDGSSYIRDGKRYAGAAVVTLDSVIWAEPLPIGTSAQKAELIALTKALEWSKDKSVNIYTDSRYAFATLHVHGMIYRERGWLTAGGKAIKNAPEILALLTAVWLPKRVAVMHCKGHQKDDAPTSTGNRRADEVAREVAIRPLSTQATISAGKRTADGSEFEKRTADGSEFESPKKKAKVE

SEQ ID NO: 1419 - protein, 2098 aa, synthetic construct
MPAAKRVKLDGGDKKYSIGLDIGTNSVGWAVITDEYKVPSKKFKVLGNTDRHSIKKNLIGALLFDSGETAEATRLKRTARRRYTRRKNRICYLQEIFSNEMAKVDDSFFHRLEESFLVEEDKKHERHPIFGNIVDEVAYHEKYPTIYHLRKKLVDSTDKADLRLIYLALAHMIKFRGHFLIEGDLNPDNSDVDKLFIQLVQTYNQLFEENPINASGVDAKAILSARLSKSRRLENLIAQLPGEKKNGLFGNLIALSLGLTPNFKSNFDLAEDAKLQLSKDTYDDDLDNLLAQIGDQYADLFLAAKNLSDAILLSDILRVNTEITKAPLSASMIKRYDEHHQDLTLLKALVRQQLPEKYKEIFFDQSKNGYAGYIDGGASQEEFYKFIKPILEKMDGTEELLVKLNREDLLRKQRTFDNGSIPHQIHLGELHAILRRQEDFYPFLKDNREKIEKILTFRIPYYVGPLARGNSRFAWMTRKSEETITPWNFEEVVDKGASAQSFIERMTNFDKNLPNEKVLPKHSLLYEYFTVYNELTKVKYVTEGMRKPAFLSGEQKKAIVDLLFKTNRKVTVKQLKEDYFKKIECFDSVEISGVEDRFNASLGTYHDLLKIIKDKDFLDNEENEDILEDIVLTLTLFEDREMIEERLKTYAHLFDDKVMKQLKRRRYTGWGRLSRKLINGIRDKQSGKTILDFLKSDGFANRNFMQLIHDDSLTFKEDIQKAQVSGQGDSLHEHIANLAGSPAIKKGILQTVKVVDELVKVMGRHKPENIVIEMARENQTTQKGQKNSRERMKRIEEGIKELGSQILKEHPVENTQLQNEKLYLYYLQNGRDMYVDQELDINRLSDYDVDHIVPQSFLKDDSIDNKVLTRSDKARGKSDNVPSEEVVKKMKNYWRQLLNAKLITQRKFDNLTKAERGGLSELDKAGFIKRQLVETRQITKHVAQILDSRMNTKYDENDKLIREVKVITLKSKLVSDFRKDFQFYKVREINNYHHAHDAYLNAVVGTALIKKYPKLESEFVYGDYKVYDVRKMIAKSEQEIGKATAKYFFYSNIMNFFKTEITLANGEIRKRPLIETNGETGEIVWDKGRDFATVRKVLSMPQVNIVKKTEVQTGGFSKESILPKRNSDKLIARKKDWDPKKYGGFDSPTVAYSVLVVAKVEKGKSKKLKSVKELLGITIMERSSFEKNPIDFLEAKGYKEVKKDLIIKLPKYSLFELENGRKRMLASAGELQKGNELALPSKYVNFLYLASHYEKLKGSPEDNEQKQLFVEQHKHYLDEIIEQISEFSKRVILADANLDKVLSAYNKHRDKPIREQAENIIHLFTLTNLGAPAAFKYFDTTIDRKRYTSTKEVLDATLIHQSITGLYETRIDLSQLGGDGGEAAAKGSSGGGGGTAPLEEEYRLFLEAPIQNVTLLEQWKREIPKVWAEINPPGLASTQAPIHVQLLSTALPVRVRQYPITLEAKRSLRETIRKFRAAGILRPVHSPWNTPLLPVRKSGTSEYRMVQDLREVNKRVETIHPTVPNPYTLLSLLPPDRIWYSVLDLKDAFFCIPLAPESQLIFAFEWADAEEGESGQLTWTRLPQGFKNSPTLFNEALNRDLQGFRLDHPSVSLLQYVDDLLIAADTQAACLSATRDLLMTLAELGYRVSGKKAQLCQEEVTYLGFKIHKGSRSLSNSRTQAILQIPVPKTKRQVREFLGKIGYCRLFIPGFAELAQPLYAATRPGNDPLVWGEKEEEAFQSLKLALTQPPALALPSLDKPFQLFVEETSGAAKGVLTQALGPWKRPVAYLSKRLDPVAAGWPRCLRAIAAAALLTREASKLTFGQDIEITSSHNLESLLRSPPDKWLTNARITQYQVLLLDPPRVRFKQTAALNPATLLPETDDTLPIHHCLDTLDSLTSTRPDLTDQPLAQAEATLFTDGSSYIRDGKRYAGAAVVTLDSVIWAEPLPIGTSAQKAELIALTKALEWSKDKSVNIYTDSRYAFATLHVHGMIYRERGWLTAGGKAIKNAPEILALLTAVWLPKRVAVMHCKGHQKDDAPTSTGNRRADEVAREVAIRPLSTQATISAGKRTADGSEFEKRTADGSEFESPKKKAKVE

SEQ ID NO: 1420 - protein, 2096 aa, synthetic construct
MPAAKRVKLDGGDKKYSIGLDIGTNSVGWAVITDEYKVPSKKFKVLGNTDRHSIKKNLIGALLFDSGETAEATRLKRTARRRYTRRKNRICYLQEIFSNEMAKVDDSFFHRLEESFLVEEDKKHERHPIFGNIVDEVAYHEKYPTIYHLRKKLVDSTDKADLRLIYLALAHMIKFRGHFLIEGDLNPDNSDVDKLFIQLVQTYNQLFEENPINASGVDAKAILSARLSKSRRLENLIAQLPGEKKNGLFGNLIALSLGLTPNFKSNFDLAEDAKLQLSKDTYDDDLDNLLAQIGDQYADLFLAAKNLSDAILLSDILRVNTEITKAPLSASMIKRYDEHHQDLTLLKALVRQQLPEKYKEIFFDQSKNGYAGYIDGGASQEEFYKFIKPILEKMDGTEELLVKLNREDLLRKQRTFDNGSIPHQIHLGELHAILRRQEDFYPFLKDNREKIEKILTFRIPYYVGPLARGNSRFAWMTRKSEETITPWNFEEVVDKGASAQSFIERMTNFDKNLPNEKVLPKHSLLYEYFTVYNELTKVKYVTEGMRKPAFLSGEQKKAIVDLLFKTNRKVTVKQLKEDYFKKIECFDSVEISGVEDRFNASLGTYHDLLKIIKDKDFLDNEENEDILEDIVLTLTLFEDREMIEERLKTYAHLFDDKVMKQLKRRRYTGWGRLSRKLINGIRDKQSGKTILDFLKSDGFANRNFMQLIHDDSLTFKEDIQKAQVSGQGDSLHEHIANLAGSPAIKKGILQTVKVVDELVKVMGRHKPENIVIEMARENQTTQKGQKNSRERMKRIEEGIKELGSQILKEHPVENTQLQNEKLYLYYLQNGRDMYVDQELDINRLSDYDVDHIVPQSFLKDDSIDNKVLTRSDKARGKSDNVPSEEVVKKMKNYWRQLLNAKLITQRKFDNLTKAERGGLSELDKAGFIKRQLVETRQITKHVAQILDSRMNTKYDENDKLIREVKVITLKSKLVSDFRKDFQFYKVREINNYHHAHDAYLNAVVGTALIKKYPKLESEFVYGDYKVYDVRKMIAKSEQEIGKATAKYFFYSNIMNFFKTEITLANGEIRKRPLIETNGETGEIVWDKGRDFATVRKVLSMPQVNIVKKTEVQTGGFSKESILPKRNSDKLIARKKDWDPKKYGGFDSPTVAYSVLVVAKVEKGKSKKLKSVKELLGITIMERSSFEKNPIDFLEAKGYKEVKKDLIIKLPKYSLFELENGRKRMLASAGELQKGNELALPSKYVNFLYLASHYEKLKGSPEDNEQKQLFVEQHKHYLDEIIEQISEFSKRVILADANLDKVLSAYNKHRDKPIREQAENIIHLFTLTNLGAPAAFKYFDTTIDRKRYTSTKEVLDATLIHQSITGLYETRIDLSQLGGDGGGGGGSSGGSGGTAPLEEEYRLFLEAPIQNVTLLEQWKREIPKVWAEINPPGLASTQAPIHVQLLSTALPVRVRQYPITLEAKRSLRETIRKFRAAGILRPVHSPWNTPLLPVRKSGTSEYRMVQDLREVNKRVETIHPTVPNPYTLLSLLPPDRIWYSVLDLKDAFFCIPLAPESQLIFAFEWADAEEGESGQLTWTRLPQGFKNSPTLFNEALNRDLQGFRLDHPSVSLLQYVDDLLIAADTQAACLSATRDLLMTLAELGYRVSGKKAQLCQEEVTYLGFKIHKGSRSLSNSRTQAILQIPVPKTKRQVREFLGKIGYCRLFIPGFAELAQPLYAATRPGNDPLVWGEKEEEAFQSLKLALTQPPALALPSLDKPFQLFVEETSGAAKGVLTQALGPWKRPVAYLSKRLDPVAAGWPRCLRAIAAAALLTREASKLTFGQDIEITSSHNLESLLRSPPDKWLTNARITQYQVLLLDPPRVRFKQTAALNPATLLPETDDTLPIHHCLDTLDSLTSTRPDLTDQPLAQAEATLFTDGSSYIRDGKRYAGAAVVTLDSVIWAEPLPIGTSAQKAELIALTKALEWSKDKSVNIYTDSRYAFATLHVHGMIYRERGWLTAGGKAIKNAPEILALLTAVWLPKRVAVMHCKGHQKDDAPTSTGNRRADEVAREVAIRPLSTQATISAGKRTADGSEFEKRTADGSEFESPKKKAKVE

SEQ ID NO: 1421 - protein, 2100 aa, synthetic construct
MPAAKRVKLDGGDKKYSIGLDIGTNSVGWAVITDEYKVPSKKFKVLGNTDRHSIKKNLIGALLFDSGETAEATRLKRTARRRYTRRKNRICYLQEIFSNEMAKVDDSFFHRLEESFLVEEDKKHERHPIFGNIVDEVAYHEKYPTIYHLRKKLVDSTDKADLRLIYLALAHMIKFRGHFLIEGDLNPDNSDVDKLFIQLVQTYNQLFEENPINASGVDAKAILSARLSKSRRLENLIAQLPGEKKNGLFGNLIALSLGLTPNFKSNFDLAEDAKLQLSKDTYDDDLDNLLAQIGDQYADLFLAAKNLSDAILLSDILRVNTEITKAPLSASMIKRYDEHHQDLTLLKALVRQQLPEKYKEIFFDQSKNGYAGYIDGGASQEEFYKFIKPILEKMDGTEELLVKLNREDLLRKQRTFDNGSIPHQIHLGELHAILRRQEDFYPFLKDNREKIEKILTFRIPYYVGPLARGNSRFAWMTRKSEETITPWNFEEVVDKGASAQSFIERMTNFDKNLPNEKVLPKHSLLYEYFTVYNELTKVKYVTEGMRKPAFLSGEQKKAIVDLLFKTNRKVTVKQLKEDYFKKIECFDSVEISGVEDRFNASLGTYHDLLKIIKDKDFLDNEENEDILEDIVLTLTLFEDREMIEERLKTYAHLFDDKVMKQLKRRRYTGWGRLSRKLINGIRDKQSGKTILDFLKSDGFANRNFMQLIHDDSLTFKEDIQKAQVSGQGDSLHEHIANLAGSPAIKKGILQTVKVVDELVKVMGRHKPENIVIEMARENQTTQKGQKNSRERMKRIEEGIKELGSQILKEHPVENTQLQNEKLYLYYLQNGRDMYVDQELDINRLSDYDVDHIVPQSFLKDDSIDNKVLTRSDKARGKSDNVPSEEVVKKMKNYWRQLLNAKLITQRKFDNLTKAERGGLSELDKAGFIKRQLVETRQITKHVAQILDSRMNTKYDENDKLIREVKVITLKSKLVSDFRKDFQFYKVREINNYHHAHDAYLNAVVGTALIKKYPKLESEFVYGDYKVYDVRKMIAKSEQEIGKATAKYFFYSNIMNFFKTEITLANGEIRKRPLIETNGETGEIVWDKGRDFATVRKVLSMPQVNIVKKTEVQTGGFSKESILPKRNSDKLIARKKDWDPKKYGGFDSPTVAYSVLVVAKVEKGKSKKLKSVKELLGITIMERSSFEKNPIDFLEAKGYKEVKKDLIIKLPKYSLFELENGRKRMLASAGELQKGNELALPSKYVNFLYLASHYEKLKGSPEDNEQKQLFVEQHKHYLDEIIEQISEFSKRVILADANLDKVLSAYNKHRDKPIREQAENIIHLFTLTNLGAPAAFKYFDTTIDRKRYTSTKEVLDATLIHQSITGLYETRIDLSQLGGDGGPAPAPAPAPAPAPGGTAPLEEEYRLFLEAPIQNVTLLEQWKREIPKVWAEINPPGLASTQAPIHVQLLSTALPVRVRQYPITLEAKRSLRETIRKFRAAGILRPVHSPWNTPLLPVRKSGTSEYRMVQDLREVNKRVETIHPTVPNPYTLLSLLPPDRIWYSVLDLKDAFFCIPLAPESQLIFAFEWADAEEGESGQLTWTRLPQGFKNSPTLFNEALNRDLQGFRLDHPSVSLLQYVDDLLIAADTQAACLSATRDLLMTLAELGYRVSGKKAQLCQEEVTYLGFKIHKGSRSLSNSRTQAILQIPVPKTKRQVREFLGKIGYCRLFIPGFAELAQPLYAATRPGNDPLVWGEKEEEAFQSLKLALTQPPALALPSLDKPFQLFVEETSGAAKGVLTQALGPWKRPVAYLSKRLDPVAAGWPRCLRAIAAAALLTREASKLTFGQDIEITSSHNLESLLRSPPDKWLTNARITQYQVLLLDPPRVRFKQTAALNPATLLPETDDTLPIHHCLDTLDSLTSTRPDLTDQPLAQAEATLFTDGSSYIRDGKRYAGAAVVTLDSVIWAEPLPIGTSAQKAELIALTKALEWSKDKSVNIYTDSRYAFATLHVHGMIYRERGWLTAGGKAIKNAPEILALLTAVWLPKRVAVMHCKGHQKDDAPTSTGNRRADEVAREVAIRPLSTQATISAGKRTADGSEFEKRTADGSEFESPKKKAKVE

SEQ ID NO: 1422 - protein, 2095 aa, synthetic construct
MPAAKRVKLDGGDKKYSIGLDIGTNSVGWAVITDEYKVPSKKFKVLGNTDRHSIKKNLIGALLFDSGETAEATRLKRTARRRYTRRKNRICYLQEIFSNEMAKVDDSFFHRLEESFLVEEDKKHERHPIFGNIVDEVAYHEKYPTIYHLRKKLVDSTDKADLRLIYLALAHMIKFRGHFLIEGDLNPDNSDVDKLFIQLVQTYNQLFEENPINASGVDAKAILSARLSKSRRLENLIAQLPGEKKNGLFGNLIALSLGLTPNFKSNFDLAEDAKLQLSKDTYDDDLDNLLAQIGDQYADLFLAAKNLSDAILLSDILRVNTEITKAPLSASMIKRYDEHHQDLTLLKALVRQQLPEKYKEIFFDQSKNGYAGYIDGGASQEEFYKFIKPILEKMDGTEELLVKLNREDLLRKQRTFDNGSIPHQIHLGELHAILRRQEDFYPFLKDNREKIEKILTFRIPYYVGPLARGNSRFAWMTRKSEETITPWNFEEVVDKGASAQSFIERMTNFDKNLPNEKVLPKHSLLYEYFTVYNELTKVKYVTEGMRKPAFLSGEQKKAIVDLLFKTNRKVTVKQLKEDYFKKIECFDSVEISGVEDRFNASLGTYHDLLKIIKDKDFLDNEENEDILEDIVLTLTLFEDREMIEERLKTYAHLFDDKVMKQLKRRRYTGWGRLSRKLINGIRDKQSGKTILDFLKSDGFANRNFMQLIHDDSLTFKEDIQKAQVSGQGDSLHEHIANLAGSPAIKKGILQTVKVVDELVKVMGRHKPENIVIEMARENQTTQKGQKNSRERMKRIEEGIKELGSQILKEHPVENTQLQNEKLYLYYLQNGRDMYVDQELDINRLSDYDVDHIVPQSFLKDDSIDNKVLTRSDKARGKSDNVPSEEVVKKMKNYWRQLLNAKLITQRKFDNLTKAERGGLSELDKAGFIKRQLVETRQITKHVAQILDSRMNTKYDENDKLIREVKVITLKSKLVSDFRKDFQFYKVREINNYHHAHDAYLNAVVGTALIKKYPKLESEFVYGDYKVYDVRKMIAKSEQEIGKATAKYFFYSNIMNFFKTEITLANGEIRKRPLIETNGETGEIVWDKGRDFATVRKVLSMPQVNIVKKTEVQTGGFSKESILPKRNSDKLIARKKDWDPKKYGGFDSPTVAYSVLVVAKVEKGKSKKLKSVKELLGITIMERSSFEKNPIDFLEAKGYKEVKKDLIIKLPKYSLFELENGRKRMLASAGELQKGNELALPSKYVNFLYLASHYEKLKGSPEDNEQKQLFVEQHKHYLDEIIEQISEFSKRVILADANLDKVLSAYNKHRDKPIREQAENIIHLFTLTNLGAPAAFKYFDTTIDRKRYTSTKEVLDATLIHQSITGLYETRIDLSQLGGDGGEAAAKGGGGGTAPLEEEYRLFLEAPIQNVTLLEQWKREIPKVWAEINPPGLASTQAPIHVQLLSTALPVRVRQYPITLEAKRSLRETIRKFRAAGILRPVHSPWNTPLLPVRKSGTSEYRMVQDLREVNKRVETIHPTVPNPYTLLSLLPPDRIWYSVLDLKDAFFCIPLAPESQLIFAFEWADAEEGESGQLTWTRLPQGFKNSPTLFNEALNRDLQGFRLDHPSVSLLQYVDDLLIAADTQAACLSATRDLLMTLAELGYRVSGKKAQLCQEEVTYLGFKIHKGSRSLSNSRTQAILQIPVPKTKRQVREFLGKIGYCRLFIPGFAELAQPLYAATRPGNDPLVWGEKEEEAFQSLKLALTQPPALALPSLDKPFQLFVEETSGAAKGVLTQALGPWKRPVAYLSKRLDPVAAGWPRCLRAIAAAALLTREASKLTFGQDIEITSSHNLESLLRSPPDKWLTNARITQYQVLLLDPPRVRFKQTAALNPATLLPETDDTLPIHHCLDTLDSLTSTRPDLTDQPLAQAEATLFTDGSSYIRDGKRYAGAAVVTLDSVIWAEPLPIGTSAQKAELIALTKALEWSKDKSVNIYTDSRYAFATLHVHGMIYRERGWLTAGGKAIKNAPEILALLTAVWLPKRVAVMHCKGHQKDDAPTSTGNRRADEVAREVAIRPLSTQATISAGKRTADGSEFEKRTADGSEFESPKKKAKVE

SEQ ID NO: 1423 - protein, 2097 aa, synthetic construct
MPAAKRVKLDGGDKKYSIGLDIGTNSVGWAVITDEYKVPSKKFKVLGNTDRHSIKKNLIGALLFDSGETAEATRLKRTARRRYTRRKNRICYLQEIFSNEMAKVDDSFFHRLEESFLVEEDKKHERHPIFGNIVDEVAYHEKYPTIYHLRKKLVDSTDKADLRLIYLALAHMIKFRGHFLIEGDLNPDNSDVDKLFIQLVQTYNQLFEENPINASGVDAKAILSARLSKSRRLENLIAQLPGEKKNGLFGNLIALSLGLTPNFKSNFDLAEDAKLQLSKDTYDDDLDNLLAQIGDQYADLFLAAKNLSDAILLSDILRVNTEITKAPLSASMIKRYDEHHQDLTLLKALVRQQLPEKYKEIFFDQSKNGYAGYIDGGASQEEFYKFIKPILEKMDGTEELLVKLNREDLLRKQRTFDNGSIPHQIHLGELHAILRRQEDFYPFLKDNREKIEKILTFRIPYYVGPLARGNSRFAWMTRKSEETITPWNFEEVVDKGASAQSFIERMTNFDKNLPNEKVLPKHSLLYEYFTVYNELTKVKYVTEGMRKPAFLSGEQKKAIVDLLFKTNRKVTVKQLKEDYFKKIECFDSVEISGVEDRFNASLGTYHDLLKIIKDKDFLDNEENEDILEDIVLTLTLFEDREMIEERLKTYAHLFDDKVMKQLKRRRYTGWGRLSRKLINGIRDKQSGKTILDFLKSDGFANRNFMQLIHDDSLTFKEDIQKAQVSGQGDSLHEHIANLAGSPAIKKGILQTVKVVDELVKVMGRHKPENIVIEMARENQTTQKGQKNSRERMKRIEEGIKELGSQILKEHPVENTQLQNEKLYLYYLQNGRDMYVDQELDINRLSDYDVDHIVPQSFLKDDSIDNKVLTRSDKARGKSDNVPSEEVVKKMKNYWRQLLNAKLITQRKFDNLTKAERGGLSELDKAGFIKRQLVETRQITKHVAQILDSRMNTKYDENDKLIREVKVITLKSKLVSDFRKDFQFYKVREINNYHHAHDAYLNAVVGTALIKKYPKLESEFVYGDYKVYDVRKMIAKSEQEIGKATAKYFFYSNIMNFFKTEITLANGEIRKRPLIETNGETGEIVWDKGRDFATVRKVLSMPQVNIVKKTEVQTGGFSKESILPKRNSDKLIARKKDWDPKKYGGFDSPTVAYSVLVVAKVEKGKSKKLKSVKELLGITIMERSSFEKNPIDFLEAKGYKEVKKDLIIKLPKYSLFELENGRKRMLASAGELQKGNELALPSKYVNFLYLASHYEKLKGSPEDNEQKQLFVEQHKHYLDEIIEQISEFSKRVILADANLDKVLSAYNKHRDKPIREQAENIIHLFTLTNLGAPAAFKYFDTTIDRKRYTSTKEVLDATLIHQSITGLYETRIDLSQLGGDGGGGGGSGGGGSGGTAPLEEEYRLFLEAPIQNVTLLEQWKREIPKVWAEINPPGLASTQAPIHVQLLSTALPVRVRQYPITLEAKRSLRETIRKFRAAGILRPVHSPWNTPLLPVRKSGTSEYRMVQDLREVNKRVETIHPTVPNPYTLLSLLPPDRIWYSVLDLKDAFFCIPLAPESQLIFAFEWADAEEGESGQLTWTRLPQGFKNSPTLFNEALNRDLQGFRLDHPSVSLLQYVDDLLIAADTQAACLSATRDLLMTLAELGYRVSGKKAQLCQEEVTYLGFKIHKGSRSLSNSRTQAILQIPVPKTKRQVREFLGKIGYCRLFIPGFAELAQPLYAATRPGNDPLVWGEKEEEAFQSLKLALTQPPALALPSLDKPFQLFVEETSGAAKGVLTQALGPWKRPVAYLSKRLDPVAAGWPRCLRAIAAAALLTREASKLTFGQDIEITSSHNLESLLRSPPDKWLTNARITQYQVLLLDPPRVRFKQTAALNPATLLPETDDTLPIHHCLDTLDSLTSTRPDLTDQPLAQAEATLFTDGSSYIRDGKRYAGAAVVTLDSVIWAEPLPIGTSAQKAELIALTKALEWSKDKSVNIYTDSRYAFATLHVHGMIYRERGWLTAGGKAIKNAPEILALLTAVWLPKRVAVMHCKGHQKDDAPTSTGNRRADEVAREVAIRPLSTQATISAGKRTADGSEFEKRTADGSEFESPKKKAKVE

SEQ ID NO: 1424 - protein, 2098 aa, synthetic construct
MPAAKRVKLDGGDKKYSIGLDIGTNSVGWAVITDEYKVPSKKFKVLGNTDRHSIKKNLIGALLFDSGETAEATRLKRTARRRYTRRKNRICYLQEIFSNEMAKVDDSFFHRLEESFLVEEDKKHERHPIFGNIVDEVAYHEKYPTIYHLRKKLVDSTDKADLRLIYLALAHMIKFRGHFLIEGDLNPDNSDVDKLFIQLVQTYNQLFEENPINASGVDAKAILSARLSKSRRLENLIAQLPGEKKNGLFGNLIALSLGLTPNFKSNFDLAEDAKLQLSKDTYDDDLDNLLAQIGDQYADLFLAAKNLSDAILLSDILRVNTEITKAPLSASMIKRYDEHHQDLTLLKALVRQQLPEKYKEIFFDQSKNGYAGYIDGGASQEEFYKFIKPILEKMDGTEELLVKLNREDLLRKQRTFDNGSIPHQIHLGELHAILRRQEDFYPFLKDNREKIEKILTFRIPYYVGPLARGNSRFAWMTRKSEETITPWNFEEVVDKGASAQSFIERMTNFDKNLPNEKVLPKHSLLYEYFTVYNELTKVKYVTEGMRKPAFLSGEQKKAIVDLLFKTNRKVTVKQLKEDYFKKIECFDSVEISGVEDRFNASLGTYHDLLKIIKDKDFLDNEENEDILEDIVLTLTLFEDREMIEERLKTYAHLFDDKVMKQLKRRRYTGWGRLSRKLINGIRDKQSGKTILDFLKSDGFANRNFMQLIHDDSLTFKEDIQKAQVSGQGDSLHEHIANLAGSPAIKKGILQTVKVVDELVKVMGRHKPENIVIEMARENQTTQKGQKNSRERMKRIEEGIKELGSQILKEHPVENTQLQNEKLYLYYLQNGRDMYVDQELDINRLSDYDVDHIVPQSFLKDDSIDNKVLTRSDKARGKSDNVPSEEVVKKMKNYWRQLLNAKLITQRKFDNLTKAERGGLSELDKAGFIKRQLVETRQITKHVAQILDSRMNTKYDENDKLIREVKVITLKSKLVSDFRKDFQFYKVREINNYHHAHDAYLNAVVGTALIKKYPKLESEFVYGDYKVYDVRKMIAKSEQEIGKATAKYFFYSNIMNFFKTEITLANGEIRKRPLIETNGETGEIVWDKGRDFATVRKVLSMPQVNIVKKTEVQTGGFSKESILPKRNSDKLIARKKDWDPKKYGGFDSPTVAYSVLVVAKVEKGKSKKLKSVKELLGITIMERSSFEKNPIDFLEAKGYKEVKKDLIIKLPKYSLFELENGRKRMLASAGELQKGNELALPSKYVNFLYLASHYEKLKGSPEDNEQKQLFVEQHKHYLDEIIEQISEFSKRVILADANLDKVLSAYNKHRDKPIREQAENIIHLFTLTNLGAPAAFKYFDTTIDRKRYTSTKEVLDATLIHQSITGLYETRIDLSQLGGDGGGSSGGGEAAAKGGTAPLEEEYRLFLEAPIQNVTLLEQWKREIPKVWAEINPPGLASTQAPIHVQLLSTALPVRVRQYPITLEAKRSLRETIRKFRAAGILRPVHSPWNTPLLPVRKSGTSEYRMVQDLREVNKRVETIHPTVPNPYTLLSLLPPDRIWYSVLDLKDAFFCIPLAPESQLIFAFEWADAEEGESGQLTWTRLPQGFKNSPTLFNEALNRDLQGFRLDHPSVSLLQYVDDLLIAADTQAACLSATRDLLMTLAELGYRVSGKKAQLCQEEVTYLGFKIHKGSRSLSNSRTQAILQIPVPKTKRQVREFLGKIGYCRLFIPGFAELAQPLYAATRPGNDPLVWGEKEEEAFQSLKLALTQPPALALPSLDKPFQLFVEETSGAAKGVLTQALGPWKRPVAYLSKRLDPVAAGWPRCLRAIAAAALLTREASKLTFGQDIEITSSHNLESLLRSPPDKWLTNARITQYQVLLLDPPRVRFKQTAALNPATLLPETDDTLPIHHCLDTLDSLTSTRPDLTDQPLAQAEATLFTDGSSYIRDGKRYAGAAVVTLDSVIWAEPLPIGTSAQKAELIALTKALEWSKDKSVNIYTDSRYAFATLHVHGMIYRERGWLTAGGKAIKNAPEILALLTAVWLPKRVAVMHCKGHQKDDAPTSTGNRRADEVAREVAIRPLSTQATISAGKRTADGSEFEKRTADGSEFESPKKKAKVE

SEQ ID NO: 1425 - protein, 2098 aa, synthetic construct
MPAAKRVKLDGGDKKYSIGLDIGTNSVGWAVITDEYKVPSKKFKVLGNTDRHSIKKNLIGALLFDSGETAEATRLKRTARRRYTRRKNRICYLQEIFSNEMAKVDDSFFHRLEESFLVEEDKKHERHPIFGNIVDEVAYHEKYPTIYHLRKKLVDSTDKADLRLIYLALAHMIKFRGHFLIEGDLNPDNSDVDKLFIQLVQTYNQLFEENPINASGVDAKAILSARLSKSRRLENLIAQLPGEKKNGLFGNLIALSLGLTPNFKSNFDLAEDAKLQLSKDTYDDDLDNLLAQIGDQYADLFLAAKNLSDAILLSDILRVNTEITKAPLSASMIKRYDEHHQDLTLLKALVRQQLPEKYKEIFFDQSKNGYAGYIDGGASQEEFYKFIKPILEKMDGTEELLVKLNREDLLRKQRTFDNGSIPHQIHLGELHAILRRQEDFYPFLKDNREKIEKILTFRIPYYVGPLARGNSRFAWMTRKSEETITPWNFEEVVDKGASAQSFIERMTNFDKNLPNEKVLPKHSLLYEYFTVYNELTKVKYVTEGMRKPAFLSGEQKKAIVDLLFKTNRKVTVKQLKEDYFKKIECFDSVEISGVEDRFNASLGTYHDLLKIIKDKDFLDNEENEDILEDIVLTLTLFEDREMIEERLKTYAHLFDDKVMKQLKRRRYTGWGRLSRKLINGIRDKQSGKTILDFLKSDGFANRNFMQLIHDDSLTFKEDIQKAQVSGQGDSLHEHIANLAGSPAIKKGILQTVKVVDELVKVMGRHKPENIVIEMARENQTTQKGQKNSRERMKRIEEGIKELGSQILKEHPVENTQLQNEKLYLYYLQNGRDMYVDQELDINRLSDYDVDHIVPQSFLKDDSIDNKVLTRSDKARGKSDNVPSEEVVKKMKNYWRQLLNAKLITQRKFDNLTKAERGGLSELDKAGFIKRQLVETRQITKHVAQILDSRMNTKYDENDKLIREVKVITLKSKLVSDFRKDFQFYKVREINNYHHAHDAYLNAVVGTALIKKYPKLESEFVYGDYKVYDVRKMIAKSEQEIGKATAKYFFYSNIMNFFKTEITLANGEIRKRPLIETNGETGEIVWDKGRDFATVRKVLSMPQVNIVKKTEVQTGGFSKESILPKRNSDKLIARKKDWDPKKYGGFDSPTVAYSVLVVAKVEKGKSKKLKSVKELLGITIMERSSFEKNPIDFLEAKGYKEVKKDLIIKLPKYSLFELENGRKRMLASAGELQKGNELALPSKYVNFLYLASHYEKLKGSPEDNEQKQLFVEQHKHYLDEIIEQISEFSKRVILADANLDKVLSAYNKHRDKPIREQAENIIHLFTLTNLGAPAAFKYFDTTIDRKRYTSTKEVLDATLIHQSITGLYETRIDLSQLGGDGGGGSEAAAKGGGGGTAPLEEEYRLFLEAPIQNVTLLEQWKREIPKVWAEINPPGLASTQAPIHVQLLSTALPVRVRQYPITLEAKRSLRETIRKFRAAGILRPVHSPWNTPLLPVRKSGTSEYRMVQDLREVNKRVETIHPTVPNPYTLLSLLPPDRIWYSVLDLKDAFFCIPLAPESQLIFAFEWADAEEGESGQLTWTRLPQGFKNSPTLFNEALNRDLQGFRLDHPSVSLLQYVDDLLIAADTQAACLSATRDLLMTLAELGYRVSGKKAQLCQEEVTYLGFKIHKGSRSLSNSRTQAILQIPVPKTKRQVREFLGKIGYCRLFIPGFAELAQPLYAATRPGNDPLVWGEKEEEAFQSLKLALTQPPALALPSLDKPFQLFVEETSGAAKGVLTQALGPWKRPVAYLSKRLDPVAAGWPRCLRAIAAAALLTREASKLTFGQDIEITSSHNLESLLRSPPDKWLTNARITQYQVLLLDPPRVRFKQTAALNPATLLPETDDTLPIHHCLDTLDSLTSTRPDLTDQPLAQAEATLFTDGSSYIRDGKRYAGAAVVTLDSVIWAEPLPIGTSAQKAELIALTKALEWSKDKSVNIYTDSRYAFATLHVHGMIYRERGWLTAGGKAIKNAPEILALLTAVWLPKRVAVMHCKGHQKDDAPTSTGNRRADEVAREVAIRPLSTQATISAGKRTADGSEFEKRTADGSEFESPKKKAKVE

SEQ ID NO: 1426 - protein, 2117 aa, synthetic construct
MPAAKRVKLDGGDKKYSIGLDIGTNSVGWAVITDEYKVPSKKFKVLGNTDRHSIKKNLIGALLFDSGETAEATRLKRTARRRYTRRKNRICYLQEIFSNEMAKVDDSFFHRLEESFLVEEDKKHERHPIFGNIVDEVAYHEKYPTIYHLRKKLVDSTDKADLRLIYLALAHMIKFRGHFLIEGDLNPDNSDVDKLFIQLVQTYNQLFEENPINASGVDAKAILSARLSKSRRLENLIAQLPGEKKNGLFGNLIALSLGLTPNFKSNFDLAEDAKLQLSKDTYDDDLDNLLAQIGDQYADLFLAAKNLSDAILLSDILRVNTEITKAPLSASMIKRYDEHHQDLTLLKALVRQQLPEKYKEIFFDQSKNGYAGYIDGGASQEEFYKFIKPILEKMDGTEELLVKLNREDLLRKQRTFDNGSIPHQIHLGELHAILRRQEDFYPFLKDNREKIEKILTFRIPYYVGPLARGNSRFAWMTRKSEETITPWNFEEVVDKGASAQSFIERMTNFDKNLPNEKVLPKHSLLYEYFTVYNELTKVKYVTEGMRKPAFLSGEQKKAIVDLLFKTNRKVTVKQLKEDYFKKIECFDSVEISGVEDRFNASLGTYHDLLKIIKDKDFLDNEENEDILEDIVLTLTLFEDREMIEERLKTYAHLFDDKVMKQLKRRRYTGWGRLSRKLINGIRDKQSGKTILDFLKSDGFANRNFMQLIHDDSLTFKEDIQKAQVSGQGDSLHEHIANLAGSPAIKKGILQTVKVVDELVKVMGRHKPENIVIEMARENQTTQKGQKNSRERMKRIEEGIKELGSQILKEHPVENTQLQNEKLYLYYLQNGRDMYVDQELDINRLSDYDVDHIVPQSFLKDDSIDNKVLTRSDKARGKSDNVPSEEVVKKMKNYWRQLLNAKLITQRKFDNLTKAERGGLSELDKAGFIKRQLVETRQITKHVAQILDSRMNTKYDENDKLIREVKVITLKSKLVSDFRKDFQFYKVREINNYHHAHDAYLNAVVGTALIKKYPKLESEFVYGDYKVYDVRKMIAKSEQEIGKATAKYFFYSNIMNFFKTEITLANGEIRKRPLIETNGETGEIVWDKGRDFATVRKVLSMPQVNIVKKTEVQTGGFSKESILPKRNSDKLIARKKDWDPKKYGGFDSPTVAYSVLVVAKVEKGKSKKLKSVKELLGITIMERSSFEKNPIDFLEAKGYKEVKKDLIIKLPKYSLFELENGRKRMLASAGELQKGNELALPSKYVNFLYLASHYEKLKGSPEDNEQKQLFVEQHKHYLDEIIEQISEFSKRVILADANLDKVLSAYNKHRDKPIREQAENIIHLFTLTNLGAPAAFKYFDTTIDRKRYTSTKEVLDATLIHQSITGLYETRIDLSQLGGDGGEAAAKEAAAKEAAAKEAAAKEAAAKEAAAKGGTAPLEEEYRLFLEAPIQNVTLLEQWKREIPKVWAEINPPGLASTQAPIHVQLLSTALPVRVRQYPITLEAKRSLRETIRKFRAAGILRPVHSPWNTPLLPVRKSGTSEYRMVQDLREVNKRVETIHPTVPNPYTLLSLLPPDRIWYSVLDLKDAFFCIPLAPESQLIFAFEWADAEEGESGQLTWTRLPQGFKNSPTLFNEALNRDLQGFRLDHPSVSLLQYVDDLLIAADTQAACLSATRDLLMTLAELGYRVSGKKAQLCQEEVTYLGFKIHKGSRSLSNSRTQAILQIPVPKTKRQVREFLGKIGYCRLFIPGFAELAQPLYAATRPGNDPLVWGEKEEEAFQSLKLALTQPPALALPSLDKPFQLFVEETSGAAKGVLTQALGPWKRPVAYLSKRLDPVAAGWPRCLRAIAAAALLTREASKLTFGQDIEITSSHNLESLLRSPPDKWLTNARITQYQVLLLDPPRVRFKQTAALNPATLLPETDDTLPIHHCLDTLDSLTSTRPDLTDQPLAQAEATLFTDGSSYIRDGKRYAGAAVVTLDSVIWAEPLPIGTSAQKAELIALTKALEWSKDKSVNIYTDSRYAFATLHVHGMIYRERGWLTAGGKAIKNAPEILALLTAVWLPKRVAVMHCKGHQKDDAPTSTGNRRADEVAREVAIRPLSTQATISAGKRTADGSEFEKRTADGSEFESPKKKAKVE

SEQ ID NO: 1427 - protein, 2098 aa, synthetic construct
MPAAKRVKLDGGDKKYSIGLDIGTNSVGWAVITDEYKVPSKKFKVLGNTDRHSIKKNLIGALLFDSGETAEATRLKRTARRRYTRRKNRICYLQEIFSNEMAKVDDSFFHRLEESFLVEEDKKHERHPIFGNIVDEVAYHEKYPTIYHLRKKLVDSTDKADLRLIYLALAHMIKFRGHFLIEGDLNPDNSDVDKLFIQLVQTYNQLFEENPINASGVDAKAILSARLSKSRRLENLIAQLPGEKKNGLFGNLIALSLGLTPNFKSNFDLAEDAKLQLSKDTYDDDLDNLLAQIGDQYADLFLAAKNLSDAILLSDILRVNTEITKAPLSASMIKRYDEHHQDLTLLKALVRQQLPEKYKEIFFDQSKNGYAGYIDGGASQEEFYKFIKPILEKMDGTEELLVKLNREDLLRKQRTFDNGSIPHQIHLGELHAILRRQEDFYPFLKDNREKIEKILTFRIPYYVGPLARGNSRFAWMTRKSEETITPWNFEEVVDKGASAQSFIERMTNFDKNLPNEKVLPKHSLLYEYFTVYNELTKVKYVTEGMRKPAFLSGEQKKAIVDLLFKTNRKVTVKQLKEDYFKKIECFDSVEISGVEDRFNASLGTYHDLLKIIKDKDFLDNEENEDILEDIVLTLTLFEDREMIEERLKTYAHLFDDKVMKQLKRRRYTGWGRLSRKLINGIRDKQSGKTILDFLKSDGFANRNFMQLIHDDSLTFKEDIQKAQVSGQGDSLHEHIANLAGSPAIKKGILQTVKVVDELVKVMGRHKPENIVIEMARENQTTQKGQKNSRERMKRIEEGIKELGSQILKEHPVENTQLQNEKLYLYYLQNGRDMYVDQELDINRLSDYDVDHIVPQSFLKDDSIDNKVLTRSDKARGKSDNVPSEEVVKKMKNYWRQLLNAKLITQRKFDNLTKAERGGLSELDKAGFIKRQLVETRQITKHVAQILDSRMNTKYDENDKLIREVKVITLKSKLVSDFRKDFQFYKVREINNYHHAHDAYLNAVVGTALIKKYPKLESEFVYGDYKVYDVRKMIAKSEQEIGKATAKYFFYSNIMNFFKTEITLANGEIRKRPLIETNGETGEIVWDKGRDFATVRKVLSMPQVNIVKKTEVQTGGFSKESILPKRNSDKLIARKKDWDPKKYGGFDSPTVAYSVLVVAKVEKGKSKKLKSVKELLGITIMERSSFEKNPIDFLEAKGYKEVKKDLIIKLPKYSLFELENGRKRMLASAGELQKGNELALPSKYVNFLYLASHYEKLKGSPEDNEQKQLFVEQHKHYLDEIIEQISEFSKRVILADANLDKVLSAYNKHRDKPIREQAENIIHLFTLTNLGAPAAFKYFDTTIDRKRYTSTKEVLDATLIHQSITGLYETRIDLSQLGGDGGGGGGGSEAAAKGGTAPLEEEYRLFLEAPIQNVTLLEQWKREIPKVWAEINPPGLASTQAPIHVQLLSTALPVRVRQYPITLEAKRSLRETIRKFRAAGILRPVHSPWNTPLLPVRKSGTSEYRMVQDLREVNKRVETIHPTVPNPYTLLSLLPPDRIWYSVLDLKDAFFCIPLAPESQLIFAFEWADAEEGESGQLTWTRLPQGFKNSPTLFNEALNRDLQGFRLDHPSVSLLQYVDDLLIAADTQAACLSATRDLLMTLAELGYRVSGKKAQLCQEEVTYLGFKIHKGSRSLSNSRTQAILQIPVPKTKRQVREFLGKIGYCRLFIPGFAELAQPLYAATRPGNDPLVWGEKEEEAFQSLKLALTQPPALALPSLDKPFQLFVEETSGAAKGVLTQALGPWKRPVAYLSKRLDPVAAGWPRCLRAIAAAALLTREASKLTFGQDIEITSSHNLESLLRSPPDKWLTNARITQYQVLLLDPPRVRFKQTAALNPATLLPETDDTLPIHHCLDTLDSLTSTRPDLTDQPLAQAEATLFTDGSSYIRDGKRYAGAAVVTLDSVIWAEPLPIGTSAQKAELIALTKALEWSKDKSVNIYTDSRYAFATLHVHGMIYRERGWLTAGGKAIKNAPEILALLTAVWLPKRVAVMHCKGHQKDDAPTSTGNRRADEVAREVAIRPLSTQATISAGKRTADGSEFEKRTADGSEFESPKKKAKVE

SEQ ID NO: 1428 - protein, 2095 aa, synthetic construct
MPAAKRVKLDGGDKKYSIGLDIGTNSVGWAVITDEYKVPSKKFKVLGNTDRHSIKKNLIGALLFDSGETAEATRLKRTARRRYTRRKNRICYLQEIFSNEMAKVDDSFFHRLEESFLVEEDKKHERHPIFGNIVDEVAYHEKYPTIYHLRKKLVDSTDKADLRLIYLALAHMIKFRGHFLIEGDLNPDNSDVDKLFIQLVQTYNQLFEENPINASGVDAKAILSARLSKSRRLENLIAQLPGEKKNGLFGNLIALSLGLTPNFKSNFDLAEDAKLQLSKDTYDDDLDNLLAQIGDQYADLFLAAKNLSDAILLSDILRVNTEITKAPLSASMIKRYDEHHQDLTLLKALVRQQLPEKYKEIFFDQSKNGYAGYIDGGASQEEFYKFIKPILEKMDGTEELLVKLNREDLLRKQRTFDNGSIPHQIHLGELHAILRRQEDFYPFLKDNREKIEKILTFRIPYYVGPLARGNSRFAWMTRKSEETITPWNFEEVVDKGASAQSFIERMTNFDKNLPNEKVLPKHSLLYEYFTVYNELTKVKYVTEGMRKPAFLSGEQKKAIVDLLFKTNRKVTVKQLKEDYFKKIECFDSVEISGVEDRFNASLGTYHDLLKIIKDKDFLDNEENEDILEDIVLTLTLFEDREMIEERLKTYAHLFDDKVMKQLKRRRYTGWGRLSRKLINGIRDKQSGKTILDFLKSDGFANRNFMQLIHDDSLTFKEDIQKAQVSGQGDSLHEHIANLAGSPAIKKGILQTVKVVDELVKVMGRHKPENIVIEMARENQTTQKGQKNSRERMKRIEEGIKELGSQILKEHPVENTQLQNEKLYLYYLQNGRDMYVDQELDINRLSDYDVDHIVPQSFLKDDSIDNKVLTRSDKARGKSDNVPSEEVVKKMKNYWRQLLNAKLITQRKFDNLTKAERGGLSELDKAGFIKRQLVETRQITKHVAQILDSRMNTKYDENDKLIREVKVITLKSKLVSDFRKDFQFYKVREINNYHHAHDAYLNAVVGTALIKKYPKLESEFVYGDYKVYDVRKMIAKSEQEIGKATAKYFFYSNIMNFFKTEITLANGEIRKRPLIETNGETGEIVWDKGRDFATVRKVLSMPQVNIVKKTEVQTGGFSKESILPKRNSDKLIARKKDWDPKKYGGFDSPTVAYSVLVVAKVEKGKSKKLKSVKELLGITIMERSSFEKNPIDFLEAKGYKEVKKDLIIKLPKYSLFELENGRKRMLASAGELQKGNELALPSKYVNFLYLASHYEKLKGSPEDNEQKQLFVEQHKHYLDEIIEQISEFSKRVILADANLDKVLSAYNKHRDKPIREQAENIIHLFTLTNLGAPAAFKYFDTTIDRKRYTSTKEVLDATLIHQSITGLYETRIDLSQLGGDGGEAAAKGGSGGTAPLEEEYRLFLEAPIQNVTLLEQWKREIPKVWAEINPPGLASTQAPIHVQLLSTALPVRVRQYPITLEAKRSLRETIRKFRAAGILRPVHSPWNTPLLPVRKSGTSEYRMVQDLREVNKRVETIHPTVPNPYTLLSLLPPDRIWYSVLDLKDAFFCIPLAPESQLIFAFEWADAEEGESGQLTWTRLPQGFKNSPTLFNEALNRDLQGFRLDHPSVSLLQYVDDLLIAADTQAACLSATRDLLMTLAELGYRVSGKKAQLCQEEVTYLGFKIHKGSRSLSNSRTQAILQIPVPKTKRQVREFLGKIGYCRLFIPGFAELAQPLYAATRPGNDPLVWGEKEEEAFQSLKLALTQPPALALPSLDKPFQLFVEETSGAAKGVLTQALGPWKRPVAYLSKRLDPVAAGWPRCLRAIAAAALLTREASKLTFGQDIEITSSHNLESLLRSPPDKWLTNARITQYQVLLLDPPRVRFKQTAALNPATLLPETDDTLPIHHCLDTLDSLTSTRPDLTDQPLAQAEATLFTDGSSYIRDGKRYAGAAVVTLDSVIWAEPLPIGTSAQKAELIALTKALEWSKDKSVNIYTDSRYAFATLHVHGMIYRERGWLTAGGKAIKNAPEILALLTAVWLPKRVAVMHCKGHQKDDAPTSTGNRRADEVAREVAIRPLSTQATISAGKRTADGSEFEKRTADGSEFESPKKKAKVE

SEQ ID NO: 1429 - protein, 2096 aa, synthetic construct
MPAAKRVKLDGGDKKYSIGLDIGTNSVGWAVITDEYKVPSKKFKVLGNTDRHSIKKNLIGALLFDSGETAEATRLKRTARRRYTRRKNRICYLQEIFSNEMAKVDDSFFHRLEESFLVEEDKKHERHPIFGNIVDEVAYHEKYPTIYHLRKKLVDSTDKADLRLIYLALAHMIKFRGHFLIEGDLNPDNSDVDKLFIQLVQTYNQLFEENPINASGVDAKAILSARLSKSRRLENLIAQLPGEKKNGLFGNLIALSLGLTPNFKSNFDLAEDAKLQLSKDTYDDDLDNLLAQIGDQYADLFLAAKNLSDAILLSDILRVNTEITKAPLSASMIKRYDEHHQDLTLLKALVRQQLPEKYKEIFFDQSKNGYAGYIDGGASQEEFYKFIKPILEKMDGTEELLVKLNREDLLRKQRTFDNGSIPHQIHLGELHAILRRQEDFYPFLKDNREKIEKILTFRIPYYVGPLARGNSRFAWMTRKSEETITPWNFEEVVDKGASAQSFIERMTNFDKNLPNEKVLPKHSLLYEYFTVYNELTKVKYVTEGMRKPAFLSGEQKKAIVDLLFKTNRKVTVKQLKEDYFKKIECFDSVEISGVEDRFNASLGTYHDLLKIIKDKDFLDNEENEDILEDIVLTLTLFEDREMIEERLKTYAHLFDDKVMKQLKRRRYTGWGRLSRKLINGIRDKQSGKTILDFLKSDGFANRNFMQLIHDDSLTFKEDIQKAQVSGQGDSLHEHIANLAGSPAIKKGILQTVKVVDELVKVMGRHKPENIVIEMARENQTTQKGQKNSRERMKRIEEGIKELGSQILKEHPVENTQLQNEKLYLYYLQNGRDMYVDQELDINRLSDYDVDHIVPQSFLKDDSIDNKVLTRSDKARGKSDNVPSEEVVKKMKNYWRQLLNAKLITQRKFDNLTKAERGGLSELDKAGFIKRQLVETRQITKHVAQILDSRMNTKYDENDKLIREVKVITLKSKLVSDFRKDFQFYKVREINNYHHAHDAYLNAVVGTALIKKYPKLESEFVYGDYKVYDVRKMIAKSEQEIGKATAKYFFYSNIMNFFKTEITLANGEIRKRPLIETNGETGEIVWDKGRDFATVRKVLSMPQVNIVKKTEVQTGGFSKESILPKRNSDKLIARKKDWDPKKYGGFDSPTVAYSVLVVAKVEKGKSKKLKSVKELLGITIMERSSFEKNPIDFLEAKGYKEVKKDLIIKLPKYSLFELENGRKRMLASAGELQKGNELALPSKYVNFLYLASHYEKLKGSPEDNEQKQLFVEQHKHYLDEIIEQISEFSKRVILADANLDKVLSAYNKHRDKPIREQAENIIHLFTLTNLGAPAAFKYFDTTIDRKRYTSTKEVLDATLIHQSITGLYETRIDLSQLGGDGGPAPAPAPAPGGTAPLEEEYRLFLEAPIQNVTLLEQWKREIPKVWAEINPPGLASTQAPIHVQLLSTALPVRVRQYPITLEAKRSLRETIRKFRAAGILRPVHSPWNTPLLPVRKSGTSEYRMVQDLREVNKRVETIHPTVPNPYTLLSLLPPDRIWYSVLDLKDAFFCIPLAPESQLIFAFEWADAEEGESGQLTWTRLPQGFKNSPTLFNEALNRDLQGFRLDHPSVSLLQYVDDLLIAADTQAACLSATRDLLMTLAELGYRVSGKKAQLCQEEVTYLGFKIHKGSRSLSNSRTQAILQIPVPKTKRQVREFLGKIGYCRLFIPGFAELAQPLYAATRPGNDPLVWGEKEEEAFQSLKLALTQPPALALPSLDKPFQLFVEETSGAAKGVLTQALGPWKRPVAYLSKRLDPVAAGWPRCLRAIAAAALLTREASKLTFGQDIEITSSHNLESLLRSPPDKWLTNARITQYQVLLLDPPRVRFKQTAALNPATLLPETDDTLPIHHCLDTLDSLTSTRPDLTDQPLAQAEATLFTDGSSYIRDGKRYAGAAVVTLDSVIWAEPLPIGTSAQKAELIALTKALEWSKDKSVNIYTDSRYAFATLHVHGMIYRERGWLTAGGKAIKNAPEILALLTAVWLPKRVAVMHCKGHQKDDAPTSTGNRRADEVAREVAIRPLSTQATISAGKRTADGSEFEKRTADGSEFESPKKKAKVE

SEQ ID NO: 1430 - protein, 2093 aa, synthetic construct
MPAAKRVKLDGGDKKYSIGLDIGTNSVGWAVITDEYKVPSKKFKVLGNTDRHSIKKNLIGALLFDSGETAEATRLKRTARRRYTRRKNRICYLQEIFSNEMAKVDDSFFHRLEESFLVEEDKKHERHPIFGNIVDEVAYHEKYPTIYHLRKKLVDSTDKADLRLIYLALAHMIKFRGHFLIEGDLNPDNSDVDKLFIQLVQTYNQLFEENPINASGVDAKAILSARLSKSRRLENLIAQLPGEKKNGLFGNLIALSLGLTPNFKSNFDLAEDAKLQLSKDTYDDDLDNLLAQIGDQYADLFLAAKNLSDAILLSDILRVNTEITKAPLSASMIKRYDEHHQDLTLLKALVRQQLPEKYKEIFFDQSKNGYAGYIDGGASQEEFYKFIKPILEKMDGTEELLVKLNREDLLRKQRTFDNGSIPHQIHLGELHAILRRQEDFYPFLKDNREKIEKILTFRIPYYVGPLARGNSRFAWMTRKSEETITPWNFEEVVDKGASAQSFIERMTNFDKNLPNEKVLPKHSLLYEYFTVYNELTKVKYVTEGMRKPAFLSGEQKKAIVDLLFKTNRKVTVKQLKEDYFKKIECFDSVEISGVEDRFNASLGTYHDLLKIIKDKDFLDNEENEDILEDIVLTLTLFEDREMIEERLKTYAHLFDDKVMKQLKRRRYTGWGRLSRKLINGIRDKQSGKTILDFLKSDGFANRNFMQLIHDDSLTFKEDIQKAQVSGQGDSLHEHIANLAGSPAIKKGILQTVKVVDELVKVMGRHKPENIVIEMARENQTTQKGQKNSRERMKRIEEGIKELGSQILKEHPVENTQLQNEKLYLYYLQNGRDMYVDQELDINRLSDYDVDHIVPQSFLKDDSIDNKVLTRSDKARGKSDNVPSEEVVKKMKNYWRQLLNAKLITQRKFDNLTKAERGGLSELDKAGFIKRQLVETRQITKHVAQILDSRMNTKYDENDKLIREVKVITLKSKLVSDFRKDFQFYKVREINNYHHAHDAYLNAVVGTALIKKYPKLESEFVYGDYKVYDVRKMIAKSEQEIGKATAKYFFYSNIMNFFKTEITLANGEIRKRPLIETNGETGEIVWDKGRDFATVRKVLSMPQVNIVKKTEVQTGGFSKESILPKRNSDKLIARKKDWDPKKYGGFDSPTVAYSVLVVAKVEKGKSKKLKSVKELLGITIMERSSFEKNPIDFLEAKGYKEVKKDLIIKLPKYSLFELENGRKRMLASAGELQKGNELALPSKYVNFLYLASHYEKLKGSPEDNEQKQLFVEQHKHYLDEIIEQISEFSKRVILADANLDKVLSAYNKHRDKPIREQAENIIHLFTLTNLGAPAAFKYFDTTIDRKRYTSTKEVLDATLIHQSITGLYETRIDLSQLGGDGGGSSGGGGGTAPLEEEYRLFLEAPIQNVTLLEQWKREIPKVWAEINPPGLASTQAPIHVQLLSTALPVRVRQYPITLEAKRSLRETIRKFRAAGILRPVHSPWNTPLLPVRKSGTSEYRMVQDLREVNKRVETIHPTVPNPYTLLSLLPPDRIWYSVLDLKDAFFCIPLAPESQLIFAFEWADAEEGESGQLTWTRLPQGFKNSPTLFNEALNRDLQGFRLDHPSVSLLQYVDDLLIAADTQAACLSATRDLLMTLAELGYRVSGKKAQLCQEEVTYLGFKIHKGSRSLSNSRTQAILQIPVPKTKRQVREFLGKIGYCRLFIPGFAELAQPLYAATRPGNDPLVWGEKEEEAFQSLKLALTQPPALALPSLDKPFQLFVEETSGAAKGVLTQALGPWKRPVAYLSKRLDPVAAGWPRCLRAIAAAALLTREASKLTFGQDIEITSSHNLESLLRSPPDKWLTNARITQYQVLLLDPPRVRFKQTAALNPATLLPETDDTLPIHHCLDTLDSLTSTRPDLTDQPLAQAEATLFTDGSSYIRDGKRYAGAAVVTLDSVIWAEPLPIGTSAQKAELIALTKALEWSKDKSVNIYTDSRYAFATLHVHGMIYRERGWLTAGGKAIKNAPEILALLTAVWLPKRVAVMHCKGHQKDDAPTSTGNRRADEVAREVAIRPLSTQATISAGKRTADGSEFEKRTADGSEFESPKKKAKVE

SEQ ID NO: 1431 - protein, 2098 aa, synthetic construct
MPAAKRVKLDGGDKKYSIGLDIGTNSVGWAVITDEYKVPSKKFKVLGNTDRHSIKKNLIGALLFDSGETAEATRLKRTARRRYTRRKNRICYLQEIFSNEMAKVDDSFFHRLEESFLVEEDKKHERHPIFGNIVDEVAYHEKYPTIYHLRKKLVDSTDKADLRLIYLALAHMIKFRGHFLIEGDLNPDNSDVDKLFIQLVQTYNQLFEENPINASGVDAKAILSARLSKSRRLENLIAQLPGEKKNGLFGNLIALSLGLTPNFKSNFDLAEDAKLQLSKDTYDDDLDNLLAQIGDQYADLFLAAKNLSDAILLSDILRVNTEITKAPLSASMIKRYDEHHQDLTLLKALVRQQLPEKYKEIFFDQSKNGYAGYIDGGASQEEFYKFIKPILEKMDGTEELLVKLNREDLLRKQRTFDNGSIPHQIHLGELHAILRRQEDFYPFLKDNREKIEKILTFRIPYYVGPLARGNSRFAWMTRKSEETITPWNFEEVVDKGASAQSFIERMTNFDKNLPNEKVLPKHSLLYEYFTVYNELTKVKYVTEGMRKPAFLSGEQKKAIVDLLFKTNRKVTVKQLKEDYFKKIECFDSVEISGVEDRFNASLGTYHDLLKIIKDKDFLDNEENEDILEDIVLTLTLFEDREMIEERLKTYAHLFDDKVMKQLKRRRYTGWGRLSRKLINGIRDKQSGKTILDFLKSDGFANRNFMQLIHDDSLTFKEDIQKAQVSGQGDSLHEHIANLAGSPAIKKGILQTVKVVDELVKVMGRHKPENIVIEMARENQTTQKGQKNSRERMKRIEEGIKELGSQILKEHPVENTQLQNEKLYLYYLQNGRDMYVDQELDINRLSDYDVDHIVPQSFLKDDSIDNKVLTRSDKARGKSDNVPSEEVVKKMKNYWRQLLNAKLITQRKFDNLTKAERGGLSELDKAGFIKRQLVETRQITKHVAQILDSRMNTKYDENDKLIREVKVITLKSKLVSDFRKDFQFYKVREINNYHHAHDAYLNAVVGTALIKKYPKLESEFVYGDYKVYDVRKMIAKSEQEIGKATAKYFFYSNIMNFFKTEITLANGEIRKRPLIETNGETGEIVWDKGRDFATVRKVLSMPQVNIVKKTEVQTGGFSKESILPKRNSDKLIARKKDWDPKKYGGFDSPTVAYSVLVVAKVEKGKSKKLKSVKELLGITIMERSSFEKNPIDFLEAKGYKEVKKDLIIKLPKYSLFELENGRKRMLASAGELQKGNELALPSKYVNFLYLASHYEKLKGSPEDNEQKQLFVEQHKHYLDEIIEQISEFSKRVILADANLDKVLSAYNKHRDKPIREQAENIIHLFTLTNLGAPAAFKYFDTTIDRKRYTSTKEVLDATLIHQSITGLYETRIDLSQLGGDGGEAAAKGGSPAPGGTAPLEEEYRLFLEAPIQNVTLLEQWKREIPKVWAEINPPGLASTQAPIHVQLLSTALPVRVRQYPITLEAKRSLRETIRKFRAAGILRPVHSPWNTPLLPVRKSGTSEYRMVQDLREVNKRVETIHPTVPNPYTLLSLLPPDRIWYSVLDLKDAFFCIPLAPESQLIFAFEWADAEEGESGQLTWTRLPQGFKNSPTLFNEALNRDLQGFRLDHPSVSLLQYVDDLLIAADTQAACLSATRDLLMTLAELGYRVSGKKAQLCQEEVTYLGFKIHKGSRSLSNSRTQAILQIPVPKTKRQVREFLGKIGYCRLFIPGFAELAQPLYAATRPGNDPLVWGEKEEEAFQSLKLALTQPPALALPSLDKPFQLFVEETSGAAKGVLTQALGPWKRPVAYLSKRLDPVAAGWPRCLRAIAAAALLTREASKLTFGQDIEITSSHNLESLLRSPPDKWLTNARITQYQVLLLDPPRVRFKQTAALNPATLLPETDDTLPIHHCLDTLDSLTSTRPDLTDQPLAQAEATLFTDGSSYIRDGKRYAGAAVVTLDSVIWAEPLPIGTSAQKAELIALTKALEWSKDKSVNIYTDSRYAFATLHVHGMIYRERGWLTAGGKAIKNAPEILALLTAVWLPKRVAVMHCKGHQKDDAPTSTGNRRADEVAREVAIRPLSTQATISAGKRTADGSEFEKRTADGSEFESPKKKAKVE

SEQ ID NO: 1432 - protein, 2096 aa, synthetic construct
MPAAKRVKLDGGDKKYSIGLDIGTNSVGWAVITDEYKVPSKKFKVLGNTDRHSIKKNLIGALLFDSGETAEATRLKRTARRRYTRRKNRICYLQEIFSNEMAKVDDSFFHRLEESFLVEEDKKHERHPIFGNIVDEVAYHEKYPTIYHLRKKLVDSTDKADLRLIYLALAHMIKFRGHFLIEGDLNPDNSDVDKLFIQLVQTYNQLFEENPINASGVDAKAILSARLSKSRRLENLIAQLPGEKKNGLFGNLIALSLGLTPNFKSNFDLAEDAKLQLSKDTYDDDLDNLLAQIGDQYADLFLAAKNLSDAILLSDILRVNTEITKAPLSASMIKRYDEHHQDLTLLKALVRQQLPEKYKEIFFDQSKNGYAGYIDGGASQEEFYKFIKPILEKMDGTEELLVKLNREDLLRKQRTFDNGSIPHQIHLGELHAILRRQEDFYPFLKDNREKIEKILTFRIPYYVGPLARGNSRFAWMTRKSEETITPWNFEEVVDKGASAQSFIERMTNFDKNLPNEKVLPKHSLLYEYFTVYNELTKVKYVTEGMRKPAFLSGEQKKAIVDLLFKTNRKVTVKQLKEDYFKKIECFDSVEISGVEDRFNASLGTYHDLLKIIKDKDFLDNEENEDILEDIVLTLTLFEDREMIEERLKTYAHLFDDKVMKQLKRRRYTGWGRLSRKLINGIRDKQSGKTILDFLKSDGFANRNFMQLIHDDSLTFKEDIQKAQVSGQGDSLHEHIANLAGSPAIKKGILQTVKVVDELVKVMGRHKPENIVIEMARENQTTQKGQKNSRERMKRIEEGIKELGSQILKEHPVENTQLQNEKLYLYYLQNGRDMYVDQELDINRLSDYDVDHIVPQSFLKDDSIDNKVLTRSDKARGKSDNVPSEEVVKKMKNYWRQLLNAKLITQRKFDNLTKAERGGLSELDKAGFIKRQLVETRQITKHVAQILDSRMNTKYDENDKLIREVKVITLKSKLVSDFRKDFQFYKVREINNYHHAHDAYLNAVVGTALIKKYPKLESEFVYGDYKVYDVRKMIAKSEQEIGKATAKYFFYSNIMNFFKTEITLANGEIRKRPLIETNGETGEIVWDKGRDFATVRKVLSMPQVNIVKKTEVQTGGFSKESILPKRNSDKLIARKKDWDPKKYGGFDSPTVAYSVLVVAKVEKGKSKKLKSVKELLGITIMERSSFEKNPIDFLEAKGYKEVKKDLIIKLPKYSLFELENGRKRMLASAGELQKGNELALPSKYVNFLYLASHYEKLKGSPEDNEQKQLFVEQHKHYLDEIIEQISEFSKRVILADANLDKVLSAYNKHRDKPIREQAENIIHLFTLTNLGAPAAFKYFDTTIDRKRYTSTKEVLDATLIHQSITGLYETRIDLSQLGGDGGGGGGGSPAPGGTAPLEEEYRLFLEAPIQNVTLLEQWKREIPKVWAEINPPGLASTQAPIHVQLLSTALPVRVRQYPITLEAKRSLRETIRKFRAAGILRPVHSPWNTPLLPVRKSGTSEYRMVQDLREVNKRVETIHPTVPNPYTLLSLLPPDRIWYSVLDLKDAFFCIPLAPESQLIFAFEWADAEEGESGQLTWTRLPQGFKNSPTLFNEALNRDLQGFRLDHPSVSLLQYVDDLLIAADTQAACLSATRDLLMTLAELGYRVSGKKAQLCQEEVTYLGFKIHKGSRSLSNSRTQAILQIPVPKTKRQVREFLGKIGYCRLFIPGFAELAQPLYAATRPGNDPLVWGEKEEEAFQSLKLALTQPPALALPSLDKPFQLFVEETSGAAKGVLTQALGPWKRPVAYLSKRLDPVAAGWPRCLRAIAAAALLTREASKLTFGQDIEITSSHNLESLLRSPPDKWLTNARITQYQVLLLDPPRVRFKQTAALNPATLLPETDDTLPIHHCLDTLDSLTSTRPDLTDQPLAQAEATLFTDGSSYIRDGKRYAGAAVVTLDSVIWAEPLPIGTSAQKAELIALTKALEWSKDKSVNIYTDSRYAFATLHVHGMIYRERGWLTAGGKAIKNAPEILALLTAVWLPKRVAVMHCKGHQKDDAPTSTGNRRADEVAREVAIRPLSTQATISAGKRTADGSEFEKRTADGSEFESPKKKAKVE

SEQ ID NO: 1433 - protein, 2098 aa, synthetic construct
MPAAKRVKLDGGDKKYSIGLDIGTNSVGWAVITDEYKVPSKKFKVLGNTDRHSIKKNLIGALLFDSGETAEATRLKRTARRRYTRRKNRICYLQEIFSNEMAKVDDSFFHRLEESFLVEEDKKHERHPIFGNIVDEVAYHEKYPTIYHLRKKLVDSTDKADLRLIYLALAHMIKFRGHFLIEGDLNPDNSDVDKLFIQLVQTYNQLFEENPINASGVDAKAILSARLSKSRRLENLIAQLPGEKKNGLFGNLIALSLGLTPNFKSNFDLAEDAKLQLSKDTYDDDLDNLLAQIGDQYADLFLAAKNLSDAILLSDILRVNTEITKAPLSASMIKRYDEHHQDLTLLKALVRQQLPEKYKEIFFDQSKNGYAGYIDGGASQEEFYKFIKPILEKMDGTEELLVKLNREDLLRKQRTFDNGSIPHQIHLGELHAILRRQEDFYPFLKDNREKIEKILTFRIPYYVGPLARGNSRFAWMTRKSEETITPWNFEEVVDKGASAQSFIERMTNFDKNLPNEKVLPKHSLLYEYFTVYNELTKVKYVTEGMRKPAFLSGEQKKAIVDLLFKTNRKVTVKQLKEDYFKKIECFDSVEISGVEDRFNASLGTYHDLLKIIKDKDFLDNEENEDILEDIVLTLTLFEDREMIEERLKTYAHLFDDKVMKQLKRRRYTGWGRLSRKLINGIRDKQSGKTILDFLKSDGFANRNFMQLIHDDSLTFKEDIQKAQVSGQGDSLHEHIANLAGSPAIKKGILQTVKVVDELVKVMGRHKPENIVIEMARENQTTQKGQKNSRERMKRIEEGIKELGSQILKEHPVENTQLQNEKLYLYYLQNGRDMYVDQELDINRLSDYDVDHIVPQSFLKDDSIDNKVLTRSDKARGKSDNVPSEEVVKKMKNYWRQLLNAKLITQRKFDNLTKAERGGLSELDKAGFIKRQLVETRQITKHVAQILDSRMNTKYDENDKLIREVKVITLKSKLVSDFRKDFQFYKVREINNYHHAHDAYLNAVVGTALIKKYPKLESEFVYGDYKVYDVRKMIAKSEQEIGKATAKYFFYSNIMNFFKTEITLANGEIRKRPLIETNGETGEIVWDKGRDFATVRKVLSMPQVNIVKKTEVQTGGFSKESILPKRNSDKLIARKKDWDPKKYGGFDSPTVAYSVLVVAKVEKGKSKKLKSVKELLGITIMERSSFEKNPIDFLEAKGYKEVKKDLIIKLPKYSLFELENGRKRMLASAGELQKGNELALPSKYVNFLYLASHYEKLKGSPEDNEQKQLFVEQHKHYLDEIIEQISEFSKRVILADANLDKVLSAYNKHRDKPIREQAENIIHLFTLTNLGAPAAFKYFDTTIDRKRYTSTKEVLDATLIHQSITGLYETRIDLSQLGGDGGGGSEAAAKPAPGGTAPLEEEYRLFLEAPIQNVTLLEQWKREIPKVWAEINPPGLASTQAPIHVQLLSTALPVRVRQYPITLEAKRSLRETIRKFRAAGILRPVHSPWNTPLLPVRKSGTSEYRMVQDLREVNKRVETIHPTVPNPYTLLSLLPPDRIWYSVLDLKDAFFCIPLAPESQLIFAFEWADAEEGESGQLTWTRLPQGFKNSPTLFNEALNRDLQGFRLDHPSVSLLQYVDDLLIAADTQAACLSATRDLLMTLAELGYRVSGKKAQLCQEEVTYLGFKIHKGSRSLSNSRTQAILQIPVPKTKRQVREFLGKIGYCRLFIPGFAELAQPLYAATRPGNDPLVWGEKEEEAFQSLKLALTQPPALALPSLDKPFQLFVEETSGAAKGVLTQALGPWKRPVAYLSKRLDPVAAGWPRCLRAIAAAALLTREASKLTFGQDIEITSSHNLESLLRSPPDKWLTNARITQYQVLLLDPPRVRFKQTAALNPATLLPETDDTLPIHHCLDTLDSLTSTRPDLTDQPLAQAEATLFTDGSSYIRDGKRYAGAAVVTLDSVIWAEPLPIGTSAQKAELIALTKALEWSKDKSVNIYTDSRYAFATLHVHGMIYRERGWLTAGGKAIKNAPEILALLTAVWLPKRVAVMHCKGHQKDDAPTSTGNRRADEVAREVAIRPLSTQATISAGKRTADGSEFEKRTADGSEFESPKKKAKVE

SEQ ID NO: 1434 - protein, 2093 aa, synthetic construct
MPAAKRVKLDGGDKKYSIGLDIGTNSVGWAVITDEYKVPSKKFKVLGNTDRHSIKKNLIGALLFDSGETAEATRLKRTARRRYTRRKNRICYLQEIFSNEMAKVDDSFFHRLEESFLVEEDKKHERHPIFGNIVDEVAYHEKYPTIYHLRKKLVDSTDKADLRLIYLALAHMIKFRGHFLIEGDLNPDNSDVDKLFIQLVQTYNQLFEENPINASGVDAKAILSARLSKSRRLENLIAQLPGEKKNGLFGNLIALSLGLTPNFKSNFDLAEDAKLQLSKDTYDDDLDNLLAQIGDQYADLFLAAKNLSDAILLSDILRVNTEITKAPLSASMIKRYDEHHQDLTLLKALVRQQLPEKYKEIFFDQSKNGYAGYIDGGASQEEFYKFIKPILEKMDGTEELLVKLNREDLLRKQRTFDNGSIPHQIHLGELHAILRRQEDFYPFLKDNREKIEKILTFRIPYYVGPLARGNSRFAWMTRKSEETITPWNFEEVVDKGASAQSFIERMTNFDKNLPNEKVLPKHSLLYEYFTVYNELTKVKYVTEGMRKPAFLSGEQKKAIVDLLFKTNRKVTVKQLKEDYFKKIECFDSVEISGVEDRFNASLGTYHDLLKIIKDKDFLDNEENEDILEDIVLTLTLFEDREMIEERLKTYAHLFDDKVMKQLKRRRYTGWGRLSRKLINGIRDKQSGKTILDFLKSDGFANRNFMQLIHDDSLTFKEDIQKAQVSGQGDSLHEHIANLAGSPAIKKGILQTVKVVDELVKVMGRHKPENIVIEMARENQTTQKGQKNSRERMKRIEEGIKELGSQILKEHPVENTQLQNEKLYLYYLQNGRDMYVDQELDINRLSDYDVDHIVPQSFLKDDSIDNKVLTRSDKARGKSDNVPSEEVVKKMKNYWRQLLNAKLITQRKFDNLTKAERGGLSELDKAGFIKRQLVETRQITKHVAQILDSRMNTKYDENDKLIREVKVITLKSKLVSDFRKDFQFYKVREINNYHHAHDAYLNAVVGTALIKKYPKLESEFVYGDYKVYDVRKMIAKSEQEIGKATAKYFFYSNIMNFFKTEITLANGEIRKRPLIETNGETGEIVWDKGRDFATVRKVLSMPQVNIVKKTEVQTGGFSKESILPKRNSDKLIARKKDWDPKKYGGFDSPTVAYSVLVVAKVEKGKSKKLKSVKELLGITIMERSSFEKNPIDFLEAKGYKEVKKDLIIKLPKYSLFELENGRKRMLASAGELQKGNELALPSKYVNFLYLASHYEKLKGSPEDNEQKQLFVEQHKHYLDEIIEQISEFSKRVILADANLDKVLSAYNKHRDKPIREQAENIIHLFTLTNLGAPAAFKYFDTTIDRKRYTSTKEVLDATLIHQSITGLYETRIDLSQLGGDGGGGSGGSGGTAPLEEEYRLFLEAPIQNVTLLEQWKREIPKVWAEINPPGLASTQAPIHVQLLSTALPVRVRQYPITLEAKRSLRETIRKFRAAGILRPVHSPWNTPLLPVRKSGTSEYRMVQDLREVNKRVETIHPTVPNPYTLLSLLPPDRIWYSVLDLKDAFFCIPLAPESQLIFAFEWADAEEGESGQLTWTRLPQGFKNSPTLFNEALNRDLQGFRLDHPSVSLLQYVDDLLIAADTQAACLSATRDLLMTLAELGYRVSGKKAQLCQEEVTYLGFKIHKGSRSLSNSRTQAILQIPVPKTKRQVREFLGKIGYCRLFIPGFAELAQPLYAATRPGNDPLVWGEKEEEAFQSLKLALTQPPALALPSLDKPFQLFVEETSGAAKGVLTQALGPWKRPVAYLSKRLDPVAAGWPRCLRAIAAAALLTREASKLTFGQDIEITSSHNLESLLRSPPDKWLTNARITQYQVLLLDPPRVRFKQTAALNPATLLPETDDTLPIHHCLDTLDSLTSTRPDLTDQPLAQAEATLFTDGSSYIRDGKRYAGAAVVTLDSVIWAEPLPIGTSAQKAELIALTKALEWSKDKSVNIYTDSRYAFATLHVHGMIYRERGWLTAGGKAIKNAPEILALLTAVWLPKRVAVMHCKGHQKDDAPTSTGNRRADEVAREVAIRPLSTQATISAGKRTADGSEFEKRTADGSEFESPKKKAKVE

SEQ ID NO: 1435 - protein, 2091 aa, synthetic construct
MPAAKRVKLDGGDKKYSIGLDIGTNSVGWAVITDEYKVPSKKFKVLGNTDRHSIKKNLIGALLFDSGETAEATRLKRTARRRYTRRKNRICYLQEIFSNEMAKVDDSFFHRLEESFLVEEDKKHERHPIFGNIVDEVAYHEKYPTIYHLRKKLVDSTDKADLRLIYLALAHMIKFRGHFLIEGDLNPDNSDVDKLFIQLVQTYNQLFEENPINASGVDAKAILSARLSKSRRLENLIAQLPGEKKNGLFGNLIALSLGLTPNFKSNFDLAEDAKLQLSKDTYDDDLDNLLAQIGDQYADLFLAAKNLSDAILLSDILRVNTEITKAPLSASMIKRYDEHHQDLTLLKALVRQQLPEKYKEIFFDQSKNGYAGYIDGGASQEEFYKFIKPILEKMDGTEELLVKLNREDLLRKQRTFDNGSIPHQIHLGELHAILRRQEDFYPFLKDNREKIEKILTFRIPYYVGPLARGNSRFAWMTRKSEETITPWNFEEVVDKGASAQSFIERMTNFDKNLPNEKVLPKHSLLYEYFTVYNELTKVKYVTEGMRKPAFLSGEQKKAIVDLLFKTNRKVTVKQLKEDYFKKIECFDSVEISGVEDRFNASLGTYHDLLKIIKDKDFLDNEENEDILEDIVLTLTLFEDREMIEERLKTYAHLFDDKVMKQLKRRRYTGWGRLSRKLINGIRDKQSGKTILDFLKSDGFANRNFMQLIHDDSLTFKEDIQKAQVSGQGDSLHEHIANLAGSPAIKKGILQTVKVVDELVKVMGRHKPENIVIEMARENQTTQKGQKNSRERMKRIEEGIKELGSQILKEHPVENTQLQNEKLYLYYLQNGRDMYVDQELDINRLSDYDVDHIVPQSFLKDDSIDNKVLTRSDKARGKSDNVPSEEVVKKMKNYWRQLLNAKLITQRKFDNLTKAERGGLSELDKAGFIKRQLVETRQITKHVAQILDSRMNTKYDENDKLIREVKVITLKSKLVSDFRKDFQFYKVREINNYHHAHDAYLNAVVGTALIKKYPKLESEFVYGDYKVYDVRKMIAKSEQEIGKATAKYFFYSNIMNFFKTEITLANGEIRKRPLIETNGETGEIVWDKGRDFATVRKVLSMPQVNIVKKTEVQTGGFSKESILPKRNSDKLIARKKDWDPKKYGGFDSPTVAYSVLVVAKVEKGKSKKLKSVKELLGITIMERSSFEKNPIDFLEAKGYKEVKKDLIIKLPKYSLFELENGRKRMLASAGELQKGNELALPSKYVNFLYLASHYEKLKGSPEDNEQKQLFVEQHKHYLDEIIEQISEFSKRVILADANLDKVLSAYNKHRDKPIREQAENIIHLFTLTNLGAPAAFKYFDTTIDRKRYTSTKEVLDATLIHQSITGLYETRIDLSQLGGDGGGGGGGGTAPLEEEYRLFLEAPIQNVTLLEQWKREIPKVWAEINPPGLASTQAPIHVQLLSTALPVRVRQYPITLEAKRSLRETIRKFRAAGILRPVHSPWNTPLLPVRKSGTSEYRMVQDLREVNKRVETIHPTVPNPYTLLSLLPPDRIWYSVLDLKDAFFCIPLAPESQLIFAFEWADAEEGESGQLTWTRLPQGFKNSPTLFNEALNRDLQGFRLDHPSVSLLQYVDDLLIAADTQAACLSATRDLLMTLAELGYRVSGKKAQLCQEEVTYLGFKIHKGSRSLSNSRTQAILQIPVPKTKRQVREFLGKIGYCRLFIPGFAELAQPLYAATRPGNDPLVWGEKEEEAFQSLKLALTQPPALALPSLDKPFQLFVEETSGAAKGVLTQALGPWKRPVAYLSKRLDPVAAGWPRCLRAIAAAALLTREASKLTFGQDIEITSSHNLESLLRSPPDKWLTNARITQYQVLLLDPPRVRFKQTAALNPATLLPETDDTLPIHHCLDTLDSLTSTRPDLTDQPLAQAEATLFTDGSSYIRDGKRYAGAAVVTLDSVIWAEPLPIGTSAQKAELIALTKALEWSKDKSVNIYTDSRYAFATLHVHGMIYRERGWLTAGGKAIKNAPEILALLTAVWLPKRVAVMHCKGHQKDDAPTSTGNRRADEVAREVAIRPLSTQATISAGKRTADGSEFEKRTADGSEFESPKKKAKVE

SEQ ID NO: 1436 - protein, 2096 aa, synthetic construct
MPAAKRVKLDGGDKKYSIGLDIGTNSVGWAVITDEYKVPSKKFKVLGNTDRHSIKKNLIGALLFDSGETAEATRLKRTARRRYTRRKNRICYLQEIFSNEMAKVDDSFFHRLEESFLVEEDKKHERHPIFGNIVDEVAYHEKYPTIYHLRKKLVDSTDKADLRLIYLALAHMIKFRGHFLIEGDLNPDNSDVDKLFIQLVQTYNQLFEENPINASGVDAKAILSARLSKSRRLENLIAQLPGEKKNGLFGNLIALSLGLTPNFKSNFDLAEDAKLQLSKDTYDDDLDNLLAQIGDQYADLFLAAKNLSDAILLSDILRVNTEITKAPLSASMIKRYDEHHQDLTLLKALVRQQLPEKYKEIFFDQSKNGYAGYIDGGASQEEFYKFIKPILEKMDGTEELLVKLNREDLLRKQRTFDNGSIPHQIHLGELHAILRRQEDFYPFLKDNREKIEKILTFRIPYYVGPLARGNSRFAWMTRKSEETITPWNFEEVVDKGASAQSFIERMTNFDKNLPNEKVLPKHSLLYEYFTVYNELTKVKYVTEGMRKPAFLSGEQKKAIVDLLFKTNRKVTVKQLKEDYFKKIECFDSVEISGVEDRFNASLGTYHDLLKIIKDKDFLDNEENEDILEDIVLTLTLFEDREMIEERLKTYAHLFDDKVMKQLKRRRYTGWGRLSRKLINGIRDKQSGKTILDFLKSDGFANRNFMQLIHDDSLTFKEDIQKAQVSGQGDSLHEHIANLAGSPAIKKGILQTVKVVDELVKVMGRHKPENIVIEMARENQTTQKGQKNSRERMKRIEEGIKELGSQILKEHPVENTQLQNEKLYLYYLQNGRDMYVDQELDINRLSDYDVDHIVPQSFLKDDSIDNKVLTRSDKARGKSDNVPSEEVVKKMKNYWRQLLNAKLITQRKFDNLTKAERGGLSELDKAGFIKRQLVETRQITKHVAQILDSRMNTKYDENDKLIREVKVITLKSKLVSDFRKDFQFYKVREINNYHHAHDAYLNAVVGTALIKKYPKLESEFVYGDYKVYDVRKMIAKSEQEIGKATAKYFFYSNIMNFFKTEITLANGEIRKRPLIETNGETGEIVWDKGRDFATVRKVLSMPQVNIVKKTEVQTGGFSKESILPKRNSDKLIARKKDWDPKKYGGFDSPTVAYSVLVVAKVEKGKSKKLKSVKELLGITIMERSSFEKNPIDFLEAKGYKEVKKDLIIKLPKYSLFELENGRKRMLASAGELQKGNELALPSKYVNFLYLASHYEKLKGSPEDNEQKQLFVEQHKHYLDEIIEQISEFSKRVILADANLDKVLSAYNKHRDKPIREQAENIIHLFTLTNLGAPAAFKYFDTTIDRKRYTSTKEVLDATLIHQSITGLYETRIDLSQLGGDGGPAPGGGGGSGGTAPLEEEYRLFLEAPIQNVTLLEQWKREIPKVWAEINPPGLASTQAPIHVQLLSTALPVRVRQYPITLEAKRSLRETIRKFRAAGILRPVHSPWNTPLLPVRKSGTSEYRMVQDLREVNKRVETIHPTVPNPYTLLSLLPPDRIWYSVLDLKDAFFCIPLAPESQLIFAFEWADAEEGESGQLTWTRLPQGFKNSPTLFNEALNRDLQGFRLDHPSVSLLQYVDDLLIAADTQAACLSATRDLLMTLAELGYRVSGKKAQLCQEEVTYLGFKIHKGSRSLSNSRTQAILQIPVPKTKRQVREFLGKIGYCRLFIPGFAELAQPLYAATRPGNDPLVWGEKEEEAFQSLKLALTQPPALALPSLDKPFQLFVEETSGAAKGVLTQALGPWKRPVAYLSKRLDPVAAGWPRCLRAIAAAALLTREASKLTFGQDIEITSSHNLESLLRSPPDKWLTNARITQYQVLLLDPPRVRFKQTAALNPATLLPETDDTLPIHHCLDTLDSLTSTRPDLTDQPLAQAEATLFTDGSSYIRDGKRYAGAAVVTLDSVIWAEPLPIGTSAQKAELIALTKALEWSKDKSVNIYTDSRYAFATLHVHGMIYRERGWLTAGGKAIKNAPEILALLTAVWLPKRVAVMHCKGHQKDDAPTSTGNRRADEVAREVAIRPLSTQATISAGKRTADGSEFEKRTADGSEFESPKKKAKVE

SEQ ID NO: 1437 - protein, 2096 aa, synthetic construct
MPAAKRVKLDGGDKKYSIGLDIGTNSVGWAVITDEYKVPSKKFKVLGNTDRHSIKKNLIGALLFDSGETAEATRLKRTARRRYTRRKNRICYLQEIFSNEMAKVDDSFFHRLEESFLVEEDKKHERHPIFGNIVDEVAYHEKYPTIYHLRKKLVDSTDKADLRLIYLALAHMIKFRGHFLIEGDLNPDNSDVDKLFIQLVQTYNQLFEENPINASGVDAKAILSARLSKSRRLENLIAQLPGEKKNGLFGNLIALSLGLTPNFKSNFDLAEDAKLQLSKDTYDDDLDNLLAQIGDQYADLFLAAKNLSDAILLSDILRVNTEITKAPLSASMIKRYDEHHQDLTLLKALVRQQLPEKYKEIFFDQSKNGYAGYIDGGASQEEFYKFIKPILEKMDGTEELLVKLNREDLLRKQRTFDNGSIPHQIHLGELHAILRRQEDFYPFLKDNREKIEKILTFRIPYYVGPLARGNSRFAWMTRKSEETITPWNFEEVVDKGASAQSFIERMTNFDKNLPNEKVLPKHSLLYEYFTVYNELTKVKYVTEGMRKPAFLSGEQKKAIVDLLFKTNRKVTVKQLKEDYFKKIECFDSVEISGVEDRFNASLGTYHDLLKIIKDKDFLDNEENEDILEDIVLTLTLFEDREMIEERLKTYAHLFDDKVMKQLKRRRYTGWGRLSRKLINGIRDKQSGKTILDFLKSDGFANRNFMQLIHDDSLTFKEDIQKAQVSGQGDSLHEHIANLAGSPAIKKGILQTVKVVDELVKVMGRHKPENIVIEMARENQTTQKGQKNSRERMKRIEEGIKELGSQILKEHPVENTQLQNEKLYLYYLQNGRDMYVDQELDINRLSDYDVDHIVPQSFLKDDSIDNKVLTRSDKARGKSDNVPSEEVVKKMKNYWRQLLNAKLITQRKFDNLTKAERGGLSELDKAGFIKRQLVETRQITKHVAQILDSRMNTKYDENDKLIREVKVITLKSKLVSDFRKDFQFYKVREINNYHHAHDAYLNAVVGTALIKKYPKLESEFVYGDYKVYDVRKMIAKSEQEIGKATAKYFFYSNIMNFFKTEITLANGEIRKRPLIETNGETGEIVWDKGRDFATVRKVLSMPQVNIVKKTEVQTGGFSKESILPKRNSDKLIARKKDWDPKKYGGFDSPTVAYSVLVVAKVEKGKSKKLKSVKELLGITIMERSSFEKNPIDFLEAKGYKEVKKDLIIKLPKYSLFELENGRKRMLASAGELQKGNELALPSKYVNFLYLASHYEKLKGSPEDNEQKQLFVEQHKHYLDEIIEQISEFSKRVILADANLDKVLSAYNKHRDKPIREQAENIIHLFTLTNLGAPAAFKYFDTTIDRKRYTSTKEVLDATLIHQSITGLYETRIDLSQLGGDGGGSSGGSGGGGGTAPLEEEYRLFLEAPIQNVTLLEQWKREIPKVWAEINPPGLASTQAPIHVQLLSTALPVRVRQYPITLEAKRSLRETIRKFRAAGILRPVHSPWNTPLLPVRKSGTSEYRMVQDLREVNKRVETIHPTVPNPYTLLSLLPPDRIWYSVLDLKDAFFCIPLAPESQLIFAFEWADAEEGESGQLTWTRLPQGFKNSPTLFNEALNRDLQGFRLDHPSVSLLQYVDDLLIAADTQAACLSATRDLLMTLAELGYRVSGKKAQLCQEEVTYLGFKIHKGSRSLSNSRTQAILQIPVPKTKRQVREFLGKIGYCRLFIPGFAELAQPLYAATRPGNDPLVWGEKEEEAFQSLKLALTQPPALALPSLDKPFQLFVEETSGAAKGVLTQALGPWKRPVAYLSKRLDPVAAGWPRCLRAIAAAALLTREASKLTFGQDIEITSSHNLESLLRSPPDKWLTNARITQYQVLLLDPPRVRFKQTAALNPATLLPETDDTLPIHHCLDTLDSLTSTRPDLTDQPLAQAEATLFTDGSSYIRDGKRYAGAAVVTLDSVIWAEPLPIGTSAQKAELIALTKALEWSKDKSVNIYTDSRYAFATLHVHGMIYRERGWLTAGGKAIKNAPEILALLTAVWLPKRVAVMHCKGHQKDDAPTSTGNRRADEVAREVAIRPLSTQATISAGKRTADGSEFEKRTADGSEFESPKKKAKVE

SEQ ID NO: 1438 - protein, 2092 aa, synthetic construct
MPAAKRVKLDGGDKKYSIGLDIGTNSVGWAVITDEYKVPSKKFKVLGNTDRHSIKKNLIGALLFDSGETAEATRLKRTARRRYTRRKNRICYLQEIFSNEMAKVDDSFFHRLEESFLVEEDKKHERHPIFGNIVDEVAYHEKYPTIYHLRKKLVDSTDKADLRLIYLALAHMIKFRGHFLIEGDLNPDNSDVDKLFIQLVQTYNQLFEENPINASGVDAKAILSARLSKSRRLENLIAQLPGEKKNGLFGNLIALSLGLTPNFKSNFDLAEDAKLQLSKDTYDDDLDNLLAQIGDQYADLFLAAKNLSDAILLSDILRVNTEITKAPLSASMIKRYDEHHQDLTLLKALVRQQLPEKYKEIFFDQSKNGYAGYIDGGASQEEFYKFIKPILEKMDGTEELLVKLNREDLLRKQRTFDNGSIPHQIHLGELHAILRRQEDFYPFLKDNREKIEKILTFRIPYYVGPLARGNSRFAWMTRKSEETITPWNFEEVVDKGASAQSFIERMTNFDKNLPNEKVLPKHSLLYEYFTVYNELTKVKYVTEGMRKPAFLSGEQKKAIVDLLFKTNRKVTVKQLKEDYFKKIECFDSVEISGVEDRFNASLGTYHDLLKIIKDKDFLDNEENEDILEDIVLTLTLFEDREMIEERLKTYAHLFDDKVMKQLKRRRYTGWGRLSRKLINGIRDKQSGKTILDFLKSDGFANRNFMQLIHDDSLTFKEDIQKAQVSGQGDSLHEHIANLAGSPAIKKGILQTVKVVDELVKVMGRHKPENIVIEMARENQTTQKGQKNSRERMKRIEEGIKELGSQILKEHPVENTQLQNEKLYLYYLQNGRDMYVDQELDINRLSDYDVDHIVPQSFLKDDSIDNKVLTRSDKARGKSDNVPSEEVVKKMKNYWRQLLNAKLITQRKFDNLTKAERGGLSELDKAGFIKRQLVETRQITKHVAQILDSRMNTKYDENDKLIREVKVITLKSKLVSDFRKDFQFYKVREINNYHHAHDAYLNAVVGTALIKKYPKLESEFVYGDYKVYDVRKMIAKSEQEIGKATAKYFFYSNIMNFFKTEITLANGEIRKRPLIETNGETGEIVWDKGRDFATVRKVLSMPQVNIVKKTEVQTGGFSKESILPKRNSDKLIARKKDWDPKKYGGFDSPTVAYSVLVVAKVEKGKSKKLKSVKELLGITIMERSSFEKNPIDFLEAKGYKEVKKDLIIKLPKYSLFELENGRKRMLASAGELQKGNELALPSKYVNFLYLASHYEKLKGSPEDNEQKQLFVEQHKHYLDEIIEQISEFSKRVILADANLDKVLSAYNKHRDKPIREQAENIIHLFTLTNLGAPAAFKYFDTTIDRKRYTSTKEVLDATLIHQSITGLYETRIDLSQLGGDGGGGGGGGGTAPLEEEYRLFLEAPIQNVTLLEQWKREIPKVWAEINPPGLASTQAPIHVQLLSTALPVRVRQYPITLEAKRSLRETIRKFRAAGILRPVHSPWNTPLLPVRKSGTSEYRMVQDLREVNKRVETIHPTVPNPYTLLSLLPPDRIWYSVLDLKDAFFCIPLAPESQLIFAFEWADAEEGESGQLTWTRLPQGFKNSPTLFNEALNRDLQGFRLDHPSVSLLQYVDDLLIAADTQAACLSATRDLLMTLAELGYRVSGKKAQLCQEEVTYLGFKIHKGSRSLSNSRTQAILQIPVPKTKRQVREFLGKIGYCRLFIPGFAELAQPLYAATRPGNDPLVWGEKEEEAFQSLKLALTQPPALALPSLDKPFQLFVEETSGAAKGVLTQALGPWKRPVAYLSKRLDPVAAGWPRCLRAIAAAALLTREASKLTFGQDIEITSSHNLESLLRSPPDKWLTNARITQYQVLLLDPPRVRFKQTAALNPATLLPETDDTLPIHHCLDTLDSLTSTRPDLTDQPLAQAEATLFTDGSSYIRDGKRYAGAAVVTLDSVIWAEPLPIGTSAQKAELIALTKALEWSKDKSVNIYTDSRYAFATLHVHGMIYRERGWLTAGGKAIKNAPEILALLTAVWLPKRVAVMHCKGHQKDDAPTSTGNRRADEVAREVAIRPLSTQATISAGKRTADGSEFEKRTADGSEFESPKKKAKVE

SEQ ID NO: 1439 - protein, 2098 aa, synthetic construct
MPAAKRVKLDGGDKKYSIGLDIGTNSVGWAVITDEYKVPSKKFKVLGNTDRHSIKKNLIGALLFDSGETAEATRLKRTARRRYTRRKNRICYLQEIFSNEMAKVDDSFFHRLEESFLVEEDKKHERHPIFGNIVDEVAYHEKYPTIYHLRKKLVDSTDKADLRLIYLALAHMIKFRGHFLIEGDLNPDNSDVDKLFIQLVQTYNQLFEENPINASGVDAKAILSARLSKSRRLENLIAQLPGEKKNGLFGNLIALSLGLTPNFKSNFDLAEDAKLQLSKDTYDDDLDNLLAQIGDQYADLFLAAKNLSDAILLSDILRVNTEITKAPLSASMIKRYDEHHQDLTLLKALVRQQLPEKYKEIFFDQSKNGYAGYIDGGASQEEFYKFIKPILEKMDGTEELLVKLNREDLLRKQRTFDNGSIPHQIHLGELHAILRRQEDFYPFLKDNREKIEKILTFRIPYYVGPLARGNSRFAWMTRKSEETITPWNFEEVVDKGASAQSFIERMTNFDKNLPNEKVLPKHSLLYEYFTVYNELTKVKYVTEGMRKPAFLSGEQKKAIVDLLFKTNRKVTVKQLKEDYFKKIECFDSVEISGVEDRFNASLGTYHDLLKIIKDKDFLDNEENEDILEDIVLTLTLFEDREMIEERLKTYAHLFDDKVMKQLKRRRYTGWGRLSRKLINGIRDKQSGKTILDFLKSDGFANRNFMQLIHDDSLTFKEDIQKAQVSGQGDSLHEHIANLAGSPAIKKGILQTVKVVDELVKVMGRHKPENIVIEMARENQTTQKGQKNSRERMKRIEEGIKELGSQILKEHPVENTQLQNEKLYLYYLQNGRDMYVDQELDINRLSDYDVDHIVPQSFLKDDSIDNKVLTRSDKARGKSDNVPSEEVVKKMKNYWRQLLNAKLITQRKFDNLTKAERGGLSELDKAGFIKRQLVETRQITKHVAQILDSRMNTKYDENDKLIREVKVITLKSKLVSDFRKDFQFYKVREINNYHHAHDAYLNAVVGTALIKKYPKLESEFVYGDYKVYDVRKMIAKSEQEIGKATAKYFFYSNIMNFFKTEITLANGEIRKRPLIETNGETGEIVWDKGRDFATVRKVLSMPQVNIVKKTEVQTGGFSKESILPKRNSDKLIARKKDWDPKKYGGFDSPTVAYSVLVVAKVEKGKSKKLKSVKELLGITIMERSSFEKNPIDFLEAKGYKEVKKDLIIKLPKYSLFELENGRKRMLASAGELQKGNELALPSKYVNFLYLASHYEKLKGSPEDNEQKQLFVEQHKHYLDEIIEQISEFSKRVILADANLDKVLSAYNKHRDKPIREQAENIIHLFTLTNLGAPAAFKYFDTTIDRKRYTSTKEVLDATLIHQSITGLYETRIDLSQLGGDGGEAAAKPAPGGSGGTAPLEEEYRLFLEAPIQNVTLLEQWKREIPKVWAEINPPGLASTQAPIHVQLLSTALPVRVRQYPITLEAKRSLRETIRKFRAAGILRPVHSPWNTPLLPVRKSGTSEYRMVQDLREVNKRVETIHPTVPNPYTLLSLLPPDRIWYSVLDLKDAFFCIPLAPESQLIFAFEWADAEEGESGQLTWTRLPQGFKNSPTLFNEALNRDLQGFRLDHPSVSLLQYVDDLLIAADTQAACLSATRDLLMTLAELGYRVSGKKAQLCQEEVTYLGFKIHKGSRSLSNSRTQAILQIPVPKTKRQVREFLGKIGYCRLFIPGFAELAQPLYAATRPGNDPLVWGEKEEEAFQSLKLALTQPPALALPSLDKPFQLFVEETSGAAKGVLTQALGPWKRPVAYLSKRLDPVAAGWPRCLRAIAAAALLTREASKLTFGQDIEITSSHNLESLLRSPPDKWLTNARITQYQVLLLDPPRVRFKQTAALNPATLLPETDDTLPIHHCLDTLDSLTSTRPDLTDQPLAQAEATLFTDGSSYIRDGKRYAGAAVVTLDSVIWAEPLPIGTSAQKAELIALTKALEWSKDKSVNIYTDSRYAFATLHVHGMIYRERGWLTAGGKAIKNAPEILALLTAVWLPKRVAVMHCKGHQKDDAPTSTGNRRADEVAREVAIRPLSTQATISAGKRTADGSEFEKRTADGSEFESPKKKAKVE

SEQ ID NO: 1440 - protein, 2094 aa, synthetic construct
MPAAKRVKLDGGDKKYSIGLDIGTNSVGWAVITDEYKVPSKKFKVLGNTDRHSIKKNLIGALLFDSGETAEATRLKRTARRRYTRRKNRICYLQEIFSNEMAKVDDSFFHRLEESFLVEEDKKHERHPIFGNIVDEVAYHEKYPTIYHLRKKLVDSTDKADLRLIYLALAHMIKFRGHFLIEGDLNPDNSDVDKLFIQLVQTYNQLFEENPINASGVDAKAILSARLSKSRRLENLIAQLPGEKKNGLFGNLIALSLGLTPNFKSNFDLAEDAKLQLSKDTYDDDLDNLLAQIGDQYADLFLAAKNLSDAILLSDILRVNTEITKAPLSASMIKRYDEHHQDLTLLKALVRQQLPEKYKEIFFDQSKNGYAGYIDGGASQEEFYKFIKPILEKMDGTEELLVKLNREDLLRKQRTFDNGSIPHQIHLGELHAILRRQEDFYPFLKDNREKIEKILTFRIPYYVGPLARGNSRFAWMTRKSEETITPWNFEEVVDKGASAQSFIERMTNFDKNLPNEKVLPKHSLLYEYFTVYNELTKVKYVTEGMRKPAFLSGEQKKAIVDLLFKTNRKVTVKQLKEDYFKKIECFDSVEISGVEDRFNASLGTYHDLLKIIKDKDFLDNEENEDILEDIVLTLTLFEDREMIEERLKTYAHLFDDKVMKQLKRRRYTGWGRLSRKLINGIRDKQSGKTILDFLKSDGFANRNFMQLIHDDSLTFKEDIQKAQVSGQGDSLHEHIANLAGSPAIKKGILQTVKVVDELVKVMGRHKPENIVIEMARENQTTQKGQKNSRERMKRIEEGIKELGSQILKEHPVENTQLQNEKLYLYYLQNGRDMYVDQELDINRLSDYDVDHIVPQSFLKDDSIDNKVLTRSDKARGKSDNVPSEEVVKKMKNYWRQLLNAKLITQRKFDNLTKAERGGLSELDKAGFIKRQLVETRQITKHVAQILDSRMNTKYDENDKLIREVKVITLKSKLVSDFRKDFQFYKVREINNYHHAHDAYLNAVVGTALIKKYPKLESEFVYGDYKVYDVRKMIAKSEQEIGKATAKYFFYSNIMNFFKTEITLANGEIRKRPLIETNGETGEIVWDKGRDFATVRKVLSMPQVNIVKKTEVQTGGFSKESILPKRNSDKLIARKKDWDPKKYGGFDSPTVAYSVLVVAKVEKGKSKKLKSVKELLGITIMERSSFEKNPIDFLEAKGYKEVKKDLIIKLPKYSLFELENGRKRMLASAGELQKGNELALPSKYVNFLYLASHYEKLKGSPEDNEQKQLFVEQHKHYLDEIIEQISEFSKRVILADANLDKVLSAYNKHRDKPIREQAENIIHLFTLTNLGAPAAFKYFDTTIDRKRYTSTKEVLDATLIHQSITGLYETRIDLSQLGGDGGPAPAPAPGGTAPLEEEYRLFLEAPIQNVTLLEQWKREIPKVWAEINPPGLASTQAPIHVQLLSTALPVRVRQYPITLEAKRSLRETIRKFRAAGILRPVHSPWNTPLLPVRKSGTSEYRMVQDLREVNKRVETIHPTVPNPYTLLSLLPPDRIWYSVLDLKDAFFCIPLAPESQLIFAFEWADAEEGESGQLTWTRLPQGFKNSPTLFNEALNRDLQGFRLDHPSVSLLQYVDDLLIAADTQAACLSATRDLLMTLAELGYRVSGKKAQLCQEEVTYLGFKIHKGSRSLSNSRTQAILQIPVPKTKRQVREFLGKIGYCRLFIPGFAELAQPLYAATRPGNDPLVWGEKEEEAFQSLKLALTQPPALALPSLDKPFQLFVEETSGAAKGVLTQALGPWKRPVAYLSKRLDPVAAGWPRCLRAIAAAALLTREASKLTFGQDIEITSSHNLESLLRSPPDKWLTNARITQYQVLLLDPPRVRFKQTAALNPATLLPETDDTLPIHHCLDTLDSLTSTRPDLTDQPLAQAEATLFTDGSSYIRDGKRYAGAAVVTLDSVIWAEPLPIGTSAQKAELIALTKALEWSKDKSVNIYTDSRYAFATLHVHGMIYRERGWLTAGGKAIKNAPEILALLTAVWLPKRVAVMHCKGHQKDDAPTSTGNRRADEVAREVAIRPLSTQATISAGKRTADGSEFEKRTADGSEFESPKKKAKVE

SEQ ID NO: 1441 - protein, 2098 aa, synthetic construct
MPAAKRVKLDGGDKKYSIGLDIGTNSVGWAVITDEYKVPSKKFKVLGNTDRHSIKKNLIGALLFDSGETAEATRLKRTARRRYTRRKNRICYLQEIFSNEMAKVDDSFFHRLEESFLVEEDKKHERHPIFGNIVDEVAYHEKYPTIYHLRKKLVDSTDKADLRLIYLALAHMIKFRGHFLIEGDLNPDNSDVDKLFIQLVQTYNQLFEENPINASGVDAKAILSARLSKSRRLENLIAQLPGEKKNGLFGNLIALSLGLTPNFKSNFDLAEDAKLQLSKDTYDDDLDNLLAQIGDQYADLFLAAKNLSDAILLSDILRVNTEITKAPLSASMIKRYDEHHQDLTLLKALVRQQLPEKYKEIFFDQSKNGYAGYIDGGASQEEFYKFIKPILEKMDGTEELLVKLNREDLLRKQRTFDNGSIPHQIHLGELHAILRRQEDFYPFLKDNREKIEKILTFRIPYYVGPLARGNSRFAWMTRKSEETITPWNFEEVVDKGASAQSFIERMTNFDKNLPNEKVLPKHSLLYEYFTVYNELTKVKYVTEGMRKPAFLSGEQKKAIVDLLFKTNRKVTVKQLKEDYFKKIECFDSVEISGVEDRFNASLGTYHDLLKIIKDKDFLDNEENEDILEDIVLTLTLFEDREMIEERLKTYAHLFDDKVMKQLKRRRYTGWGRLSRKLINGIRDKQSGKTILDFLKSDGFANRNFMQLIHDDSLTFKEDIQKAQVSGQGDSLHEHIANLAGSPAIKKGILQTVKVVDELVKVMGRHKPENIVIEMARENQTTQKGQKNSRERMKRIEEGIKELGSQILKEHPVENTQLQNEKLYLYYLQNGRDMYVDQELDINRLSDYDVDHIVPQSFLKDDSIDNKVLTRSDKARGKSDNVPSEEVVKKMKNYWRQLLNAKLITQRKFDNLTKAERGGLSELDKAGFIKRQLVETRQITKHVAQILDSRMNTKYDENDKLIREVKVITLKSKLVSDFRKDFQFYKVREINNYHHAHDAYLNAVVGTALIKKYPKLESEFVYGDYKVYDVRKMIAKSEQEIGKATAKYFFYSNIMNFFKTEITLANGEIRKRPLIETNGETGEIVWDKGRDFATVRKVLSMPQVNIVKKTEVQTGGFSKESILPKRNSDKLIARKKDWDPKKYGGFDSPTVAYSVLVVAKVEKGKSKKLKSVKELLGITIMERSSFEKNPIDFLEAKGYKEVKKDLIIKLPKYSLFELENGRKRMLASAGELQKGNELALPSKYVNFLYLASHYEKLKGSPEDNEQKQLFVEQHKHYLDEIIEQISEFSKRVILADANLDKVLSAYNKHRDKPIREQAENIIHLFTLTNLGAPAAFKYFDTTIDRKRYTSTKEVLDATLIHQSITGLYETRIDLSQLGGDGGEAAAKGGSGGGGGTAPLEEEYRLFLEAPIQNVTLLEQWKREIPKVWAEINPPGLASTQAPIHVQLLSTALPVRVRQYPITLEAKRSLRETIRKFRAAGILRPVHSPWNTPLLPVRKSGTSEYRMVQDLREVNKRVETIHPTVPNPYTLLSLLPPDRIWYSVLDLKDAFFCIPLAPESQLIFAFEWADAEEGESGQLTWTRLPQGFKNSPTLFNEALNRDLQGFRLDHPSVSLLQYVDDLLIAADTQAACLSATRDLLMTLAELGYRVSGKKAQLCQEEVTYLGFKIHKGSRSLSNSRTQAILQIPVPKTKRQVREFLGKIGYCRLFIPGFAELAQPLYAATRPGNDPLVWGEKEEEAFQSLKLALTQPPALALPSLDKPFQLFVEETSGAAKGVLTQALGPWKRPVAYLSKRLDPVAAGWPRCLRAIAAAALLTREASKLTFGQDIEITSSHNLESLLRSPPDKWLTNARITQYQVLLLDPPRVRFKQTAALNPATLLPETDDTLPIHHCLDTLDSLTSTRPDLTDQPLAQAEATLFTDGSSYIRDGKRYAGAAVVTLDSVIWAEPLPIGTSAQKAELIALTKALEWSKDKSVNIYTDSRYAFATLHVHGMIYRERGWLTAGGKAIKNAPEILALLTAVWLPKRVAVMHCKGHQKDDAPTSTGNRRADEVAREVAIRPLSTQATISAGKRTADGSEFEKRTADGSEFESPKKKAKVE

SEQ ID NO: 1442 - protein, 2098 aa, synthetic construct
MPAAKRVKLDGGDKKYSIGLDIGTNSVGWAVITDEYKVPSKKFKVLGNTDRHSIKKNLIGALLFDSGETAEATRLKRTARRRYTRRKNRICYLQEIFSNEMAKVDDSFFHRLEESFLVEEDKKHERHPIFGNIVDEVAYHEKYPTIYHLRKKLVDSTDKADLRLIYLALAHMIKFRGHFLIEGDLNPDNSDVDKLFIQLVQTYNQLFEENPINASGVDAKAILSARLSKSRRLENLIAQLPGEKKNGLFGNLIALSLGLTPNFKSNFDLAEDAKLQLSKDTYDDDLDNLLAQIGDQYADLFLAAKNLSDAILLSDILRVNTEITKAPLSASMIKRYDEHHQDLTLLKALVRQQLPEKYKEIFFDQSKNGYAGYIDGGASQEEFYKFIKPILEKMDGTEELLVKLNREDLLRKQRTFDNGSIPHQIHLGELHAILRRQEDFYPFLKDNREKIEKILTFRIPYYVGPLARGNSRFAWMTRKSEETITPWNFEEVVDKGASAQSFIERMTNFDKNLPNEKVLPKHSLLYEYFTVYNELTKVKYVTEGMRKPAFLSGEQKKAIVDLLFKTNRKVTVKQLKEDYFKKIECFDSVEISGVEDRFNASLGTYHDLLKIIKDKDFLDNEENEDILEDIVLTLTLFEDREMIEERLKTYAHLFDDKVMKQLKRRRYTGWGRLSRKLINGIRDKQSGKTILDFLKSDGFANRNFMQLIHDDSLTFKEDIQKAQVSGQGDSLHEHIANLAGSPAIKKGILQTVKVVDELVKVMGRHKPENIVIEMARENQTTQKGQKNSRERMKRIEEGIKELGSQILKEHPVENTQLQNEKLYLYYLQNGRDMYVDQELDINRLSDYDVDHIVPQSFLKDDSIDNKVLTRSDKARGKSDNVPSEEVVKKMKNYWRQLLNAKLITQRKFDNLTKAERGGLSELDKAGFIKRQLVETRQITKHVAQILDSRMNTKYDENDKLIREVKVITLKSKLVSDFRKDFQFYKVREINNYHHAHDAYLNAVVGTALIKKYPKLESEFVYGDYKVYDVRKMIAKSEQEIGKATAKYFFYSNIMNFFKTEITLANGEIRKRPLIETNGETGEIVWDKGRDFATVRKVLSMPQVNIVKKTEVQTGGFSKESILPKRNSDKLIARKKDWDPKKYGGFDSPTVAYSVLVVAKVEKGKSKKLKSVKELLGITIMERSSFEKNPIDFLEAKGYKEVKKDLIIKLPKYSLFELENGRKRMLASAGELQKGNELALPSKYVNFLYLASHYEKLKGSPEDNEQKQLFVEQHKHYLDEIIEQISEFSKRVILADANLDKVLSAYNKHRDKPIREQAENIIHLFTLTNLGAPAAFKYFDTTIDRKRYTSTKEVLDATLIHQSITGLYETRIDLSQLGGDGGGGSGGGEAAAKGGTAPLEEEYRLFLEAPIQNVTLLEQWKREIPKVWAEINPPGLASTQAPIHVQLLSTALPVRVRQYPITLEAKRSLRETIRKFRAAGILRPVHSPWNTPLLPVRKSGTSEYRMVQDLREVNKRVETIHPTVPNPYTLLSLLPPDRIWYSVLDLKDAFFCIPLAPESQLIFAFEWADAEEGESGQLTWTRLPQGFKNSPTLFNEALNRDLQGFRLDHPSVSLLQYVDDLLIAADTQAACLSATRDLLMTLAELGYRVSGKKAQLCQEEVTYLGFKIHKGSRSLSNSRTQAILQIPVPKTKRQVREFLGKIGYCRLFIPGFAELAQPLYAATRPGNDPLVWGEKEEEAFQSLKLALTQPPALALPSLDKPFQLFVEETSGAAKGVLTQALGPWKRPVAYLSKRLDPVAAGWPRCLRAIAAAALLTREASKLTFGQDIEITSSHNLESLLRSPPDKWLTNARITQYQVLLLDPPRVRFKQTAALNPATLLPETDDTLPIHHCLDTLDSLTSTRPDLTDQPLAQAEATLFTDGSSYIRDGKRYAGAAVVTLDSVIWAEPLPIGTSAQKAELIALTKALEWSKDKSVNIYTDSRYAFATLHVHGMIYRERGWLTAGGKAIKNAPEILALLTAVWLPKRVAVMHCKGHQKDDAPTSTGNRRADEVAREVAIRPLSTQATISAGKRTADGSEFEKRTADGSEFESPKKKAKVE

SEQ ID NO: 1443 - protein, 2093 aa, synthetic construct
MPAAKRVKLDGGDKKYSIGLDIGTNSVGWAVITDEYKVPSKKFKVLGNTDRHSIKKNLIGALLFDSGETAEATRLKRTARRRYTRRKNRICYLQEIFSNEMAKVDDSFFHRLEESFLVEEDKKHERHPIFGNIVDEVAYHEKYPTIYHLRKKLVDSTDKADLRLIYLALAHMIKFRGHFLIEGDLNPDNSDVDKLFIQLVQTYNQLFEENPINASGVDAKAILSARLSKSRRLENLIAQLPGEKKNGLFGNLIALSLGLTPNFKSNFDLAEDAKLQLSKDTYDDDLDNLLAQIGDQYADLFLAAKNLSDAILLSDILRVNTEITKAPLSASMIKRYDEHHQDLTLLKALVRQQLPEKYKEIFFDQSKNGYAGYIDGGASQEEFYKFIKPILEKMDGTEELLVKLNREDLLRKQRTFDNGSIPHQIHLGELHAILRRQEDFYPFLKDNREKIEKILTFRIPYYVGPLARGNSRFAWMTRKSEETITPWNFEEVVDKGASAQSFIERMTNFDKNLPNEKVLPKHSLLYEYFTVYNELTKVKYVTEGMRKPAFLSGEQKKAIVDLLFKTNRKVTVKQLKEDYFKKIECFDSVEISGVEDRFNASLGTYHDLLKIIKDKDFLDNEENEDILEDIVLTLTLFEDREMIEERLKTYAHLFDDKVMKQLKRRRYTGWGRLSRKLINGIRDKQSGKTILDFLKSDGFANRNFMQLIHDDSLTFKEDIQKAQVSGQGDSLHEHIANLAGSPAIKKGILQTVKVVDELVKVMGRHKPENIVIEMARENQTTQKGQKNSRERMKRIEEGIKELGSQILKEHPVENTQLQNEKLYLYYLQNGRDMYVDQELDINRLSDYDVDHIVPQSFLKDDSIDNKVLTRSDKARGKSDNVPSEEVVKKMKNYWRQLLNAKLITQRKFDNLTKAERGGLSELDKAGFIKRQLVETRQITKHVAQILDSRMNTKYDENDKLIREVKVITLKSKLVSDFRKDFQFYKVREINNYHHAHDAYLNAVVGTALIKKYPKLESEFVYGDYKVYDVRKMIAKSEQEIGKATAKYFFYSNIMNFFKTEITLANGEIRKRPLIETNGETGEIVWDKGRDFATVRKVLSMPQVNIVKKTEVQTGGFSKESILPKRNSDKLIARKKDWDPKKYGGFDSPTVAYSVLVVAKVEKGKSKKLKSVKELLGITIMERSSFEKNPIDFLEAKGYKEVKKDLIIKLPKYSLFELENGRKRMLASAGELQKGNELALPSKYVNFLYLASHYEKLKGSPEDNEQKQLFVEQHKHYLDEIIEQISEFSKRVILADANLDKVLSAYNKHRDKPIREQAENIIHLFTLTNLGAPAAFKYFDTTIDRKRYTSTKEVLDATLIHQSITGLYETRIDLSQLGGDGGGSSGSSGGTAPLEEEYRLFLEAPIQNVTLLEQWKREIPKVWAEINPPGLASTQAPIHVQLLSTALPVRVRQYPITLEAKRSLRETIRKFRAAGILRPVHSPWNTPLLPVRKSGTSEYRMVQDLREVNKRVETIHPTVPNPYTLLSLLPPDRIWYSVLDLKDAFFCIPLAPESQLIFAFEWADAEEGESGQLTWTRLPQGFKNSPTLFNEALNRDLQGFRLDHPSVSLLQYVDDLLIAADTQAACLSATRDLLMTLAELGYRVSGKKAQLCQEEVTYLGFKIHKGSRSLSNSRTQAILQIPVPKTKRQVREFLGKIGYCRLFIPGFAELAQPLYAATRPGNDPLVWGEKEEEAFQSLKLALTQPPALALPSLDKPFQLFVEETSGAAKGVLTQALGPWKRPVAYLSKRLDPVAAGWPRCLRAIAAAALLTREASKLTFGQDIEITSSHNLESLLRSPPDKWLTNARITQYQVLLLDPPRVRFKQTAALNPATLLPETDDTLPIHHCLDTLDSLTSTRPDLTDQPLAQAEATLFTDGSSYIRDGKRYAGAAVVTLDSVIWAEPLPIGTSAQKAELIALTKALEWSKDKSVNIYTDSRYAFATLHVHGMIYRERGWLTAGGKAIKNAPEILALLTAVWLPKRVAVMHCKGHQKDDAPTSTGNRRADEVAREVAIRPLSTQATISAGKRTADGSEFEKRTADGSEFESPKKKAKVE

SEQ ID NO: 1444 - protein, 2093 aa, synthetic construct
MPAAKRVKLDGGDKKYSIGLDIGTNSVGWAVITDEYKVPSKKFKVLGNTDRHSIKKNLIGALLFDSGETAEATRLKRTARRRYTRRKNRICYLQEIFSNEMAKVDDSFFHRLEESFLVEEDKKHERHPIFGNIVDEVAYHEKYPTIYHLRKKLVDSTDKADLRLIYLALAHMIKFRGHFLIEGDLNPDNSDVDKLFIQLVQTYNQLFEENPINASGVDAKAILSARLSKSRRLENLIAQLPGEKKNGLFGNLIALSLGLTPNFKSNFDLAEDAKLQLSKDTYDDDLDNLLAQIGDQYADLFLAAKNLSDAILLSDILRVNTEITKAPLSASMIKRYDEHHQDLTLLKALVRQQLPEKYKEIFFDQSKNGYAGYIDGGASQEEFYKFIKPILEKMDGTEELLVKLNREDLLRKQRTFDNGSIPHQIHLGELHAILRRQEDFYPFLKDNREKIEKILTFRIPYYVGPLARGNSRFAWMTRKSEETITPWNFEEVVDKGASAQSFIERMTNFDKNLPNEKVLPKHSLLYEYFTVYNELTKVKYVTEGMRKPAFLSGEQKKAIVDLLFKTNRKVTVKQLKEDYFKKIECFDSVEISGVEDRFNASLGTYHDLLKIIKDKDFLDNEENEDILEDIVLTLTLFEDREMIEERLKTYAHLFDDKVMKQLKRRRYTGWGRLSRKLINGIRDKQSGKTILDFLKSDGFANRNFMQLIHDDSLTFKEDIQKAQVSGQGDSLHEHIANLAGSPAIKKGILQTVKVVDELVKVMGRHKPENIVIEMARENQTTQKGQKNSRERMKRIEEGIKELGSQILKEHPVENTQLQNEKLYLYYLQNGRDMYVDQELDINRLSDYDVDHIVPQSFLKDDSIDNKVLTRSDKARGKSDNVPSEEVVKKMKNYWRQLLNAKLITQRKFDNLTKAERGGLSELDKAGFIKRQLVETRQITKHVAQILDSRMNTKYDENDKLIREVKVITLKSKLVSDFRKDFQFYKVREINNYHHAHDAYLNAVVGTALIKKYPKLESEFVYGDYKVYDVRKMIAKSEQEIGKATAKYFFYSNIMNFFKTEITLANGEIRKRPLIETNGETGEIVWDKGRDFATVRKVLSMPQVNIVKKTEVQTGGFSKESILPKRNSDKLIARKKDWDPKKYGGFDSPTVAYSVLVVAKVEKGKSKKLKSVKELLGITIMERSSFEKNPIDFLEAKGYKEVKKDLIIKLPKYSLFELENGRKRMLASAGELQKGNELALPSKYVNFLYLASHYEKLKGSPEDNEQKQLFVEQHKHYLDEIIEQISEFSKRVILADANLDKVLSAYNKHRDKPIREQAENIIHLFTLTNLGAPAAFKYFDTTIDRKRYTSTKEVLDATLIHQSITGLYETRIDLSQLGGDGGGGGGSSGGTAPLEEEYRLFLEAPIQNVTLLEQWKREIPKVWAEINPPGLASTQAPIHVQLLSTALPVRVRQYPITLEAKRSLRETIRKFRAAGILRPVHSPWNTPLLPVRKSGTSEYRMVQDLREVNKRVETIHPTVPNPYTLLSLLPPDRIWYSVLDLKDAFFCIPLAPESQLIFAFEWADAEEGESGQLTWTRLPQGFKNSPTLFNEALNRDLQGFRLDHPSVSLLQYVDDLLIAADTQAACLSATRDLLMTLAELGYRVSGKKAQLCQEEVTYLGFKIHKGSRSLSNSRTQAILQIPVPKTKRQVREFLGKIGYCRLFIPGFAELAQPLYAATRPGNDPLVWGEKEEEAFQSLKLALTQPPALALPSLDKPFQLFVEETSGAAKGVLTQALGPWKRPVAYLSKRLDPVAAGWPRCLRAIAAAALLTREASKLTFGQDIEITSSHNLESLLRSPPDKWLTNARITQYQVLLLDPPRVRFKQTAALNPATLLPETDDTLPIHHCLDTLDSLTSTRPDLTDQPLAQAEATLFTDGSSYIRDGKRYAGAAVVTLDSVIWAEPLPIGTSAQKAELIALTKALEWSKDKSVNIYTDSRYAFATLHVHGMIYRERGWLTAGGKAIKNAPEILALLTAVWLPKRVAVMHCKGHQKDDAPTSTGNRRADEVAREVAIRPLSTQATISAGKRTADGSEFEKRTADGSEFESPKKKAKVE

SEQ ID NO: 1445 - protein, 2093 aa, synthetic construct
MPAAKRVKLDGGDKKYSIGLDIGTNSVGWAVITDEYKVPSKKFKVLGNTDRHSIKKNLIGALLFDSGETAEATRLKRTARRRYTRRKNRICYLQEIFSNEMAKVDDSFFHRLEESFLVEEDKKHERHPIFGNIVDEVAYHEKYPTIYHLRKKLVDSTDKADLRLIYLALAHMIKFRGHFLIEGDLNPDNSDVDKLFIQLVQTYNQLFEENPINASGVDAKAILSARLSKSRRLENLIAQLPGEKKNGLFGNLIALSLGLTPNFKSNFDLAEDAKLQLSKDTYDDDLDNLLAQIGDQYADLFLAAKNLSDAILLSDILRVNTEITKAPLSASMIKRYDEHHQDLTLLKALVRQQLPEKYKEIFFDQSKNGYAGYIDGGASQEEFYKFIKPILEKMDGTEELLVKLNREDLLRKQRTFDNGSIPHQIHLGELHAILRRQEDFYPFLKDNREKIEKILTFRIPYYVGPLARGNSRFAWMTRKSEETITPWNFEEVVDKGASAQSFIERMTNFDKNLPNEKVLPKHSLLYEYFTVYNELTKVKYVTEGMRKPAFLSGEQKKAIVDLLFKTNRKVTVKQLKEDYFKKIECFDSVEISGVEDRFNASLGTYHDLLKIIKDKDFLDNEENEDILEDIVLTLTLFEDREMIEERLKTYAHLFDDKVMKQLKRRRYTGWGRLSRKLINGIRDKQSGKTILDFLKSDGFANRNFMQLIHDDSLTFKEDIQKAQVSGQGDSLHEHIANLAGSPAIKKGILQTVKVVDELVKVMGRHKPENIVIEMARENQTTQKGQKNSRERMKRIEEGIKELGSQILKEHPVENTQLQNEKLYLYYLQNGRDMYVDQELDINRLSDYDVDHIVPQSFLKDDSIDNKVLTRSDKARGKSDNVPSEEVVKKMKNYWRQLLNAKLITQRKFDNLTKAERGGLSELDKAGFIKRQLVETRQITKHVAQILDSRMNTKYDENDKLIREVKVITLKSKLVSDFRKDFQFYKVREINNYHHAHDAYLNAVVGTALIKKYPKLESEFVYGDYKVYDVRKMIAKSEQEIGKATAKYFFYSNIMNFFKTEITLANGEIRKRPLIETNGETGEIVWDKGRDFATVRKVLSMPQVNIVKKTEVQTGGFSKESILPKRNSDKLIARKKDWDPKKYGGFDSPTVAYSVLVVAKVEKGKSKKLKSVKELLGITIMERSSFEKNPIDFLEAKGYKEVKKDLIIKLPKYSLFELENGRKRMLASAGELQKGNELALPSKYVNFLYLASHYEKLKGSPEDNEQKQLFVEQHKHYLDEIIEQISEFSKRVILADANLDKVLSAYNKHRDKPIREQAENIIHLFTLTNLGAPAAFKYFDTTIDRKRYTSTKEVLDATLIHQSITGLYETRIDLSQLGGDGGGSSGGSGGTAPLEEEYRLFLEAPIQNVTLLEQWKREIPKVWAEINPPGLASTQAPIHVQLLSTALPVRVRQYPITLEAKRSLRETIRKFRAAGILRPVHSPWNTPLLPVRKSGTSEYRMVQDLREVNKRVETIHPTVPNPYTLLSLLPPDRIWYSVLDLKDAFFCIPLAPESQLIFAFEWADAEEGESGQLTWTRLPQGFKNSPTLFNEALNRDLQGFRLDHPSVSLLQYVDDLLIAADTQAACLSATRDLLMTLAELGYRVSGKKAQLCQEEVTYLGFKIHKGSRSLSNSRTQAILQIPVPKTKRQVREFLGKIGYCRLFIPGFAELAQPLYAATRPGNDPLVWGEKEEEAFQSLKLALTQPPALALPSLDKPFQLFVEETSGAAKGVLTQALGPWKRPVAYLSKRLDPVAAGWPRCLRAIAAAALLTREASKLTFGQDIEITSSHNLESLLRSPPDKWLTNARITQYQVLLLDPPRVRFKQTAALNPATLLPETDDTLPIHHCLDTLDSLTSTRPDLTDQPLAQAEATLFTDGSSYIRDGKRYAGAAVVTLDSVIWAEPLPIGTSAQKAELIALTKALEWSKDKSVNIYTDSRYAFATLHVHGMIYRERGWLTAGGKAIKNAPEILALLTAVWLPKRVAVMHCKGHQKDDAPTSTGNRRADEVAREVAIRPLSTQATISAGKRTADGSEFEKRTADGSEFESPKKKAKVE

SEQ ID NO: 1446 - protein, 2095 aa, synthetic construct
MPAAKRVKLDGGDKKYSIGLDIGTNSVGWAVITDEYKVPSKKFKVLGNTDRHSIKKNLIGALLFDSGETAEATRLKRTARRRYTRRKNRICYLQEIFSNEMAKVDDSFFHRLEESFLVEEDKKHERHPIFGNIVDEVAYHEKYPTIYHLRKKLVDSTDKADLRLIYLALAHMIKFRGHFLIEGDLNPDNSDVDKLFIQLVQTYNQLFEENPINASGVDAKAILSARLSKSRRLENLIAQLPGEKKNGLFGNLIALSLGLTPNFKSNFDLAEDAKLQLSKDTYDDDLDNLLAQIGDQYADLFLAAKNLSDAILLSDILRVNTEITKAPLSASMIKRYDEHHQDLTLLKALVRQQLPEKYKEIFFDQSKNGYAGYIDGGASQEEFYKFIKPILEKMDGTEELLVKLNREDLLRKQRTFDNGSIPHQIHLGELHAILRRQEDFYPFLKDNREKIEKILTFRIPYYVGPLARGNSRFAWMTRKSEETITPWNFEEVVDKGASAQSFIERMTNFDKNLPNEKVLPKHSLLYEYFTVYNELTKVKYVTEGMRKPAFLSGEQKKAIVDLLFKTNRKVTVKQLKEDYFKKIECFDSVEISGVEDRFNASLGTYHDLLKIIKDKDFLDNEENEDILEDIVLTLTLFEDREMIEERLKTYAHLFDDKVMKQLKRRRYTGWGRLSRKLINGIRDKQSGKTILDFLKSDGFANRNFMQLIHDDSLTFKEDIQKAQVSGQGDSLHEHIANLAGSPAIKKGILQTVKVVDELVKVMGRHKPENIVIEMARENQTTQKGQKNSRERMKRIEEGIKELGSQILKEHPVENTQLQNEKLYLYYLQNGRDMYVDQELDINRLSDYDVDHIVPQSFLKDDSIDNKVLTRSDKARGKSDNVPSEEVVKKMKNYWRQLLNAKLITQRKFDNLTKAERGGLSELDKAGFIKRQLVETRQITKHVAQILDSRMNTKYDENDKLIREVKVITLKSKLVSDFRKDFQFYKVREINNYHHAHDAYLNAVVGTALIKKYPKLESEFVYGDYKVYDVRKMIAKSEQEIGKATAKYFFYSNIMNFFKTEITLANGEIRKRPLIETNGETGEIVWDKGRDFATVRKVLSMPQVNIVKKTEVQTGGFSKESILPKRNSDKLIARKKDWDPKKYGGFDSPTVAYSVLVVAKVEKGKSKKLKSVKELLGITIMERSSFEKNPIDFLEAKGYKEVKKDLIIKLPKYSLFELENGRKRMLASAGELQKGNELALPSKYVNFLYLASHYEKLKGSPEDNEQKQLFVEQHKHYLDEIIEQISEFSKRVILADANLDKVLSAYNKHRDKPIREQAENIIHLFTLTNLGAPAAFKYFDTTIDRKRYTSTKEVLDATLIHQSITGLYETRIDLSQLGGDGGGGGEAAAKGGTAPLEEEYRLFLEAPIQNVTLLEQWKREIPKVWAEINPPGLASTQAPIHVQLLSTALPVRVRQYPITLEAKRSLRETIRKFRAAGILRPVHSPWNTPLLPVRKSGTSEYRMVQDLREVNKRVETIHPTVPNPYTLLSLLPPDRIWYSVLDLKDAFFCIPLAPESQLIFAFEWADAEEGESGQLTWTRLPQGFKNSPTLFNEALNRDLQGFRLDHPSVSLLQYVDDLLIAADTQAACLSATRDLLMTLAELGYRVSGKKAQLCQEEVTYLGFKIHKGSRSLSNSRTQAILQIPVPKTKRQVREFLGKIGYCRLFIPGFAELAQPLYAATRPGNDPLVWGEKEEEAFQSLKLALTQPPALALPSLDKPFQLFVEETSGAAKGVLTQALGPWKRPVAYLSKRLDPVAAGWPRCLRAIAAAALLTREASKLTFGQDIEITSSHNLESLLRSPPDKWLTNARITQYQVLLLDPPRVRFKQTAALNPATLLPETDDTLPIHHCLDTLDSLTSTRPDLTDQPLAQAEATLFTDGSSYIRDGKRYAGAAVVTLDSVIWAEPLPIGTSAQKAELIALTKALEWSKDKSVNIYTDSRYAFATLHVHGMIYRERGWLTAGGKAIKNAPEILALLTAVWLPKRVAVMHCKGHQKDDAPTSTGNRRADEVAREVAIRPLSTQATISAGKRTADGSEFEKRTADGSEFESPKKKAKVE

SEQ ID NO: 1447 - protein, 2096 aa, synthetic construct
MPAAKRVKLDGGDKKYSIGLDIGTNSVGWAVITDEYKVPSKKFKVLGNTDRHSIKKNLIGALLFDSGETAEATRLKRTARRRYTRRKNRICYLQEIFSNEMAKVDDSFFHRLEESFLVEEDKKHERHPIFGNIVDEVAYHEKYPTIYHLRKKLVDSTDKADLRLIYLALAHMIKFRGHFLIEGDLNPDNSDVDKLFIQLVQTYNQLFEENPINASGVDAKAILSARLSKSRRLENLIAQLPGEKKNGLFGNLIALSLGLTPNFKSNFDLAEDAKLQLSKDTYDDDLDNLLAQIGDQYADLFLAAKNLSDAILLSDILRVNTEITKAPLSASMIKRYDEHHQDLTLLKALVRQQLPEKYKEIFFDQSKNGYAGYIDGGASQEEFYKFIKPILEKMDGTEELLVKLNREDLLRKQRTFDNGSIPHQIHLGELHAILRRQEDFYPFLKDNREKIEKILTFRIPYYVGPLARGNSRFAWMTRKSEETITPWNFEEVVDKGASAQSFIERMTNFDKNLPNEKVLPKHSLLYEYFTVYNELTKVKYVTEGMRKPAFLSGEQKKAIVDLLFKTNRKVTVKQLKEDYFKKIECFDSVEISGVEDRFNASLGTYHDLLKIIKDKDFLDNEENEDILEDIVLTLTLFEDREMIEERLKTYAHLFDDKVMKQLKRRRYTGWGRLSRKLINGIRDKQSGKTILDFLKSDGFANRNFMQLIHDDSLTFKEDIQKAQVSGQGDSLHEHIANLAGSPAIKKGILQTVKVVDELVKVMGRHKPENIVIEMARENQTTQKGQKNSRERMKRIEEGIKELGSQILKEHPVENTQLQNEKLYLYYLQNGRDMYVDQELDINRLSDYDVDHIVPQSFLKDDSIDNKVLTRSDKARGKSDNVPSEEVVKKMKNYWRQLLNAKLITQRKFDNLTKAERGGLSELDKAGFIKRQLVETRQITKHVAQILDSRMNTKYDENDKLIREVKVITLKSKLVSDFRKDFQFYKVREINNYHHAHDAYLNAVVGTALIKKYPKLESEFVYGDYKVYDVRKMIAKSEQEIGKATAKYFFYSNIMNFFKTEITLANGEIRKRPLIETNGETGEIVWDKGRDFATVRKVLSMPQVNIVKKTEVQTGGFSKESILPKRNSDKLIARKKDWDPKKYGGFDSPTVAYSVLVVAKVEKGKSKKLKSVKELLGITIMERSSFEKNPIDFLEAKGYKEVKKDLIIKLPKYSLFELENGRKRMLASAGELQKGNELALPSKYVNFLYLASHYEKLKGSPEDNEQKQLFVEQHKHYLDEIIEQISEFSKRVILADANLDKVLSAYNKHRDKPIREQAENIIHLFTLTNLGAPAAFKYFDTTIDRKRYTSTKEVLDATLIHQSITGLYETRIDLSQLGGDGGPAPGGGGSSGGTAPLEEEYRLFLEAPIQNVTLLEQWKREIPKVWAEINPPGLASTQAPIHVQLLSTALPVRVRQYPITLEAKRSLRETIRKFRAAGILRPVHSPWNTPLLPVRKSGTSEYRMVQDLREVNKRVETIHPTVPNPYTLLSLLPPDRIWYSVLDLKDAFFCIPLAPESQLIFAFEWADAEEGESGQLTWTRLPQGFKNSPTLFNEALNRDLQGFRLDHPSVSLLQYVDDLLIAADTQAACLSATRDLLMTLAELGYRVSGKKAQLCQEEVTYLGFKIHKGSRSLSNSRTQAILQIPVPKTKRQVREFLGKIGYCRLFIPGFAELAQPLYAATRPGNDPLVWGEKEEEAFQSLKLALTQPPALALPSLDKPFQLFVEETSGAAKGVLTQALGPWKRPVAYLSKRLDPVAAGWPRCLRAIAAAALLTREASKLTFGQDIEITSSHNLESLLRSPPDKWLTNARITQYQVLLLDPPRVRFKQTAALNPATLLPETDDTLPIHHCLDTLDSLTSTRPDLTDQPLAQAEATLFTDGSSYIRDGKRYAGAAVVTLDSVIWAEPLPIGTSAQKAELIALTKALEWSKDKSVNIYTDSRYAFATLHVHGMIYRERGWLTAGGKAIKNAPEILALLTAVWLPKRVAVMHCKGHQKDDAPTSTGNRRADEVAREVAIRPLSTQATISAGKRTADGSEFEKRTADGSEFESPKKKAKVE

SEQ ID NO: 1448 - protein, 2129 aa, synthetic construct
MPAAKRVKLDGGDKKYSIGLDIGTNSVGWAVITDEYKVPSKKFKVLGNTDRHSIKKNLIGALLFDSGETAEATRLKRTARRRYTRRKNRICYLQEIFSNEMAKVDDSFFHRLEESFLVEEDKKHERHPIFGNIVDEVAYHEKYPTIYHLRKKLVDSTDKADLRLIYLALAHMIKFRGHFLIEGDLNPDNSDVDKLFIQLVQTYNQLFEENPINASGVDAKAILSARLSKSRRLENLIAQLPGEKKNGLFGNLIALSLGLTPNFKSNFDLAEDAKLQLSKDTYDDDLDNLLAQIGDQYADLFLAAKNLSDAILLSDILRVNTEITKAPLSASMIKRYDEHHQDLTLLKALVRQQLPEKYKEIFFDQSKNGYAGYIDGGASQEEFYKFIKPILEKMDGTEELLVKLNREDLLRKQRTFDNGSIPHQIHLGELHAILRRQEDFYPFLKDNREKIEKILTFRIPYYVGPLARGNSRFAWMTRKSEETITPWNFEEVVDKGASAQSFIERMTNFDKNLPNEKVLPKHSLLYEYFTVYNELTKVKYVTEGMRKPAFLSGEQKKAIVDLLFKTNRKVTVKQLKEDYFKKIECFDSVEISGVEDRFNASLGTYHDLLKIIKDKDFLDNEENEDILEDIVLTLTLFEDREMIEERLKTYAHLFDDKVMKQLKRRRYTGWGRLSRKLINGIRDKQSGKTILDFLKSDGFANRNFMQLIHDDSLTFKEDIQKAQVSGQGDSLHEHIANLAGSPAIKKGILQTVKVVDELVKVMGRHKPENIVIEMARENQTTQKGQKNSRERMKRIEEGIKELGSQILKEHPVENTQLQNEKLYLYYLQNGRDMYVDQELDINRLSDYDVDHIVPQSFLKDDSIDNKVLTRSDKARGKSDNVPSEEVVKKMKNYWRQLLNAKLITQRKFDNLTKAERGGLSELDKAGFIKRQLVETRQITKHVAQILDSRMNTKYDENDKLIREVKVITLKSKLVSDFRKDFQFYKVREINNYHHAHDAYLNAVVGTALIKKYPKLESEFVYGDYKVYDVRKMIAKSEQEIGKATAKYFFYSNIMNFFKTEITLANGEIRKRPLIETNGETGEIVWDKGRDFATVRKVLSMPQVNIVKKTEVQTGGFSKESILPKRNSDKLIARKKDWDPKKYGGFDSPTVAYSVLVVAKVEKGKSKKLKSVKELLGITIMERSSFEKNPIDFLEAKGYKEVKKDLIIKLPKYSLFELENGRKRMLASAGELQKGNELALPSKYVNFLYLASHYEKLKGSPEDNEQKQLFVEQHKHYLDEIIEQISEFSKRVILADANLDKVLSAYNKHRDKPIREQAENIIHLFTLTNLGAPAAFKYFDTTIDRKRYTSTKEVLDATLIHQSITGLYETRIDLSQLGGDGGAEAAAKEAAAKEAAAKEAAAKALEAEAAAKEAAAKEAAAKEAAAKAGGVLNLEEEYRLHEKPVPSSIDPSWLQLFPTVWAERAGMGLANQVPPVVVELRSGASPVAVRQYPMSKEAREGIRPHIQKFLDLGVLVPCRSPWNTPLLPVKKPGTNDYRPVQDLREINKRVQDIHPTVPNPYNLLSSLPPSYTWYSVLDLKDAFFCLRLHPNSQPLFAFEWKDPEKGNTGQLTWTRLPQGFKNSPTLFNEALHRDLAPFRALNPQVVLLQYVDDLLVAAPTYEDCKKGTQKLLQELSKLGYRVSAKKAQLCQREVTYLGYLLKEGKRWLTPARKATVMKIPVPTTPRQVREFLGKAGFCRLFIPGFASLAAPLYPLTKPSIPFIWTEEHQQAFDHIKKALLSAPALALPDLTKPFTLYIDERAGVARGVLTQTLGPWRRPVAYLSKKLDPVASGWPTCLKAVAAVALLLKDADKLTLGQNVTVIASHSLESIVRQPPDRWMTNARMTHYQSLLLNERVSFAPPAVLNPATLLPVESEATPVHRCSEILAEETGTRRDLEDQPLPGVPTWYTDGSSFITEGKRRAGAPIVDGKRTVWASSLPEGTSAQKAELVALTQALRLAEGKNINIYTDSRYAFATAHIHGAIYKQRGWLTSAGKDIKNKEEILALLEAIHLPRRVAIIHCPGHQRGSNPVATGNRRADEAAKQAALSTRVLAGTTKPAGKRTADGSEFEKRTADGSEFESPKKKAKVE

SEQ ID NO: 1449 - protein, 2092 aa, synthetic construct
MPAAKRVKLDGGDKKYSIGLDIGTNSVGWAVITDEYKVPSKKFKVLGNTDRHSIKKNLIGALLFDSGETAEATRLKRTARRRYTRRKNRICYLQEIFSNEMAKVDDSFFHRLEESFLVEEDKKHERHPIFGNIVDEVAYHEKYPTIYHLRKKLVDSTDKADLRLIYLALAHMIKFRGHFLIEGDLNPDNSDVDKLFIQLVQTYNQLFEENPINASGVDAKAILSARLSKSRRLENLIAQLPGEKKNGLFGNLIALSLGLTPNFKSNFDLAEDAKLQLSKDTYDDDLDNLLAQIGDQYADLFLAAKNLSDAILLSDILRVNTEITKAPLSASMIKRYDEHHQDLTLLKALVRQQLPEKYKEIFFDQSKNGYAGYIDGGASQEEFYKFIKPILEKMDGTEELLVKLNREDLLRKQRTFDNGSIPHQIHLGELHAILRRQEDFYPFLKDNREKIEKILTFRIPYYVGPLARGNSRFAWMTRKSEETITPWNFEEVVDKGASAQSFIERMTNFDKNLPNEKVLPKHSLLYEYFTVYNELTKVKYVTEGMRKPAFLSGEQKKAIVDLLFKTNRKVTVKQLKEDYFKKIECFDSVEISGVEDRFNASLGTYHDLLKIIKDKDFLDNEENEDILEDIVLTLTLFEDREMIEERLKTYAHLFDDKVMKQLKRRRYTGWGRLSRKLINGIRDKQSGKTILDFLKSDGFANRNFMQLIHDDSLTFKEDIQKAQVSGQGDSLHEHIANLAGSPAIKKGILQTVKVVDELVKVMGRHKPENIVIEMARENQTTQKGQKNSRERMKRIEEGIKELGSQILKEHPVENTQLQNEKLYLYYLQNGRDMYVDQELDINRLSDYDVDHIVPQSFLKDDSIDNKVLTRSDKARGKSDNVPSEEVVKKMKNYWRQLLNAKLITQRKFDNLTKAERGGLSELDKAGFIKRQLVETRQITKHVAQILDSRMNTKYDENDKLIREVKVITLKSKLVSDFRKDFQFYKVREINNYHHAHDAYLNAVVGTALIKKYPKLESEFVYGDYKVYDVRKMIAKSEQEIGKATAKYFFYSNIMNFFKTEITLANGEIRKRPLIETNGETGEIVWDKGRDFATVRKVLSMPQVNIVKKTEVQTGGFSKESILPKRNSDKLIARKKDWDPKKYGGFDSPTVAYSVLVVAKVEKGKSKKLKSVKELLGITIMERSSFEKNPIDFLEAKGYKEVKKDLIIKLPKYSLFELENGRKRMLASAGELQKGNELALPSKYVNFLYLASHYEKLKGSPEDNEQKQLFVEQHKHYLDEIIEQISEFSKRVILADANLDKVLSAYNKHRDKPIREQAENIIHLFTLTNLGAPAAFKYFDTTIDRKRYTSTKEVLDATLIHQSITGLYETRIDLSQLGGDGGGGSGGSGGSGGVLNLEEEYRLHEKPVPSSIDPSWLQLFPTVWAERAGMGLANQVPPVVVELRSGASPVAVRQYPMSKEAREGIRPHIQKFLDLGVLVPCRSPWNTPLLPVKKPGTNDYRPVQDLREINKRVQDIHPTVPNPYNLLSSLPPSYTWYSVLDLKDAFFCLRLHPNSQPLFAFEWKDPEKGNTGQLTWTRLPQGFKNSPTLFNEALHRDLAPFRALNPQVVLLQYVDDLLVAAPTYEDCKKGTQKLLQELSKLGYRVSAKKAQLCQREVTYLGYLLKEGKRWLTPARKATVMKIPVPTTPRQVREFLGKAGFCRLFIPGFASLAAPLYPLTKPSIPFIWTEEHQQAFDHIKKALLSAPALALPDLTKPFTLYIDERAGVARGVLTQTLGPWRRPVAYLSKKLDPVASGWPTCLKAVAAVALLLKDADKLTLGQNVTVIASHSLESIVRQPPDRWMTNARMTHYQSLLLNERVSFAPPAVLNPATLLPVESEATPVHRCSEILAEETGTRRDLEDQPLPGVPTWYTDGSSFITEGKRRAGAPIVDGKRTVWASSLPEGTSAQKAELVALTQALRLAEGKNINIYTDSRYAFATAHIHGAIYKQRGWLTSAGKDIKNKEEILALLEAIHLPRRVAIIHCPGHQRGSNPVATGNRRADEAAKQAALSTRVLAGTTKPAGKRTADGSEFEKRTADGSEFESPKKKAKVE

SEQ ID NO: 1450 - protein, 2089 aa, synthetic construct
MPAAKRVKLDGGDKKYSIGLDIGTNSVGWAVITDEYKVPSKKFKVLGNTDRHSIKKNLIGALLFDSGETAEATRLKRTARRRYTRRKNRICYLQEIFSNEMAKVDDSFFHRLEESFLVEEDKKHERHPIFGNIVDEVAYHEKYPTIYHLRKKLVDSTDKADLRLIYLALAHMIKFRGHFLIEGDLNPDNSDVDKLFIQLVQTYNQLFEENPINASGVDAKAILSARLSKSRRLENLIAQLPGEKKNGLFGNLIALSLGLTPNFKSNFDLAEDAKLQLSKDTYDDDLDNLLAQIGDQYADLFLAAKNLSDAILLSDILRVNTEITKAPLSASMIKRYDEHHQDLTLLKALVRQQLPEKYKEIFFDQSKNGYAGYIDGGASQEEFYKFIKPILEKMDGTEELLVKLNREDLLRKQRTFDNGSIPHQIHLGELHAILRRQEDFYPFLKDNREKIEKILTFRIPYYVGPLARGNSRFAWMTRKSEETITPWNFEEVVDKGASAQSFIERMTNFDKNLPNEKVLPKHSLLYEYFTVYNELTKVKYVTEGMRKPAFLSGEQKKAIVDLLFKTNRKVTVKQLKEDYFKKIECFDSVEISGVEDRFNASLGTYHDLLKIIKDKDFLDNEENEDILEDIVLTLTLFEDREMIEERLKTYAHLFDDKVMKQLKRRRYTGWGRLSRKLINGIRDKQSGKTILDFLKSDGFANRNFMQLIHDDSLTFKEDIQKAQVSGQGDSLHEHIANLAGSPAIKKGILQTVKVVDELVKVMGRHKPENIVIEMARENQTTQKGQKNSRERMKRIEEGIKELGSQILKEHPVENTQLQNEKLYLYYLQNGRDMYVDQELDINRLSDYDVDHIVPQSFLKDDSIDNKVLTRSDKARGKSDNVPSEEVVKKMKNYWRQLLNAKLITQRKFDNLTKAERGGLSELDKAGFIKRQLVETRQITKHVAQILDSRMNTKYDENDKLIREVKVITLKSKLVSDFRKDFQFYKVREINNYHHAHDAYLNAVVGTALIKKYPKLESEFVYGDYKVYDVRKMIAKSEQEIGKATAKYFFYSNIMNFFKTEITLANGEIRKRPLIETNGETGEIVWDKGRDFATVRKVLSMPQVNIVKKTEVQTGGFSKESILPKRNSDKLIARKKDWDPKKYGGFDSPTVAYSVLVVAKVEKGKSKKLKSVKELLGITIMERSSFEKNPIDFLEAKGYKEVKKDLIIKLPKYSLFELENGRKRMLASAGELQKGNELALPSKYVNFLYLASHYEKLKGSPEDNEQKQLFVEQHKHYLDEIIEQISEFSKRVILADANLDKVLSAYNKHRDKPIREQAENIIHLFTLTNLGAPAAFKYFDTTIDRKRYTSTKEVLDATLIHQSITGLYETRIDLSQLGGDGGGGSGSSGGVLNLEEEYRLHEKPVPSSIDPSWLQLFPTVWAERAGMGLANQVPPVVVELRSGASPVAVRQYPMSKEAREGIRPHIQKFLDLGVLVPCRSPWNTPLLPVKKPGTNDYRPVQDLREINKRVQDIHPTVPNPYNLLSSLPPSYTWYSVLDLKDAFFCLRLHPNSQPLFAFEWKDPEKGNTGQLTWTRLPQGFKNSPTLFNEALHRDLAPFRALNPQVVLLQYVDDLLVAAPTYEDCKKGTQKLLQELSKLGYRVSAKKAQLCQREVTYLGYLLKEGKRWLTPARKATVMKIPVPTTPRQVREFLGKAGFCRLFIPGFASLAAPLYPLTKPSIPFIWTEEHQQAFDHIKKALLSAPALALPDLTKPFTLYIDERAGVARGVLTQTLGPWRRPVAYLSKKLDPVASGWPTCLKAVAAVALLLKDADKLTLGQNVTVIASHSLESIVRQPPDRWMTNARMTHYQSLLLNERVSFAPPAVLNPATLLPVESEATPVHRCSEILAEETGTRRDLEDQPLPGVPTWYTDGSSFITEGKRRAGAPIVDGKRTVWASSLPEGTSAQKAELVALTQALRLAEGKNINIYTDSRYAFATAHIHGAIYKQRGWLTSAGKDIKNKEEILALLEAIHLPRRVAIIHCPGHQRGSNPVATGNRRADEAAKQAALSTRVLAGTTKPAGKRTADGSEFEKRTADGSEFESPKKKAKVE

SEQ ID NO: 1451 - protein, 2094 aa, synthetic construct
MPAAKRVKLDGGDKKYSIGLDIGTNSVGWAVITDEYKVPSKKFKVLGNTDRHSIKKNLIGALLFDSGETAEATRLKRTARRRYTRRKNRICYLQEIFSNEMAKVDDSFFHRLEESFLVEEDKKHERHPIFGNIVDEVAYHEKYPTIYHLRKKLVDSTDKADLRLIYLALAHMIKFRGHFLIEGDLNPDNSDVDKLFIQLVQTYNQLFEENPINASGVDAKAILSARLSKSRRLENLIAQLPGEKKNGLFGNLIALSLGLTPNFKSNFDLAEDAKLQLSKDTYDDDLDNLLAQIGDQYADLFLAAKNLSDAILLSDILRVNTEITKAPLSASMIKRYDEHHQDLTLLKALVRQQLPEKYKEIFFDQSKNGYAGYIDGGASQEEFYKFIKPILEKMDGTEELLVKLNREDLLRKQRTFDNGSIPHQIHLGELHAILRRQEDFYPFLKDNREKIEKILTFRIPYYVGPLARGNSRFAWMTRKSEETITPWNFEEVVDKGASAQSFIERMTNFDKNLPNEKVLPKHSLLYEYFTVYNELTKVKYVTEGMRKPAFLSGEQKKAIVDLLFKTNRKVTVKQLKEDYFKKIECFDSVEISGVEDRFNASLGTYHDLLKIIKDKDFLDNEENEDILEDIVLTLTLFEDREMIEERLKTYAHLFDDKVMKQLKRRRYTGWGRLSRKLINGIRDKQSGKTILDFLKSDGFANRNFMQLIHDDSLTFKEDIQKAQVSGQGDSLHEHIANLAGSPAIKKGILQTVKVVDELVKVMGRHKPENIVIEMARENQTTQKGQKNSRERMKRIEEGIKELGSQILKEHPVENTQLQNEKLYLYYLQNGRDMYVDQELDINRLSDYDVDHIVPQSFLKDDSIDNKVLTRSDKARGKSDNVPSEEVVKKMKNYWRQLLNAKLITQRKFDNLTKAERGGLSELDKAGFIKRQLVETRQITKHVAQILDSRMNTKYDENDKLIREVKVITLKSKLVSDFRKDFQFYKVREINNYHHAHDAYLNAVVGTALIKKYPKLESEFVYGDYKVYDVRKMIAKSEQEIGKATAKYFFYSNIMNFFKTEITLANGEIRKRPLIETNGETGEIVWDKGRDFATVRKVLSMPQVNIVKKTEVQTGGFSKESILPKRNSDKLIARKKDWDPKKYGGFDSPTVAYSVLVVAKVEKGKSKKLKSVKELLGITIMERSSFEKNPIDFLEAKGYKEVKKDLIIKLPKYSLFELENGRKRMLASAGELQKGNELALPSKYVNFLYLASHYEKLKGSPEDNEQKQLFVEQHKHYLDEIIEQISEFSKRVILADANLDKVLSAYNKHRDKPIREQAENIIHLFTLTNLGAPAAFKYFDTTIDRKRYTSTKEVLDATLIHQSITGLYETRIDLSQLGGDGGEAAAKGGGGGSGGVLNLEEEYRLHEKPVPSSIDPSWLQLFPTVWAERAGMGLANQVPPVVVELRSGASPVAVRQYPMSKEAREGIRPHIQKFLDLGVLVPCRSPWNTPLLPVKKPGTNDYRPVQDLREINKRVQDIHPTVPNPYNLLSSLPPSYTWYSVLDLKDAFFCLRLHPNSQPLFAFEWKDPEKGNTGQLTWTRLPQGFKNSPTLFNEALHRDLAPFRALNPQVVLLQYVDDLLVAAPTYEDCKKGTQKLLQELSKLGYRVSAKKAQLCQREVTYLGYLLKEGKRWLTPARKATVMKIPVPTTPRQVREFLGKAGFCRLFIPGFASLAAPLYPLTKPSIPFIWTEEHQQAFDHIKKALLSAPALALPDLTKPFTLYIDERAGVARGVLTQTLGPWRRPVAYLSKKLDPVASGWPTCLKAVAAVALLLKDADKLTLGQNVTVIASHSLESIVRQPPDRWMTNARMTHYQSLLLNERVSFAPPAVLNPATLLPVESEATPVHRCSEILAEETGTRRDLEDQPLPGVPTWYTDGSSFITEGKRRAGAPIVDGKRTVWASSLPEGTSAQKAELVALTQALRLAEGKNINIYTDSRYAFATAHIHGAIYKQRGWLTSAGKDIKNKEEILALLEAIHLPRRVAIIHCPGHQRGSNPVATGNRRADEAAKQAALSTRVLAGTTKPAGKRTADGSEFEKRTADGSEFESPKKKAKVE

SEQ ID NO: 1452 - protein, 2098 aa, synthetic construct
MPAAKRVKLDGGDKKYSIGLDIGTNSVGWAVITDEYKVPSKKFKVLGNTDRHSIKKNLIGALLFDSGETAEATRLKRTARRRYTRRKNRICYLQEIFSNEMAKVDDSFFHRLEESFLVEEDKKHERHPIFGNIVDEVAYHEKYPTIYHLRKKLVDSTDKADLRLIYLALAHMIKFRGHFLIEGDLNPDNSDVDKLFIQLVQTYNQLFEENPINASGVDAKAILSARLSKSRRLENLIAQLPGEKKNGLFGNLIALSLGLTPNFKSNFDLAEDAKLQLSKDTYDDDLDNLLAQIGDQYADLFLAAKNLSDAILLSDILRVNTEITKAPLSASMIKRYDEHHQDLTLLKALVRQQLPEKYKEIFFDQSKNGYAGYIDGGASQEEFYKFIKPILEKMDGTEELLVKLNREDLLRKQRTFDNGSIPHQIHLGELHAILRRQEDFYPFLKDNREKIEKILTFRIPYYVGPLARGNSRFAWMTRKSEETITPWNFEEVVDKGASAQSFIERMTNFDKNLPNEKVLPKHSLLYEYFTVYNELTKVKYVTEGMRKPAFLSGEQKKAIVDLLFKTNRKVTVKQLKEDYFKKIECFDSVEISGVEDRFNASLGTYHDLLKIIKDKDFLDNEENEDILEDIVLTLTLFEDREMIEERLKTYAHLFDDKVMKQLKRRRYTGWGRLSRKLINGIRDKQSGKTILDFLKSDGFANRNFMQLIHDDSLTFKEDIQKAQVSGQGDSLHEHIANLAGSPAIKKGILQTVKVVDELVKVMGRHKPENIVIEMARENQTTQKGQKNSRERMKRIEEGIKELGSQILKEHPVENTQLQNEKLYLYYLQNGRDMYVDQELDINRLSDYDVDHIVPQSFLKDDSIDNKVLTRSDKARGKSDNVPSEEVVKKMKNYWRQLLNAKLITQRKFDNLTKAERGGLSELDKAGFIKRQLVETRQITKHVAQILDSRMNTKYDENDKLIREVKVITLKSKLVSDFRKDFQFYKVREINNYHHAHDAYLNAVVGTALIKKYPKLESEFVYGDYKVYDVRKMIAKSEQEIGKATAKYFFYSNIMNFFKTEITLANGEIRKRPLIETNGETGEIVWDKGRDFATVRKVLSMPQVNIVKKTEVQTGGFSKESILPKRNSDKLIARKKDWDPKKYGGFDSPTVAYSVLVVAKVEKGKSKKLKSVKELLGITIMERSSFEKNPIDFLEAKGYKEVKKDLIIKLPKYSLFELENGRKRMLASAGELQKGNELALPSKYVNFLYLASHYEKLKGSPEDNEQKQLFVEQHKHYLDEIIEQISEFSKRVILADANLDKVLSAYNKHRDKPIREQAENIIHLFTLTNLGAPAAFKYFDTTIDRKRYTSTKEVLDATLIHQSITGLYETRIDLSQLGGDGGEAAAKEAAAKEAAAKGGVLNLEEEYRLHEKPVPSSIDPSWLQLFPTVWAERAGMGLANQVPPVVVELRSGASPVAVRQYPMSKEAREGIRPHIQKFLDLGVLVPCRSPWNTPLLPVKKPGTNDYRPVQDLREINKRVQDIHPTVPNPYNLLSSLPPSYTWYSVLDLKDAFFCLRLHPNSQPLFAFEWKDPEKGNTGQLTWTRLPQGFKNSPTLFNEALHRDLAPFRALNPQVVLLQYVDDLLVAAPTYEDCKKGTQKLLQELSKLGYRVSAKKAQLCQREVTYLGYLLKEGKRWLTPARKATVMKIPVPTTPRQVREFLGKAGFCRLFIPGFASLAAPLYPLTKPSIPFIWTEEHQQAFDHIKKALLSAPALALPDLTKPFTLYIDERAGVARGVLTQTLGPWRRPVAYLSKKLDPVASGWPTCLKAVAAVALLLKDADKLTLGQNVTVIASHSLESIVRQPPDRWMTNARMTHYQSLLLNERVSFAPPAVLNPATLLPVESEATPVHRCSEILAEETGTRRDLEDQPLPGVPTWYTDGSSFITEGKRRAGAPIVDGKRTVWASSLPEGTSAQKAELVALTQALRLAEGKNINIYTDSRYAFATAHIHGAIYKQRGWLTSAGKDIKNKEEILALLEAIHLPRRVAIIHCPGHQRGSNPVATGNRRADEAAKQAALSTRVLAGTTKPAGKRTADGSEFEKRTADGSEFESPKKKAKVE

SEQ ID NO: 1453 - protein, 2094 aa, synthetic construct
MPAAKRVKLDGGDKKYSIGLDIGTNSVGWAVITDEYKVPSKKFKVLGNTDRHSIKKNLIGALLFDSGETAEATRLKRTARRRYTRRKNRICYLQEIFSNEMAKVDDSFFHRLEESFLVEEDKKHERHPIFGNIVDEVAYHEKYPTIYHLRKKLVDSTDKADLRLIYLALAHMIKFRGHFLIEGDLNPDNSDVDKLFIQLVQTYNQLFEENPINASGVDAKAILSARLSKSRRLENLIAQLPGEKKNGLFGNLIALSLGLTPNFKSNFDLAEDAKLQLSKDTYDDDLDNLLAQIGDQYADLFLAAKNLSDAILLSDILRVNTEITKAPLSASMIKRYDEHHQDLTLLKALVRQQLPEKYKEIFFDQSKNGYAGYIDGGASQEEFYKFIKPILEKMDGTEELLVKLNREDLLRKQRTFDNGSIPHQIHLGELHAILRRQEDFYPFLKDNREKIEKILTFRIPYYVGPLARGNSRFAWMTRKSEETITPWNFEEVVDKGASAQSFIERMTNFDKNLPNEKVLPKHSLLYEYFTVYNELTKVKYVTEGMRKPAFLSGEQKKAIVDLLFKTNRKVTVKQLKEDYFKKIECFDSVEISGVEDRFNASLGTYHDLLKIIKDKDFLDNEENEDILEDIVLTLTLFEDREMIEERLKTYAHLFDDKVMKQLKRRRYTGWGRLSRKLINGIRDKQSGKTILDFLKSDGFANRNFMQLIHDDSLTFKEDIQKAQVSGQGDSLHEHIANLAGSPAIKKGILQTVKVVDELVKVMGRHKPENIVIEMARENQTTQKGQKNSRERMKRIEEGIKELGSQILKEHPVENTQLQNEKLYLYYLQNGRDMYVDQELDINRLSDYDVDHIVPQSFLKDDSIDNKVLTRSDKARGKSDNVPSEEVVKKMKNYWRQLLNAKLITQRKFDNLTKAERGGLSELDKAGFIKRQLVETRQITKHVAQILDSRMNTKYDENDKLIREVKVITLKSKLVSDFRKDFQFYKVREINNYHHAHDAYLNAVVGTALIKKYPKLESEFVYGDYKVYDVRKMIAKSEQEIGKATAKYFFYSNIMNFFKTEITLANGEIRKRPLIETNGETGEIVWDKGRDFATVRKVLSMPQVNIVKKTEVQTGGFSKESILPKRNSDKLIARKKDWDPKKYGGFDSPTVAYSVLVVAKVEKGKSKKLKSVKELLGITIMERSSFEKNPIDFLEAKGYKEVKKDLIIKLPKYSLFELENGRKRMLASAGELQKGNELALPSKYVNFLYLASHYEKLKGSPEDNEQKQLFVEQHKHYLDEIIEQISEFSKRVILADANLDKVLSAYNKHRDKPIREQAENIIHLFTLTNLGAPAAFKYFDTTIDRKRYTSTKEVLDATLIHQSITGLYETRIDLSQLGGDGGPAPAPAPAPAPGGVLNLEEEYRLHEKPVPSSIDPSWLQLFPTVWAERAGMGLANQVPPVVVELRSGASPVAVRQYPMSKEAREGIRPHIQKFLDLGVLVPCRSPWNTPLLPVKKPGTNDYRPVQDLREINKRVQDIHPTVPNPYNLLSSLPPSYTWYSVLDLKDAFFCLRLHPNSQPLFAFEWKDPEKGNTGQLTWTRLPQGFKNSPTLFNEALHRDLAPFRALNPQVVLLQYVDDLLVAAPTYEDCKKGTQKLLQELSKLGYRVSAKKAQLCQREVTYLGYLLKEGKRWLTPARKATVMKIPVPTTPRQVREFLGKAGFCRLFIPGFASLAAPLYPLTKPSIPFIWTEEHQQAFDHIKKALLSAPALALPDLTKPFTLYIDERAGVARGVLTQTLGPWRRPVAYLSKKLDPVASGWPTCLKAVAAVALLLKDADKLTLGQNVTVIASHSLESIVRQPPDRWMTNARMTHYQSLLLNERVSFAPPAVLNPATLLPVESEATPVHRCSEILAEETGTRRDLEDQPLPGVPTWYTDGSSFITEGKRRAGAPIVDGKRTVWASSLPEGTSAQKAELVALTQALRLAEGKNINIYTDSRYAFATAHIHGAIYKQRGWLTSAGKDIKNKEEILALLEAIHLPRRVAIIHCPGHQRGSNPVATGNRRADEAAKQAALSTRVLAGTTKPAGKRTADGSEFEKRTADGSEFESPKKKAKVE

SEQ ID NO: 1454 - protein, 2113 aa, synthetic construct
MPAAKRVKLDGGDKKYSIGLDIGTNSVGWAVITDEYKVPSKKFKVLGNTDRHSIKKNLIGALLFDSGETAEATRLKRTARRRYTRRKNRICYLQEIFSNEMAKVDDSFFHRLEESFLVEEDKKHERHPIFGNIVDEVAYHEKYPTIYHLRKKLVDSTDKADLRLIYLALAHMIKFRGHFLIEGDLNPDNSDVDKLFIQLVQTYNQLFEENPINASGVDAKAILSARLSKSRRLENLIAQLPGEKKNGLFGNLIALSLGLTPNFKSNFDLAEDAKLQLSKDTYDDDLDNLLAQIGDQYADLFLAAKNLSDAILLSDILRVNTEITKAPLSASMIKRYDEHHQDLTLLKALVRQQLPEKYKEIFFDQSKNGYAGYIDGGASQEEFYKFIKPILEKMDGTEELLVKLNREDLLRKQRTFDNGSIPHQIHLGELHAILRRQEDFYPFLKDNREKIEKILTFRIPYYVGPLARGNSRFAWMTRKSEETITPWNFEEVVDKGASAQSFIERMTNFDKNLPNEKVLPKHSLLYEYFTVYNELTKVKYVTEGMRKPAFLSGEQKKAIVDLLFKTNRKVTVKQLKEDYFKKIECFDSVEISGVEDRFNASLGTYHDLLKIIKDKDFLDNEENEDILEDIVLTLTLFEDREMIEERLKTYAHLFDDKVMKQLKRRRYTGWGRLSRKLINGIRDKQSGKTILDFLKSDGFANRNFMQLIHDDSLTFKEDIQKAQVSGQGDSLHEHIANLAGSPAIKKGILQTVKVVDELVKVMGRHKPENIVIEMARENQTTQKGQKNSRERMKRIEEGIKELGSQILKEHPVENTQLQNEKLYLYYLQNGRDMYVDQELDINRLSDYDVDHIVPQSFLKDDSIDNKVLTRSDKARGKSDNVPSEEVVKKMKNYWRQLLNAKLITQRKFDNLTKAERGGLSELDKAGFIKRQLVETRQITKHVAQILDSRMNTKYDENDKLIREVKVITLKSKLVSDFRKDFQFYKVREINNYHHAHDAYLNAVVGTALIKKYPKLESEFVYGDYKVYDVRKMIAKSEQEIGKATAKYFFYSNIMNFFKTEITLANGEIRKRPLIETNGETGEIVWDKGRDFATVRKVLSMPQVNIVKKTEVQTGGFSKESILPKRNSDKLIARKKDWDPKKYGGFDSPTVAYSVLVVAKVEKGKSKKLKSVKELLGITIMERSSFEKNPIDFLEAKGYKEVKKDLIIKLPKYSLFELENGRKRMLASAGELQKGNELALPSKYVNFLYLASHYEKLKGSPEDNEQKQLFVEQHKHYLDEIIEQISEFSKRVILADANLDKVLSAYNKHRDKPIREQAENIIHLFTLTNLGAPAAFKYFDTTIDRKRYTSTKEVLDATLIHQSITGLYETRIDLSQLGGDGGEAAAKEAAAKEAAAKEAAAKEAAAKEAAAKGGVLNLEEEYRLHEKPVPSSIDPSWLQLFPTVWAERAGMGLANQVPPVVVELRSGASPVAVRQYPMSKEAREGIRPHIQKFLDLGVLVPCRSPWNTPLLPVKKPGTNDYRPVQDLREINKRVQDIHPTVPNPYNLLSSLPPSYTWYSVLDLKDAFFCLRLHPNSQPLFAFEWKDPEKGNTGQLTWTRLPQGFKNSPTLFNEALHRDLAPFRALNPQVVLLQYVDDLLVAAPTYEDCKKGTQKLLQELSKLGYRVSAKKAQLCQREVTYLGYLLKEGKRWLTPARKATVMKIPVPTTPRQVREFLGKAGFCRLFIPGFASLAAPLYPLTKPSIPFIWTEEHQQAFDHIKKALLSAPALALPDLTKPFTLYIDERAGVARGVLTQTLGPWRRPVAYLSKKLDPVASGWPTCLKAVAAVALLLKDADKLTLGQNVTVIASHSLESIVRQPPDRWMTNARMTHYQSLLLNERVSFAPPAVLNPATLLPVESEATPVHRCSEILAEETGTRRDLEDQPLPGVPTWYTDGSSFITEGKRRAGAPIVDGKRTVWASSLPEGTSAQKAELVALTQALRLAEGKNINIYTDSRYAFATAHIHGAIYKQRGWLTSAGKDIKNKEEILALLEAIHLPRRVAIIHCPGHQRGSNPVATGNRRADEAAKQAALSTRVLAGTTKPAGKRTADGSEFEKRTADGSEFESPKKKAKVE

SEQ ID NO: 1455 - protein, 2094 aa, synthetic construct
MPAAKRVKLDGGDKKYSIGLDIGTNSVGWAVITDEYKVPSKKFKVLGNTDRHSIKKNLIGALLFDSGETAEATRLKRTARRRYTRRKNRICYLQEIFSNEMAKVDDSFFHRLEESFLVEEDKKHERHPIFGNIVDEVAYHEKYPTIYHLRKKLVDSTDKADLRLIYLALAHMIKFRGHFLIEGDLNPDNSDVDKLFIQLVQTYNQLFEENPINASGVDAKAILSARLSKSRRLENLIAQLPGEKKNGLFGNLIALSLGLTPNFKSNFDLAEDAKLQLSKDTYDDDLDNLLAQIGDQYADLFLAAKNLSDAILLSDILRVNTEITKAPLSASMIKRYDEHHQDLTLLKALVRQQLPEKYKEIFFDQSKNGYAGYIDGGASQEEFYKFIKPILEKMDGTEELLVKLNREDLLRKQRTFDNGSIPHQIHLGELHAILRRQEDFYPFLKDNREKIEKILTFRIPYYVGPLARGNSRFAWMTRKSEETITPWNFEEVVDKGASAQSFIERMTNFDKNLPNEKVLPKHSLLYEYFTVYNELTKVKYVTEGMRKPAFLSGEQKKAIVDLLFKTNRKVTVKQLKEDYFKKIECFDSVEISGVEDRFNASLGTYHDLLKIIKDKDFLDNEENEDILEDIVLTLTLFEDREMIEERLKTYAHLFDDKVMKQLKRRRYTGWGRLSRKLINGIRDKQSGKTILDFLKSDGFANRNFMQLIHDDSLTFKEDIQKAQVSGQGDSLHEHIANLAGSPAIKKGILQTVKVVDELVKVMGRHKPENIVIEMARENQTTQKGQKNSRERMKRIEEGIKELGSQILKEHPVENTQLQNEKLYLYYLQNGRDMYVDQELDINRLSDYDVDHIVPQSFLKDDSIDNKVLTRSDKARGKSDNVPSEEVVKKMKNYWRQLLNAKLITQRKFDNLTKAERGGLSELDKAGFIKRQLVETRQITKHVAQILDSRMNTKYDENDKLIREVKVITLKSKLVSDFRKDFQFYKVREINNYHHAHDAYLNAVVGTALIKKYPKLESEFVYGDYKVYDVRKMIAKSEQEIGKATAKYFFYSNIMNFFKTEITLANGEIRKRPLIETNGETGEIVWDKGRDFATVRKVLSMPQVNIVKKTEVQTGGFSKESILPKRNSDKLIARKKDWDPKKYGGFDSPTVAYSVLVVAKVEKGKSKKLKSVKELLGITIMERSSFEKNPIDFLEAKGYKEVKKDLIIKLPKYSLFELENGRKRMLASAGELQKGNELALPSKYVNFLYLASHYEKLKGSPEDNEQKQLFVEQHKHYLDEIIEQISEFSKRVILADANLDKVLSAYNKHRDKPIREQAENIIHLFTLTNLGAPAAFKYFDTTIDRKRYTSTKEVLDATLIHQSITGLYETRIDLSQLGGDGGEAAAKGGGGSSGGVLNLEEEYRLHEKPVPSSIDPSWLQLFPTVWAERAGMGLANQVPPVVVELRSGASPVAVRQYPMSKEAREGIRPHIQKFLDLGVLVPCRSPWNTPLLPVKKPGTNDYRPVQDLREINKRVQDIHPTVPNPYNLLSSLPPSYTWYSVLDLKDAFFCLRLHPNSQPLFAFEWKDPEKGNTGQLTWTRLPQGFKNSPTLFNEALHRDLAPFRALNPQVVLLQYVDDLLVAAPTYEDCKKGTQKLLQELSKLGYRVSAKKAQLCQREVTYLGYLLKEGKRWLTPARKATVMKIPVPTTPRQVREFLGKAGFCRLFIPGFASLAAPLYPLTKPSIPFIWTEEHQQAFDHIKKALLSAPALALPDLTKPFTLYIDERAGVARGVLTQTLGPWRRPVAYLSKKLDPVASGWPTCLKAVAAVALLLKDADKLTLGQNVTVIASHSLESIVRQPPDRWMTNARMTHYQSLLLNERVSFAPPAVLNPATLLPVESEATPVHRCSEILAEETGTRRDLEDQPLPGVPTWYTDGSSFITEGKRRAGAPIVDGKRTVWASSLPEGTSAQKAELVALTQALRLAEGKNINIYTDSRYAFATAHIHGAIYKQRGWLTSAGKDIKNKEEILALLEAIHLPRRVAIIHCPGHQRGSNPVATGNRRADEAAKQAALSTRVLAGTTKPAGKRTADGSEFEKRTADGSEFESPKKKAKVE

SEQ ID NO: 1456 - protein, 2094 aa, synthetic construct
MPAAKRVKLDGGDKKYSIGLDIGTNSVGWAVITDEYKVPSKKFKVLGNTDRHSIKKNLIGALLFDSGETAEATRLKRTARRRYTRRKNRICYLQEIFSNEMAKVDDSFFHRLEESFLVEEDKKHERHPIFGNIVDEVAYHEKYPTIYHLRKKLVDSTDKADLRLIYLALAHMIKFRGHFLIEGDLNPDNSDVDKLFIQLVQTYNQLFEENPINASGVDAKAILSARLSKSRRLENLIAQLPGEKKNGLFGNLIALSLGLTPNFKSNFDLAEDAKLQLSKDTYDDDLDNLLAQIGDQYADLFLAAKNLSDAILLSDILRVNTEITKAPLSASMIKRYDEHHQDLTLLKALVRQQLPEKYKEIFFDQSKNGYAGYIDGGASQEEFYKFIKPILEKMDGTEELLVKLNREDLLRKQRTFDNGSIPHQIHLGELHAILRRQEDFYPFLKDNREKIEKILTFRIPYYVGPLARGNSRFAWMTRKSEETITPWNFEEVVDKGASAQSFIERMTNFDKNLPNEKVLPKHSLLYEYFTVYNELTKVKYVTEGMRKPAFLSGEQKKAIVDLLFKTNRKVTVKQLKEDYFKKIECFDSVEISGVEDRFNASLGTYHDLLKIIKDKDFLDNEENEDILEDIVLTLTLFEDREMIEERLKTYAHLFDDKVMKQLKRRRYTGWGRLSRKLINGIRDKQSGKTILDFLKSDGFANRNFMQLIHDDSLTFKEDIQKAQVSGQGDSLHEHIANLAGSPAIKKGILQTVKVVDELVKVMGRHKPENIVIEMARENQTTQKGQKNSRERMKRIEEGIKELGSQILKEHPVENTQLQNEKLYLYYLQNGRDMYVDQELDINRLSDYDVDHIVPQSFLKDDSIDNKVLTRSDKARGKSDNVPSEEVVKKMKNYWRQLLNAKLITQRKFDNLTKAERGGLSELDKAGFIKRQLVETRQITKHVAQILDSRMNTKYDENDKLIREVKVITLKSKLVSDFRKDFQFYKVREINNYHHAHDAYLNAVVGTALIKKYPKLESEFVYGDYKVYDVRKMIAKSEQEIGKATAKYFFYSNIMNFFKTEITLANGEIRKRPLIETNGETGEIVWDKGRDFATVRKVLSMPQVNIVKKTEVQTGGFSKESILPKRNSDKLIARKKDWDPKKYGGFDSPTVAYSVLVVAKVEKGKSKKLKSVKELLGITIMERSSFEKNPIDFLEAKGYKEVKKDLIIKLPKYSLFELENGRKRMLASAGELQKGNELALPSKYVNFLYLASHYEKLKGSPEDNEQKQLFVEQHKHYLDEIIEQISEFSKRVILADANLDKVLSAYNKHRDKPIREQAENIIHLFTLTNLGAPAAFKYFDTTIDRKRYTSTKEVLDATLIHQSITGLYETRIDLSQLGGDGGGGGGGSEAAAKGGVLNLEEEYRLHEKPVPSSIDPSWLQLFPTVWAERAGMGLANQVPPVVVELRSGASPVAVRQYPMSKEAREGIRPHIQKFLDLGVLVPCRSPWNTPLLPVKKPGTNDYRPVQDLREINKRVQDIHPTVPNPYNLLSSLPPSYTWYSVLDLKDAFFCLRLHPNSQPLFAFEWKDPEKGNTGQLTWTRLPQGFKNSPTLFNEALHRDLAPFRALNPQVVLLQYVDDLLVAAPTYEDCKKGTQKLLQELSKLGYRVSAKKAQLCQREVTYLGYLLKEGKRWLTPARKATVMKIPVPTTPRQVREFLGKAGFCRLFIPGFASLAAPLYPLTKPSIPFIWTEEHQQAFDHIKKALLSAPALALPDLTKPFTLYIDERAGVARGVLTQTLGPWRRPVAYLSKKLDPVASGWPTCLKAVAAVALLLKDADKLTLGQNVTVIASHSLESIVRQPPDRWMTNARMTHYQSLLLNERVSFAPPAVLNPATLLPVESEATPVHRCSEILAEETGTRRDLEDQPLPGVPTWYTDGSSFITEGKRRAGAPIVDGKRTVWASSLPEGTSAQKAELVALTQALRLAEGKNINIYTDSRYAFATAHIHGAIYKQRGWLTSAGKDIKNKEEILALLEAIHLPRRVAIIHCPGHQRGSNPVATGNRRADEAAKQAALSTRVLAGTTKPAGKRTADGSEFEKRTADGSEFESPKKKAKVE

SEQ ID NO: 1457 - protein, 2094 aa, synthetic construct
MPAAKRVKLDGGDKKYSIGLDIGTNSVGWAVITDEYKVPSKKFKVLGNTDRHSIKKNLIGALLFDSGETAEATRLKRTARRRYTRRKNRICYLQEIFSNEMAKVDDSFFHRLEESFLVEEDKKHERHPIFGNIVDEVAYHEKYPTIYHLRKKLVDSTDKADLRLIYLALAHMIKFRGHFLIEGDLNPDNSDVDKLFIQLVQTYNQLFEENPINASGVDAKAILSARLSKSRRLENLIAQLPGEKKNGLFGNLIALSLGLTPNFKSNFDLAEDAKLQLSKDTYDDDLDNLLAQIGDQYADLFLAAKNLSDAILLSDILRVNTEITKAPLSASMIKRYDEHHQDLTLLKALVRQQLPEKYKEIFFDQSKNGYAGYIDGGASQEEFYKFIKPILEKMDGTEELLVKLNREDLLRKQRTFDNGSIPHQIHLGELHAILRRQEDFYPFLKDNREKIEKILTFRIPYYVGPLARGNSRFAWMTRKSEETITPWNFEEVVDKGASAQSFIERMTNFDKNLPNEKVLPKHSLLYEYFTVYNELTKVKYVTEGMRKPAFLSGEQKKAIVDLLFKTNRKVTVKQLKEDYFKKIECFDSVEISGVEDRFNASLGTYHDLLKIIKDKDFLDNEENEDILEDIVLTLTLFEDREMIEERLKTYAHLFDDKVMKQLKRRRYTGWGRLSRKLINGIRDKQSGKTILDFLKSDGFANRNFMQLIHDDSLTFKEDIQKAQVSGQGDSLHEHIANLAGSPAIKKGILQTVKVVDELVKVMGRHKPENIVIEMARENQTTQKGQKNSRERMKRIEEGIKELGSQILKEHPVENTQLQNEKLYLYYLQNGRDMYVDQELDINRLSDYDVDHIVPQSFLKDDSIDNKVLTRSDKARGKSDNVPSEEVVKKMKNYWRQLLNAKLITQRKFDNLTKAERGGLSELDKAGFIKRQLVETRQITKHVAQILDSRMNTKYDENDKLIREVKVITLKSKLVSDFRKDFQFYKVREINNYHHAHDAYLNAVVGTALIKKYPKLESEFVYGDYKVYDVRKMIAKSEQEIGKATAKYFFYSNIMNFFKTEITLANGEIRKRPLIETNGETGEIVWDKGRDFATVRKVLSMPQVNIVKKTEVQTGGFSKESILPKRNSDKLIARKKDWDPKKYGGFDSPTVAYSVLVVAKVEKGKSKKLKSVKELLGITIMERSSFEKNPIDFLEAKGYKEVKKDLIIKLPKYSLFELENGRKRMLASAGELQKGNELALPSKYVNFLYLASHYEKLKGSPEDNEQKQLFVEQHKHYLDEIIEQISEFSKRVILADANLDKVLSAYNKHRDKPIREQAENIIHLFTLTNLGAPAAFKYFDTTIDRKRYTSTKEVLDATLIHQSITGLYETRIDLSQLGGDGGGSSPAPEAAAKGGVLNLEEEYRLHEKPVPSSIDPSWLQLFPTVWAERAGMGLANQVPPVVVELRSGASPVAVRQYPMSKEAREGIRPHIQKFLDLGVLVPCRSPWNTPLLPVKKPGTNDYRPVQDLREINKRVQDIHPTVPNPYNLLSSLPPSYTWYSVLDLKDAFFCLRLHPNSQPLFAFEWKDPEKGNTGQLTWTRLPQGFKNSPTLFNEALHRDLAPFRALNPQVVLLQYVDDLLVAAPTYEDCKKGTQKLLQELSKLGYRVSAKKAQLCQREVTYLGYLLKEGKRWLTPARKATVMKIPVPTTPRQVREFLGKAGFCRLFIPGFASLAAPLYPLTKPSIPFIWTEEHQQAFDHIKKALLSAPALALPDLTKPFTLYIDERAGVARGVLTQTLGPWRRPVAYLSKKLDPVASGWPTCLKAVAAVALLLKDADKLTLGQNVTVIASHSLESIVRQPPDRWMTNARMTHYQSLLLNERVSFAPPAVLNPATLLPVESEATPVHRCSEILAEETGTRRDLEDQPLPGVPTWYTDGSSFITEGKRRAGAPIVDGKRTVWASSLPEGTSAQKAELVALTQALRLAEGKNINIYTDSRYAFATAHIHGAIYKQRGWLTSAGKDIKNKEEILALLEAIHLPRRVAIIHCPGHQRGSNPVATGNRRADEAAKQAALSTRVLAGTTKPAGKRTADGSEFEKRTADGSEFESPKKKAKVE

SEQ ID NO: 1458 - protein, 2098 aa, synthetic construct
MPAAKRVKLDGGDKKYSIGLDIGTNSVGWAVITDEYKVPSKKFKVLGNTDRHSIKKNLIGALLFDSGETAEATRLKRTARRRYTRRKNRICYLQEIFSNEMAKVDDSFFHRLEESFLVEEDKKHERHPIFGNIVDEVAYHEKYPTIYHLRKKLVDSTDKADLRLIYLALAHMIKFRGHFLIEGDLNPDNSDVDKLFIQLVQTYNQLFEENPINASGVDAKAILSARLSKSRRLENLIAQLPGEKKNGLFGNLIALSLGLTPNFKSNFDLAEDAKLQLSKDTYDDDLDNLLAQIGDQYADLFLAAKNLSDAILLSDILRVNTEITKAPLSASMIKRYDEHHQDLTLLKALVRQQLPEKYKEIFFDQSKNGYAGYIDGGASQEEFYKFIKPILEKMDGTEELLVKLNREDLLRKQRTFDNGSIPHQIHLGELHAILRRQEDFYPFLKDNREKIEKILTFRIPYYVGPLARGNSRFAWMTRKSEETITPWNFEEVVDKGASAQSFIERMTNFDKNLPNEKVLPKHSLLYEYFTVYNELTKVKYVTEGMRKPAFLSGEQKKAIVDLLFKTNRKVTVKQLKEDYFKKIECFDSVEISGVEDRFNASLGTYHDLLKIIKDKDFLDNEENEDILEDIVLTLTLFEDREMIEERLKTYAHLFDDKVMKQLKRRRYTGWGRLSRKLINGIRDKQSGKTILDFLKSDGFANRNFMQLIHDDSLTFKEDIQKAQVSGQGDSLHEHIANLAGSPAIKKGILQTVKVVDELVKVMGRHKPENIVIEMARENQTTQKGQKNSRERMKRIEEGIKELGSQILKEHPVENTQLQNEKLYLYYLQNGRDMYVDQELDINRLSDYDVDHIVPQSFLKDDSIDNKVLTRSDKARGKSDNVPSEEVVKKMKNYWRQLLNAKLITQRKFDNLTKAERGGLSELDKAGFIKRQLVETRQITKHVAQILDSRMNTKYDENDKLIREVKVITLKSKLVSDFRKDFQFYKVREINNYHHAHDAYLNAVVGTALIKKYPKLESEFVYGDYKVYDVRKMIAKSEQEIGKATAKYFFYSNIMNFFKTEITLANGEIRKRPLIETNGETGEIVWDKGRDFATVRKVLSMPQVNIVKKTEVQTGGFSKESILPKRNSDKLIARKKDWDPKKYGGFDSPTVAYSVLVVAKVEKGKSKKLKSVKELLGITIMERSSFEKNPIDFLEAKGYKEVKKDLIIKLPKYSLFELENGRKRMLASAGELQKGNELALPSKYVNFLYLASHYEKLKGSPEDNEQKQLFVEQHKHYLDEIIEQISEFSKRVILADANLDKVLSAYNKHRDKPIREQAENIIHLFTLTNLGAPAAFKYFDTTIDRKRYTSTKEVLDATLIHQSITGLYETRIDLSQLGGDGGGGGGSGGGGSGGGGSGGVLNLEEEYRLHEKPVPSSIDPSWLQLFPTVWAERAGMGLANQVPPVVVELRSGASPVAVRQYPMSKEAREGIRPHIQKFLDLGVLVPCRSPWNTPLLPVKKPGTNDYRPVQDLREINKRVQDIHPTVPNPYNLLSSLPPSYTWYSVLDLKDAFFCLRLHPNSQPLFAFEWKDPEKGNTGQLTWTRLPQGFKNSPTLFNEALHRDLAPFRALNPQVVLLQYVDDLLVAAPTYEDCKKGTQKLLQELSKLGYRVSAKKAQLCQREVTYLGYLLKEGKRWLTPARKATVMKIPVPTTPRQVREFLGKAGFCRLFIPGFASLAAPLYPLTKPSIPFIWTEEHQQAFDHIKKALLSAPALALPDLTKPFTLYIDERAGVARGVLTQTLGPWRRPVAYLSKKLDPVASGWPTCLKAVAAVALLLKDADKLTLGQNVTVIASHSLESIVRQPPDRWMTNARMTHYQSLLLNERVSFAPPAVLNPATLLPVESEATPVHRCSEILAEETGTRRDLEDQPLPGVPTWYTDGSSFITEGKRRAGAPIVDGKRTVWASSLPEGTSAQKAELVALTQALRLAEGKNINIYTDSRYAFATAHIHGAIYKQRGWLTSAGKDIKNKEEILALLEAIHLPRRVAIIHCPGHQRGSNPVATGNRRADEAAKQAALSTRVLAGTTKPAGKRTADGSEFEKRTADGSEFESPKKKAKVE

SEQ ID NO: 1459 - protein, 2094 aa, synthetic construct
MPAAKRVKLDGGDKKYSIGLDIGTNSVGWAVITDEYKVPSKKFKVLGNTDRHSIKKNLIGALLFDSGETAEATRLKRTARRRYTRRKNRICYLQEIFSNEMAKVDDSFFHRLEESFLVEEDKKHERHPIFGNIVDEVAYHEKYPTIYHLRKKLVDSTDKADLRLIYLALAHMIKFRGHFLIEGDLNPDNSDVDKLFIQLVQTYNQLFEENPINASGVDAKAILSARLSKSRRLENLIAQLPGEKKNGLFGNLIALSLGLTPNFKSNFDLAEDAKLQLSKDTYDDDLDNLLAQIGDQYADLFLAAKNLSDAILLSDILRVNTEITKAPLSASMIKRYDEHHQDLTLLKALVRQQLPEKYKEIFFDQSKNGYAGYIDGGASQEEFYKFIKPILEKMDGTEELLVKLNREDLLRKQRTFDNGSIPHQIHLGELHAILRRQEDFYPFLKDNREKIEKILTFRIPYYVGPLARGNSRFAWMTRKSEETITPWNFEEVVDKGASAQSFIERMTNFDKNLPNEKVLPKHSLLYEYFTVYNELTKVKYVTEGMRKPAFLSGEQKKAIVDLLFKTNRKVTVKQLKEDYFKKIECFDSVEISGVEDRFNASLGTYHDLLKIIKDKDFLDNEENEDILEDIVLTLTLFEDREMIEERLKTYAHLFDDKVMKQLKRRRYTGWGRLSRKLINGIRDKQSGKTILDFLKSDGFANRNFMQLIHDDSLTFKEDIQKAQVSGQGDSLHEHIANLAGSPAIKKGILQTVKVVDELVKVMGRHKPENIVIEMARENQTTQKGQKNSRERMKRIEEGIKELGSQILKEHPVENTQLQNEKLYLYYLQNGRDMYVDQELDINRLSDYDVDHIVPQSFLKDDSIDNKVLTRSDKARGKSDNVPSEEVVKKMKNYWRQLLNAKLITQRKFDNLTKAERGGLSELDKAGFIKRQLVETRQITKHVAQILDSRMNTKYDENDKLIREVKVITLKSKLVSDFRKDFQFYKVREINNYHHAHDAYLNAVVGTALIKKYPKLESEFVYGDYKVYDVRKMIAKSEQEIGKATAKYFFYSNIMNFFKTEITLANGEIRKRPLIETNGETGEIVWDKGRDFATVRKVLSMPQVNIVKKTEVQTGGFSKESILPKRNSDKLIARKKDWDPKKYGGFDSPTVAYSVLVVAKVEKGKSKKLKSVKELLGITIMERSSFEKNPIDFLEAKGYKEVKKDLIIKLPKYSLFELENGRKRMLASAGELQKGNELALPSKYVNFLYLASHYEKLKGSPEDNEQKQLFVEQHKHYLDEIIEQISEFSKRVILADANLDKVLSAYNKHRDKPIREQAENIIHLFTLTNLGAPAAFKYFDTTIDRKRYTSTKEVLDATLIHQSITGLYETRIDLSQLGGDGGPAPGGGEAAAKGGVLNLEEEYRLHEKPVPSSIDPSWLQLFPTVWAERAGMGLANQVPPVVVELRSGASPVAVRQYPMSKEAREGIRPHIQKFLDLGVLVPCRSPWNTPLLPVKKPGTNDYRPVQDLREINKRVQDIHPTVPNPYNLLSSLPPSYTWYSVLDLKDAFFCLRLHPNSQPLFAFEWKDPEKGNTGQLTWTRLPQGFKNSPTLFNEALHRDLAPFRALNPQVVLLQYVDDLLVAAPTYEDCKKGTQKLLQELSKLGYRVSAKKAQLCQREVTYLGYLLKEGKRWLTPARKATVMKIPVPTTPRQVREFLGKAGFCRLFIPGFASLAAPLYPLTKPSIPFIWTEEHQQAFDHIKKALLSAPALALPDLTKPFTLYIDERAGVARGVLTQTLGPWRRPVAYLSKKLDPVASGWPTCLKAVAAVALLLKDADKLTLGQNVTVIASHSLESIVRQPPDRWMTNARMTHYQSLLLNERVSFAPPAVLNPATLLPVESEATPVHRCSEILAEETGTRRDLEDQPLPGVPTWYTDGSSFITEGKRRAGAPIVDGKRTVWASSLPEGTSAQKAELVALTQALRLAEGKNINIYTDSRYAFATAHIHGAIYKQRGWLTSAGKDIKNKEEILALLEAIHLPRRVAIIHCPGHQRGSNPVATGNRRADEAAKQAALSTRVLAGTTKPAGKRTADGSEFEKRTADGSEFESPKKKAKVE

SEQ ID NO: 1460 - protein, 2092 aa, synthetic construct
MPAAKRVKLDGGDKKYSIGLDIGTNSVGWAVITDEYKVPSKKFKVLGNTDRHSIKKNLIGALLFDSGETAEATRLKRTARRRYTRRKNRICYLQEIFSNEMAKVDDSFFHRLEESFLVEEDKKHERHPIFGNIVDEVAYHEKYPTIYHLRKKLVDSTDKADLRLIYLALAHMIKFRGHFLIEGDLNPDNSDVDKLFIQLVQTYNQLFEENPINASGVDAKAILSARLSKSRRLENLIAQLPGEKKNGLFGNLIALSLGLTPNFKSNFDLAEDAKLQLSKDTYDDDLDNLLAQIGDQYADLFLAAKNLSDAILLSDILRVNTEITKAPLSASMIKRYDEHHQDLTLLKALVRQQLPEKYKEIFFDQSKNGYAGYIDGGASQEEFYKFIKPILEKMDGTEELLVKLNREDLLRKQRTFDNGSIPHQIHLGELHAILRRQEDFYPFLKDNREKIEKILTFRIPYYVGPLARGNSRFAWMTRKSEETITPWNFEEVVDKGASAQSFIERMTNFDKNLPNEKVLPKHSLLYEYFTVYNELTKVKYVTEGMRKPAFLSGEQKKAIVDLLFKTNRKVTVKQLKEDYFKKIECFDSVEISGVEDRFNASLGTYHDLLKIIKDKDFLDNEENEDILEDIVLTLTLFEDREMIEERLKTYAHLFDDKVMKQLKRRRYTGWGRLSRKLINGIRDKQSGKTILDFLKSDGFANRNFMQLIHDDSLTFKEDIQKAQVSGQGDSLHEHIANLAGSPAIKKGILQTVKVVDELVKVMGRHKPENIVIEMARENQTTQKGQKNSRERMKRIEEGIKELGSQILKEHPVENTQLQNEKLYLYYLQNGRDMYVDQELDINRLSDYDVDHIVPQSFLKDDSIDNKVLTRSDKARGKSDNVPSEEVVKKMKNYWRQLLNAKLITQRKFDNLTKAERGGLSELDKAGFIKRQLVETRQITKHVAQILDSRMNTKYDENDKLIREVKVITLKSKLVSDFRKDFQFYKVREINNYHHAHDAYLNAVVGTALIKKYPKLESEFVYGDYKVYDVRKMIAKSEQEIGKATAKYFFYSNIMNFFKTEITLANGEIRKRPLIETNGETGEIVWDKGRDFATVRKVLSMPQVNIVKKTEVQTGGFSKESILPKRNSDKLIARKKDWDPKKYGGFDSPTVAYSVLVVAKVEKGKSKKLKSVKELLGITIMERSSFEKNPIDFLEAKGYKEVKKDLIIKLPKYSLFELENGRKRMLASAGELQKGNELALPSKYVNFLYLASHYEKLKGSPEDNEQKQLFVEQHKHYLDEIIEQISEFSKRVILADANLDKVLSAYNKHRDKPIREQAENIIHLFTLTNLGAPAAFKYFDTTIDRKRYTSTKEVLDATLIHQSITGLYETRIDLSQLGGDGGPAPGGGGGSGGVLNLEEEYRLHEKPVPSSIDPSWLQLFPTVWAERAGMGLANQVPPVVVELRSGASPVAVRQYPMSKEAREGIRPHIQKFLDLGVLVPCRSPWNTPLLPVKKPGTNDYRPVQDLREINKRVQDIHPTVPNPYNLLSSLPPSYTWYSVLDLKDAFFCLRLHPNSQPLFAFEWKDPEKGNTGQLTWTRLPQGFKNSPTLFNEALHRDLAPFRALNPQVVLLQYVDDLLVAAPTYEDCKKGTQKLLQELSKLGYRVSAKKAQLCQREVTYLGYLLKEGKRWLTPARKATVMKIPVPTTPRQVREFLGKAGFCRLFIPGFASLAAPLYPLTKPSIPFIWTEEHQQAFDHIKKALLSAPALALPDLTKPFTLYIDERAGVARGVLTQTLGPWRRPVAYLSKKLDPVASGWPTCLKAVAAVALLLKDADKLTLGQNVTVIASHSLESIVRQPPDRWMTNARMTHYQSLLLNERVSFAPPAVLNPATLLPVESEATPVHRCSEILAEETGTRRDLEDQPLPGVPTWYTDGSSFITEGKRRAGAPIVDGKRTVWASSLPEGTSAQKAELVALTQALRLAEGKNINIYTDSRYAFATAHIHGAIYKQRGWLTSAGKDIKNKEEILALLEAIHLPRRVAIIHCPGHQRGSNPVATGNRRADEAAKQAALSTRVLAGTTKPAGKRTADGSEFEKRTADGSEFESPKKKAKVE

SEQ ID NO: 1461 - protein, 2094 aa, synthetic construct
MPAAKRVKLDGGDKKYSIGLDIGTNSVGWAVITDEYKVPSKKFKVLGNTDRHSIKKNLIGALLFDSGETAEATRLKRTARRRYTRRKNRICYLQEIFSNEMAKVDDSFFHRLEESFLVEEDKKHERHPIFGNIVDEVAYHEKYPTIYHLRKKLVDSTDKADLRLIYLALAHMIKFRGHFLIEGDLNPDNSDVDKLFIQLVQTYNQLFEENPINASGVDAKAILSARLSKSRRLENLIAQLPGEKKNGLFGNLIALSLGLTPNFKSNFDLAEDAKLQLSKDTYDDDLDNLLAQIGDQYADLFLAAKNLSDAILLSDILRVNTEITKAPLSASMIKRYDEHHQDLTLLKALVRQQLPEKYKEIFFDQSKNGYAGYIDGGASQEEFYKFIKPILEKMDGTEELLVKLNREDLLRKQRTFDNGSIPHQIHLGELHAILRRQEDFYPFLKDNREKIEKILTFRIPYYVGPLARGNSRFAWMTRKSEETITPWNFEEVVDKGASAQSFIERMTNFDKNLPNEKVLPKHSLLYEYFTVYNELTKVKYVTEGMRKPAFLSGEQKKAIVDLLFKTNRKVTVKQLKEDYFKKIECFDSVEISGVEDRFNASLGTYHDLLKIIKDKDFLDNEENEDILEDIVLTLTLFEDREMIEERLKTYAHLFDDKVMKQLKRRRYTGWGRLSRKLINGIRDKQSGKTILDFLKSDGFANRNFMQLIHDDSLTFKEDIQKAQVSGQGDSLHEHIANLAGSPAIKKGILQTVKVVDELVKVMGRHKPENIVIEMARENQTTQKGQKNSRERMKRIEEGIKELGSQILKEHPVENTQLQNEKLYLYYLQNGRDMYVDQELDINRLSDYDVDHIVPQSFLKDDSIDNKVLTRSDKARGKSDNVPSEEVVKKMKNYWRQLLNAKLITQRKFDNLTKAERGGLSELDKAGFIKRQLVETRQITKHVAQILDSRMNTKYDENDKLIREVKVITLKSKLVSDFRKDFQFYKVREINNYHHAHDAYLNAVVGTALIKKYPKLESEFVYGDYKVYDVRKMIAKSEQEIGKATAKYFFYSNIMNFFKTEITLANGEIRKRPLIETNGETGEIVWDKGRDFATVRKVLSMPQVNIVKKTEVQTGGFSKESILPKRNSDKLIARKKDWDPKKYGGFDSPTVAYSVLVVAKVEKGKSKKLKSVKELLGITIMERSSFEKNPIDFLEAKGYKEVKKDLIIKLPKYSLFELENGRKRMLASAGELQKGNELALPSKYVNFLYLASHYEKLKGSPEDNEQKQLFVEQHKHYLDEIIEQISEFSKRVILADANLDKVLSAYNKHRDKPIREQAENIIHLFTLTNLGAPAAFKYFDTTIDRKRYTSTKEVLDATLIHQSITGLYETRIDLSQLGGDGGGGGEAAAKGSSGGVLNLEEEYRLHEKPVPSSIDPSWLQLFPTVWAERAGMGLANQVPPVVVELRSGASPVAVRQYPMSKEAREGIRPHIQKFLDLGVLVPCRSPWNTPLLPVKKPGTNDYRPVQDLREINKRVQDIHPTVPNPYNLLSSLPPSYTWYSVLDLKDAFFCLRLHPNSQPLFAFEWKDPEKGNTGQLTWTRLPQGFKNSPTLFNEALHRDLAPFRALNPQVVLLQYVDDLLVAAPTYEDCKKGTQKLLQELSKLGYRVSAKKAQLCQREVTYLGYLLKEGKRWLTPARKATVMKIPVPTTPRQVREFLGKAGFCRLFIPGFASLAAPLYPLTKPSIPFIWTEEHQQAFDHIKKALLSAPALALPDLTKPFTLYIDERAGVARGVLTQTLGPWRRPVAYLSKKLDPVASGWPTCLKAVAAVALLLKDADKLTLGQNVTVIASHSLESIVRQPPDRWMTNARMTHYQSLLLNERVSFAPPAVLNPATLLPVESEATPVHRCSEILAEETGTRRDLEDQPLPGVPTWYTDGSSFITEGKRRAGAPIVDGKRTVWASSLPEGTSAQKAELVALTQALRLAEGKNINIYTDSRYAFATAHIHGAIYKQRGWLTSAGKDIKNKEEILALLEAIHLPRRVAIIHCPGHQRGSNPVATGNRRADEAAKQAALSTRVLAGTTKPAGKRTADGSEFEKRTADGSEFESPKKKAKVE

SEQ ID NO: 1462 - protein, 2088 aa, synthetic construct
MPAAKRVKLDGGDKKYSIGLDIGTNSVGWAVITDEYKVPSKKFKVLGNTDRHSIKKNLIGALLFDSGETAEATRLKRTARRRYTRRKNRICYLQEIFSNEMAKVDDSFFHRLEESFLVEEDKKHERHPIFGNIVDEVAYHEKYPTIYHLRKKLVDSTDKADLRLIYLALAHMIKFRGHFLIEGDLNPDNSDVDKLFIQLVQTYNQLFEENPINASGVDAKAILSARLSKSRRLENLIAQLPGEKKNGLFGNLIALSLGLTPNFKSNFDLAEDAKLQLSKDTYDDDLDNLLAQIGDQYADLFLAAKNLSDAILLSDILRVNTEITKAPLSASMIKRYDEHHQDLTLLKALVRQQLPEKYKEIFFDQSKNGYAGYIDGGASQEEFYKFIKPILEKMDGTEELLVKLNREDLLRKQRTFDNGSIPHQIHLGELHAILRRQEDFYPFLKDNREKIEKILTFRIPYYVGPLARGNSRFAWMTRKSEETITPWNFEEVVDKGASAQSFIERMTNFDKNLPNEKVLPKHSLLYEYFTVYNELTKVKYVTEGMRKPAFLSGEQKKAIVDLLFKTNRKVTVKQLKEDYFKKIECFDSVEISGVEDRFNASLGTYHDLLKIIKDKDFLDNEENEDILEDIVLTLTLFEDREMIEERLKTYAHLFDDKVMKQLKRRRYTGWGRLSRKLINGIRDKQSGKTILDFLKSDGFANRNFMQLIHDDSLTFKEDIQKAQVSGQGDSLHEHIANLAGSPAIKKGILQTVKVVDELVKVMGRHKPENIVIEMARENQTTQKGQKNSRERMKRIEEGIKELGSQILKEHPVENTQLQNEKLYLYYLQNGRDMYVDQELDINRLSDYDVDHIVPQSFLKDDSIDNKVLTRSDKARGKSDNVPSEEVVKKMKNYWRQLLNAKLITQRKFDNLTKAERGGLSELDKAGFIKRQLVETRQITKHVAQILDSRMNTKYDENDKLIREVKVITLKSKLVSDFRKDFQFYKVREINNYHHAHDAYLNAVVGTALIKKYPKLESEFVYGDYKVYDVRKMIAKSEQEIGKATAKYFFYSNIMNFFKTEITLANGEIRKRPLIETNGETGEIVWDKGRDFATVRKVLSMPQVNIVKKTEVQTGGFSKESILPKRNSDKLIARKKDWDPKKYGGFDSPTVAYSVLVVAKVEKGKSKKLKSVKELLGITIMERSSFEKNPIDFLEAKGYKEVKKDLIIKLPKYSLFELENGRKRMLASAGELQKGNELALPSKYVNFLYLASHYEKLKGSPEDNEQKQLFVEQHKHYLDEIIEQISEFSKRVILADANLDKVLSAYNKHRDKPIREQAENIIHLFTLTNLGAPAAFKYFDTTIDRKRYTSTKEVLDATLIHQSITGLYETRIDLSQLGGDGGGGGGSGGVLNLEEEYRLHEKPVPSSIDPSWLQLFPTVWAERAGMGLANQVPPVVVELRSGASPVAVRQYPMSKEAREGIRPHIQKFLDLGVLVPCRSPWNTPLLPVKKPGTNDYRPVQDLREINKRVQDIHPTVPNPYNLLSSLPPSYTWYSVLDLKDAFFCLRLHPNSQPLFAFEWKDPEKGNTGQLTWTRLPQGFKNSPTLFNEALHRDLAPFRALNPQVVLLQYVDDLLVAAPTYEDCKKGTQKLLQELSKLGYRVSAKKAQLCQREVTYLGYLLKEGKRWLTPARKATVMKIPVPTTPRQVREFLGKAGFCRLFIPGFASLAAPLYPLTKPSIPFIWTEEHQQAFDHIKKALLSAPALALPDLTKPFTLYIDERAGVARGVLTQTLGPWRRPVAYLSKKLDPVASGWPTCLKAVAAVALLLKDADKLTLGQNVTVIASHSLESIVRQPPDRWMTNARMTHYQSLLLNERVSFAPPAVLNPATLLPVESEATPVHRCSEILAEETGTRRDLEDQPLPGVPTWYTDGSSFITEGKRRAGAPIVDGKRTVWASSLPEGTSAQKAELVALTQALRLAEGKNINIYTDSRYAFATAHIHGAIYKQRGWLTSAGKDIKNKEEILALLEAIHLPRRVAIIHCPGHQRGSNPVATGNRRADEAAKQAALSTRVLAGTTKPAGKRTADGSEFEKRTADGSEFESPKKKAKVE

SEQ ID NO: 1463 - protein, 2094 aa, synthetic construct
MPAAKRVKLDGGDKKYSIGLDIGTNSVGWAVITDEYKVPSKKFKVLGNTDRHSIKKNLIGALLFDSGETAEATRLKRTARRRYTRRKNRICYLQEIFSNEMAKVDDSFFHRLEESFLVEEDKKHERHPIFGNIVDEVAYHEKYPTIYHLRKKLVDSTDKADLRLIYLALAHMIKFRGHFLIEGDLNPDNSDVDKLFIQLVQTYNQLFEENPINASGVDAKAILSARLSKSRRLENLIAQLPGEKKNGLFGNLIALSLGLTPNFKSNFDLAEDAKLQLSKDTYDDDLDNLLAQIGDQYADLFLAAKNLSDAILLSDILRVNTEITKAPLSASMIKRYDEHHQDLTLLKALVRQQLPEKYKEIFFDQSKNGYAGYIDGGASQEEFYKFIKPILEKMDGTEELLVKLNREDLLRKQRTFDNGSIPHQIHLGELHAILRRQEDFYPFLKDNREKIEKILTFRIPYYVGPLARGNSRFAWMTRKSEETITPWNFEEVVDKGASAQSFIERMTNFDKNLPNEKVLPKHSLLYEYFTVYNELTKVKYVTEGMRKPAFLSGEQKKAIVDLLFKTNRKVTVKQLKEDYFKKIECFDSVEISGVEDRFNASLGTYHDLLKIIKDKDFLDNEENEDILEDIVLTLTLFEDREMIEERLKTYAHLFDDKVMKQLKRRRYTGWGRLSRKLINGIRDKQSGKTILDFLKSDGFANRNFMQLIHDDSLTFKEDIQKAQVSGQGDSLHEHIANLAGSPAIKKGILQTVKVVDELVKVMGRHKPENIVIEMARENQTTQKGQKNSRERMKRIEEGIKELGSQILKEHPVENTQLQNEKLYLYYLQNGRDMYVDQELDINRLSDYDVDHIVPQSFLKDDSIDNKVLTRSDKARGKSDNVPSEEVVKKMKNYWRQLLNAKLITQRKFDNLTKAERGGLSELDKAGFIKRQLVETRQITKHVAQILDSRMNTKYDENDKLIREVKVITLKSKLVSDFRKDFQFYKVREINNYHHAHDAYLNAVVGTALIKKYPKLESEFVYGDYKVYDVRKMIAKSEQEIGKATAKYFFYSNIMNFFKTEITLANGEIRKRPLIETNGETGEIVWDKGRDFATVRKVLSMPQVNIVKKTEVQTGGFSKESILPKRNSDKLIARKKDWDPKKYGGFDSPTVAYSVLVVAKVEKGKSKKLKSVKELLGITIMERSSFEKNPIDFLEAKGYKEVKKDLIIKLPKYSLFELENGRKRMLASAGELQKGNELALPSKYVNFLYLASHYEKLKGSPEDNEQKQLFVEQHKHYLDEIIEQISEFSKRVILADANLDKVLSAYNKHRDKPIREQAENIIHLFTLTNLGAPAAFKYFDTTIDRKRYTSTKEVLDATLIHQSITGLYETRIDLSQLGGDGGGGSEAAAKGGGGGVLNLEEEYRLHEKPVPSSIDPSWLQLFPTVWAERAGMGLANQVPPVVVELRSGASPVAVRQYPMSKEAREGIRPHIQKFLDLGVLVPCRSPWNTPLLPVKKPGTNDYRPVQDLREINKRVQDIHPTVPNPYNLLSSLPPSYTWYSVLDLKDAFFCLRLHPNSQPLFAFEWKDPEKGNTGQLTWTRLPQGFKNSPTLFNEALHRDLAPFRALNPQVVLLQYVDDLLVAAPTYEDCKKGTQKLLQELSKLGYRVSAKKAQLCQREVTYLGYLLKEGKRWLTPARKATVMKIPVPTTPRQVREFLGKAGFCRLFIPGFASLAAPLYPLTKPSIPFIWTEEHQQAFDHIKKALLSAPALALPDLTKPFTLYIDERAGVARGVLTQTLGPWRRPVAYLSKKLDPVASGWPTCLKAVAAVALLLKDADKLTLGQNVTVIASHSLESIVRQPPDRWMTNARMTHYQSLLLNERVSFAPPAVLNPATLLPVESEATPVHRCSEILAEETGTRRDLEDQPLPGVPTWYTDGSSFITEGKRRAGAPIVDGKRTVWASSLPEGTSAQKAELVALTQALRLAEGKNINIYTDSRYAFATAHIHGAIYKQRGWLTSAGKDIKNKEEILALLEAIHLPRRVAIIHCPGHQRGSNPVATGNRRADEAAKQAALSTRVLAGTTKPAGKRTADGSEFEKRTADGSEFESPKKKAKVE

SEQ ID NO: 1464 - protein, 2086 aa, synthetic construct
MPAAKRVKLDGGDKKYSIGLDIGTNSVGWAVITDEYKVPSKKFKVLGNTDRHSIKKNLIGALLFDSGETAEATRLKRTARRRYTRRKNRICYLQEIFSNEMAKVDDSFFHRLEESFLVEEDKKHERHPIFGNIVDEVAYHEKYPTIYHLRKKLVDSTDKADLRLIYLALAHMIKFRGHFLIEGDLNPDNSDVDKLFIQLVQTYNQLFEENPINASGVDAKAILSARLSKSRRLENLIAQLPGEKKNGLFGNLIALSLGLTPNFKSNFDLAEDAKLQLSKDTYDDDLDNLLAQIGDQYADLFLAAKNLSDAILLSDILRVNTEITKAPLSASMIKRYDEHHQDLTLLKALVRQQLPEKYKEIFFDQSKNGYAGYIDGGASQEEFYKFIKPILEKMDGTEELLVKLNREDLLRKQRTFDNGSIPHQIHLGELHAILRRQEDFYPFLKDNREKIEKILTFRIPYYVGPLARGNSRFAWMTRKSEETITPWNFEEVVDKGASAQSFIERMTNFDKNLPNEKVLPKHSLLYEYFTVYNELTKVKYVTEGMRKPAFLSGEQKKAIVDLLFKTNRKVTVKQLKEDYFKKIECFDSVEISGVEDRFNASLGTYHDLLKIIKDKDFLDNEENEDILEDIVLTLTLFEDREMIEERLKTYAHLFDDKVMKQLKRRRYTGWGRLSRKLINGIRDKQSGKTILDFLKSDGFANRNFMQLIHDDSLTFKEDIQKAQVSGQGDSLHEHIANLAGSPAIKKGILQTVKVVDELVKVMGRHKPENIVIEMARENQTTQKGQKNSRERMKRIEEGIKELGSQILKEHPVENTQLQNEKLYLYYLQNGRDMYVDQELDINRLSDYDVDHIVPQSFLKDDSIDNKVLTRSDKARGKSDNVPSEEVVKKMKNYWRQLLNAKLITQRKFDNLTKAERGGLSELDKAGFIKRQLVETRQITKHVAQILDSRMNTKYDENDKLIREVKVITLKSKLVSDFRKDFQFYKVREINNYHHAHDAYLNAVVGTALIKKYPKLESEFVYGDYKVYDVRKMIAKSEQEIGKATAKYFFYSNIMNFFKTEITLANGEIRKRPLIETNGETGEIVWDKGRDFATVRKVLSMPQVNIVKKTEVQTGGFSKESILPKRNSDKLIARKKDWDPKKYGGFDSPTVAYSVLVVAKVEKGKSKKLKSVKELLGITIMERSSFEKNPIDFLEAKGYKEVKKDLIIKLPKYSLFELENGRKRMLASAGELQKGNELALPSKYVNFLYLASHYEKLKGSPEDNEQKQLFVEQHKHYLDEIIEQISEFSKRVILADANLDKVLSAYNKHRDKPIREQAENIIHLFTLTNLGAPAAFKYFDTTIDRKRYTSTKEVLDATLIHQSITGLYETRIDLSQLGGDGGGGSGGVLNLEEEYRLHEKPVPSSIDPSWLQLFPTVWAERAGMGLANQVPPVVVELRSGASPVAVRQYPMSKEAREGIRPHIQKFLDLGVLVPCRSPWNTPLLPVKKPGTNDYRPVQDLREINKRVQDIHPTVPNPYNLLSSLPPSYTWYSVLDLKDAFFCLRLHPNSQPLFAFEWKDPEKGNTGQLTWTRLPQGFKNSPTLFNEALHRDLAPFRALNPQVVLLQYVDDLLVAAPTYEDCKKGTQKLLQELSKLGYRVSAKKAQLCQREVTYLGYLLKEGKRWLTPARKATVMKIPVPTTPRQVREFLGKAGFCRLFIPGFASLAAPLYPLTKPSIPFIWTEEHQQAFDHIKKALLSAPALALPDLTKPFTLYIDERAGVARGVLTQTLGPWRRPVAYLSKKLDPVASGWPTCLKAVAAVALLLKDADKLTLGQNVTVIASHSLESIVRQPPDRWMTNARMTHYQSLLLNERVSFAPPAVLNPATLLPVESEATPVHRCSEILAEETGTRRDLEDQPLPGVPTWYTDGSSFITEGKRRAGAPIVDGKRTVWASSLPEGTSAQKAELVALTQALRLAEGKNINIYTDSRYAFATAHIHGAIYKQRGWLTSAGKDIKNKEEILALLEAIHLPRRVAIIHCPGHQRGSNPVATGNRRADEAAKQAALSTRVLAGTTKPAGKRTADGSEFEKRTADGSEFESPKKKAKVE

SEQ ID NO: 1465 - protein, 2091 aa, synthetic construct
MPAAKRVKLDGGDKKYSIGLDIGTNSVGWAVITDEYKVPSKKFKVLGNTDRHSIKKNLIGALLFDSGETAEATRLKRTARRRYTRRKNRICYLQEIFSNEMAKVDDSFFHRLEESFLVEEDKKHERHPIFGNIVDEVAYHEKYPTIYHLRKKLVDSTDKADLRLIYLALAHMIKFRGHFLIEGDLNPDNSDVDKLFIQLVQTYNQLFEENPINASGVDAKAILSARLSKSRRLENLIAQLPGEKKNGLFGNLIALSLGLTPNFKSNFDLAEDAKLQLSKDTYDDDLDNLLAQIGDQYADLFLAAKNLSDAILLSDILRVNTEITKAPLSASMIKRYDEHHQDLTLLKALVRQQLPEKYKEIFFDQSKNGYAGYIDGGASQEEFYKFIKPILEKMDGTEELLVKLNREDLLRKQRTFDNGSIPHQIHLGELHAILRRQEDFYPFLKDNREKIEKILTFRIPYYVGPLARGNSRFAWMTRKSEETITPWNFEEVVDKGASAQSFIERMTNFDKNLPNEKVLPKHSLLYEYFTVYNELTKVKYVTEGMRKPAFLSGEQKKAIVDLLFKTNRKVTVKQLKEDYFKKIECFDSVEISGVEDRFNASLGTYHDLLKIIKDKDFLDNEENEDILEDIVLTLTLFEDREMIEERLKTYAHLFDDKVMKQLKRRRYTGWGRLSRKLINGIRDKQSGKTILDFLKSDGFANRNFMQLIHDDSLTFKEDIQKAQVSGQGDSLHEHIANLAGSPAIKKGILQTVKVVDELVKVMGRHKPENIVIEMARENQTTQKGQKNSRERMKRIEEGIKELGSQILKEHPVENTQLQNEKLYLYYLQNGRDMYVDQELDINRLSDYDVDHIVPQSFLKDDSIDNKVLTRSDKARGKSDNVPSEEVVKKMKNYWRQLLNAKLITQRKFDNLTKAERGGLSELDKAGFIKRQLVETRQITKHVAQILDSRMNTKYDENDKLIREVKVITLKSKLVSDFRKDFQFYKVREINNYHHAHDAYLNAVVGTALIKKYPKLESEFVYGDYKVYDVRKMIAKSEQEIGKATAKYFFYSNIMNFFKTEITLANGEIRKRPLIETNGETGEIVWDKGRDFATVRKVLSMPQVNIVKKTEVQTGGFSKESILPKRNSDKLIARKKDWDPKKYGGFDSPTVAYSVLVVAKVEKGKSKKLKSVKELLGITIMERSSFEKNPIDFLEAKGYKEVKKDLIIKLPKYSLFELENGRKRMLASAGELQKGNELALPSKYVNFLYLASHYEKLKGSPEDNEQKQLFVEQHKHYLDEIIEQISEFSKRVILADANLDKVLSAYNKHRDKPIREQAENIIHLFTLTNLGAPAAFKYFDTTIDRKRYTSTKEVLDATLIHQSITGLYETRIDLSQLGGDGGGGGGGGGGGGVLNLEEEYRLHEKPVPSSIDPSWLQLFPTVWAERAGMGLANQVPPVVVELRSGASPVAVRQYPMSKEAREGIRPHIQKFLDLGVLVPCRSPWNTPLLPVKKPGTNDYRPVQDLREINKRVQDIHPTVPNPYNLLSSLPPSYTWYSVLDLKDAFFCLRLHPNSQPLFAFEWKDPEKGNTGQLTWTRLPQGFKNSPTLFNEALHRDLAPFRALNPQVVLLQYVDDLLVAAPTYEDCKKGTQKLLQELSKLGYRVSAKKAQLCQREVTYLGYLLKEGKRWLTPARKATVMKIPVPTTPRQVREFLGKAGFCRLFIPGFASLAAPLYPLTKPSIPFIWTEEHQQAFDHIKKALLSAPALALPDLTKPFTLYIDERAGVARGVLTQTLGPWRRPVAYLSKKLDPVASGWPTCLKAVAAVALLLKDADKLTLGQNVTVIASHSLESIVRQPPDRWMTNARMTHYQSLLLNERVSFAPPAVLNPATLLPVESEATPVHRCSEILAEETGTRRDLEDQPLPGVPTWYTDGSSFITEGKRRAGAPIVDGKRTVWASSLPEGTSAQKAELVALTQALRLAEGKNINIYTDSRYAFATAHIHGAIYKQRGWLTSAGKDIKNKEEILALLEAIHLPRRVAIIHCPGHQRGSNPVATGNRRADEAAKQAALSTRVLAGTTKPAGKRTADGSEFEKRTADGSEFESPKKKAKVE

SEQ ID NO: 1466 - protein, 2094 aa, synthetic construct
MPAAKRVKLDGGDKKYSIGLDIGTNSVGWAVITDEYKVPSKKFKVLGNTDRHSIKKNLIGALLFDSGETAEATRLKRTARRRYTRRKNRICYLQEIFSNEMAKVDDSFFHRLEESFLVEEDKKHERHPIFGNIVDEVAYHEKYPTIYHLRKKLVDSTDKADLRLIYLALAHMIKFRGHFLIEGDLNPDNSDVDKLFIQLVQTYNQLFEENPINASGVDAKAILSARLSKSRRLENLIAQLPGEKKNGLFGNLIALSLGLTPNFKSNFDLAEDAKLQLSKDTYDDDLDNLLAQIGDQYADLFLAAKNLSDAILLSDILRVNTEITKAPLSASMIKRYDEHHQDLTLLKALVRQQLPEKYKEIFFDQSKNGYAGYIDGGASQEEFYKFIKPILEKMDGTEELLVKLNREDLLRKQRTFDNGSIPHQIHLGELHAILRRQEDFYPFLKDNREKIEKILTFRIPYYVGPLARGNSRFAWMTRKSEETITPWNFEEVVDKGASAQSFIERMTNFDKNLPNEKVLPKHSLLYEYFTVYNELTKVKYVTEGMRKPAFLSGEQKKAIVDLLFKTNRKVTVKQLKEDYFKKIECFDSVEISGVEDRFNASLGTYHDLLKIIKDKDFLDNEENEDILEDIVLTLTLFEDREMIEERLKTYAHLFDDKVMKQLKRRRYTGWGRLSRKLINGIRDKQSGKTILDFLKSDGFANRNFMQLIHDDSLTFKEDIQKAQVSGQGDSLHEHIANLAGSPAIKKGILQTVKVVDELVKVMGRHKPENIVIEMARENQTTQKGQKNSRERMKRIEEGIKELGSQILKEHPVENTQLQNEKLYLYYLQNGRDMYVDQELDINRLSDYDVDHIVPQSFLKDDSIDNKVLTRSDKARGKSDNVPSEEVVKKMKNYWRQLLNAKLITQRKFDNLTKAERGGLSELDKAGFIKRQLVETRQITKHVAQILDSRMNTKYDENDKLIREVKVITLKSKLVSDFRKDFQFYKVREINNYHHAHDAYLNAVVGTALIKKYPKLESEFVYGDYKVYDVRKMIAKSEQEIGKATAKYFFYSNIMNFFKTEITLANGEIRKRPLIETNGETGEIVWDKGRDFATVRKVLSMPQVNIVKKTEVQTGGFSKESILPKRNSDKLIARKKDWDPKKYGGFDSPTVAYSVLVVAKVEKGKSKKLKSVKELLGITIMERSSFEKNPIDFLEAKGYKEVKKDLIIKLPKYSLFELENGRKRMLASAGELQKGNELALPSKYVNFLYLASHYEKLKGSPEDNEQKQLFVEQHKHYLDEIIEQISEFSKRVILADANLDKVLSAYNKHRDKPIREQAENIIHLFTLTNLGAPAAFKYFDTTIDRKRYTSTKEVLDATLIHQSITGLYETRIDLSQLGGDGGGSSGGGEAAAKGGVLNLEEEYRLHEKPVPSSIDPSWLQLFPTVWAERAGMGLANQVPPVVVELRSGASPVAVRQYPMSKEAREGIRPHIQKFLDLGVLVPCRSPWNTPLLPVKKPGTNDYRPVQDLREINKRVQDIHPTVPNPYNLLSSLPPSYTWYSVLDLKDAFFCLRLHPNSQPLFAFEWKDPEKGNTGQLTWTRLPQGFKNSPTLFNEALHRDLAPFRALNPQVVLLQYVDDLLVAAPTYEDCKKGTQKLLQELSKLGYRVSAKKAQLCQREVTYLGYLLKEGKRWLTPARKATVMKIPVPTTPRQVREFLGKAGFCRLFIPGFASLAAPLYPLTKPSIPFIWTEEHQQAFDHIKKALLSAPALALPDLTKPFTLYIDERAGVARGVLTQTLGPWRRPVAYLSKKLDPVASGWPTCLKAVAAVALLLKDADKLTLGQNVTVIASHSLESIVRQPPDRWMTNARMTHYQSLLLNERVSFAPPAVLNPATLLPVESEATPVHRCSEILAEETGTRRDLEDQPLPGVPTWYTDGSSFITEGKRRAGAPIVDGKRTVWASSLPEGTSAQKAELVALTQALRLAEGKNINIYTDSRYAFATAHIHGAIYKQRGWLTSAGKDIKNKEEILALLEAIHLPRRVAIIHCPGHQRGSNPVATGNRRADEAAKQAALSTRVLAGTTKPAGKRTADGSEFEKRTADGSEFESPKKKAKVE

SEQ ID NO: 1467 - protein, 2094 aa, synthetic construct
MPAAKRVKLDGGDKKYSIGLDIGTNSVGWAVITDEYKVPSKKFKVLGNTDRHSIKKNLIGALLFDSGETAEATRLKRTARRRYTRRKNRICYLQEIFSNEMAKVDDSFFHRLEESFLVEEDKKHERHPIFGNIVDEVAYHEKYPTIYHLRKKLVDSTDKADLRLIYLALAHMIKFRGHFLIEGDLNPDNSDVDKLFIQLVQTYNQLFEENPINASGVDAKAILSARLSKSRRLENLIAQLPGEKKNGLFGNLIALSLGLTPNFKSNFDLAEDAKLQLSKDTYDDDLDNLLAQIGDQYADLFLAAKNLSDAILLSDILRVNTEITKAPLSASMIKRYDEHHQDLTLLKALVRQQLPEKYKEIFFDQSKNGYAGYIDGGASQEEFYKFIKPILEKMDGTEELLVKLNREDLLRKQRTFDNGSIPHQIHLGELHAILRRQEDFYPFLKDNREKIEKILTFRIPYYVGPLARGNSRFAWMTRKSEETITPWNFEEVVDKGASAQSFIERMTNFDKNLPNEKVLPKHSLLYEYFTVYNELTKVKYVTEGMRKPAFLSGEQKKAIVDLLFKTNRKVTVKQLKEDYFKKIECFDSVEISGVEDRFNASLGTYHDLLKIIKDKDFLDNEENEDILEDIVLTLTLFEDREMIEERLKTYAHLFDDKVMKQLKRRRYTGWGRLSRKLINGIRDKQSGKTILDFLKSDGFANRNFMQLIHDDSLTFKEDIQKAQVSGQGDSLHEHIANLAGSPAIKKGILQTVKVVDELVKVMGRHKPENIVIEMARENQTTQKGQKNSRERMKRIEEGIKELGSQILKEHPVENTQLQNEKLYLYYLQNGRDMYVDQELDINRLSDYDVDHIVPQSFLKDDSIDNKVLTRSDKARGKSDNVPSEEVVKKMKNYWRQLLNAKLITQRKFDNLTKAERGGLSELDKAGFIKRQLVETRQITKHVAQILDSRMNTKYDENDKLIREVKVITLKSKLVSDFRKDFQFYKVREINNYHHAHDAYLNAVVGTALIKKYPKLESEFVYGDYKVYDVRKMIAKSEQEIGKATAKYFFYSNIMNFFKTEITLANGEIRKRPLIETNGETGEIVWDKGRDFATVRKVLSMPQVNIVKKTEVQTGGFSKESILPKRNSDKLIARKKDWDPKKYGGFDSPTVAYSVLVVAKVEKGKSKKLKSVKELLGITIMERSSFEKNPIDFLEAKGYKEVKKDLIIKLPKYSLFELENGRKRMLASAGELQKGNELALPSKYVNFLYLASHYEKLKGSPEDNEQKQLFVEQHKHYLDEIIEQISEFSKRVILADANLDKVLSAYNKHRDKPIREQAENIIHLFTLTNLGAPAAFKYFDTTIDRKRYTSTKEVLDATLIHQSITGLYETRIDLSQLGGDGGEAAAKGSSPAPGGVLNLEEEYRLHEKPVPSSIDPSWLQLFPTVWAERAGMGLANQVPPVVVELRSGASPVAVRQYPMSKEAREGIRPHIQKFLDLGVLVPCRSPWNTPLLPVKKPGTNDYRPVQDLREINKRVQDIHPTVPNPYNLLSSLPPSYTWYSVLDLKDAFFCLRLHPNSQPLFAFEWKDPEKGNTGQLTWTRLPQGFKNSPTLFNEALHRDLAPFRALNPQVVLLQYVDDLLVAAPTYEDCKKGTQKLLQELSKLGYRVSAKKAQLCQREVTYLGYLLKEGKRWLTPARKATVMKIPVPTTPRQVREFLGKAGFCRLFIPGFASLAAPLYPLTKPSIPFIWTEEHQQAFDHIKKALLSAPALALPDLTKPFTLYIDERAGVARGVLTQTLGPWRRPVAYLSKKLDPVASGWPTCLKAVAAVALLLKDADKLTLGQNVTVIASHSLESIVRQPPDRWMTNARMTHYQSLLLNERVSFAPPAVLNPATLLPVESEATPVHRCSEILAEETGTRRDLEDQPLPGVPTWYTDGSSFITEGKRRAGAPIVDGKRTVWASSLPEGTSAQKAELVALTQALRLAEGKNINIYTDSRYAFATAHIHGAIYKQRGWLTSAGKDIKNKEEILALLEAIHLPRRVAIIHCPGHQRGSNPVATGNRRADEAAKQAALSTRVLAGTTKPAGKRTADGSEFEKRTADGSEFESPKKKAKVE

SEQ ID NO: 1468 - protein, 2094 aa, synthetic construct
MPAAKRVKLDGGDKKYSIGLDIGTNSVGWAVITDEYKVPSKKFKVLGNTDRHSIKKNLIGALLFDSGETAEATRLKRTARRRYTRRKNRICYLQEIFSNEMAKVDDSFFHRLEESFLVEEDKKHERHPIFGNIVDEVAYHEKYPTIYHLRKKLVDSTDKADLRLIYLALAHMIKFRGHFLIEGDLNPDNSDVDKLFIQLVQTYNQLFEENPINASGVDAKAILSARLSKSRRLENLIAQLPGEKKNGLFGNLIALSLGLTPNFKSNFDLAEDAKLQLSKDTYDDDLDNLLAQIGDQYADLFLAAKNLSDAILLSDILRVNTEITKAPLSASMIKRYDEHHQDLTLLKALVRQQLPEKYKEIFFDQSKNGYAGYIDGGASQEEFYKFIKPILEKMDGTEELLVKLNREDLLRKQRTFDNGSIPHQIHLGELHAILRRQEDFYPFLKDNREKIEKILTFRIPYYVGPLARGNSRFAWMTRKSEETITPWNFEEVVDKGASAQSFIERMTNFDKNLPNEKVLPKHSLLYEYFTVYNELTKVKYVTEGMRKPAFLSGEQKKAIVDLLFKTNRKVTVKQLKEDYFKKIECFDSVEISGVEDRFNASLGTYHDLLKIIKDKDFLDNEENEDILEDIVLTLTLFEDREMIEERLKTYAHLFDDKVMKQLKRRRYTGWGRLSRKLINGIRDKQSGKTILDFLKSDGFANRNFMQLIHDDSLTFKEDIQKAQVSGQGDSLHEHIANLAGSPAIKKGILQTVKVVDELVKVMGRHKPENIVIEMARENQTTQKGQKNSRERMKRIEEGIKELGSQILKEHPVENTQLQNEKLYLYYLQNGRDMYVDQELDINRLSDYDVDHIVPQSFLKDDSIDNKVLTRSDKARGKSDNVPSEEVVKKMKNYWRQLLNAKLITQRKFDNLTKAERGGLSELDKAGFIKRQLVETRQITKHVAQILDSRMNTKYDENDKLIREVKVITLKSKLVSDFRKDFQFYKVREINNYHHAHDAYLNAVVGTALIKKYPKLESEFVYGDYKVYDVRKMIAKSEQEIGKATAKYFFYSNIMNFFKTEITLANGEIRKRPLIETNGETGEIVWDKGRDFATVRKVLSMPQVNIVKKTEVQTGGFSKESILPKRNSDKLIARKKDWDPKKYGGFDSPTVAYSVLVVAKVEKGKSKKLKSVKELLGITIMERSSFEKNPIDFLEAKGYKEVKKDLIIKLPKYSLFELENGRKRMLASAGELQKGNELALPSKYVNFLYLASHYEKLKGSPEDNEQKQLFVEQHKHYLDEIIEQISEFSKRVILADANLDKVLSAYNKHRDKPIREQAENIIHLFTLTNLGAPAAFKYFDTTIDRKRYTSTKEVLDATLIHQSITGLYETRIDLSQLGGDGGGGSEAAAKPAPGGVLNLEEEYRLHEKPVPSSIDPSWLQLFPTVWAERAGMGLANQVPPVVVELRSGASPVAVRQYPMSKEAREGIRPHIQKFLDLGVLVPCRSPWNTPLLPVKKPGTNDYRPVQDLREINKRVQDIHPTVPNPYNLLSSLPPSYTWYSVLDLKDAFFCLRLHPNSQPLFAFEWKDPEKGNTGQLTWTRLPQGFKNSPTLFNEALHRDLAPFRALNPQVVLLQYVDDLLVAAPTYEDCKKGTQKLLQELSKLGYRVSAKKAQLCQREVTYLGYLLKEGKRWLTPARKATVMKIPVPTTPRQVREFLGKAGFCRLFIPGFASLAAPLYPLTKPSIPFIWTEEHQQAFDHIKKALLSAPALALPDLTKPFTLYIDERAGVARGVLTQTLGPWRRPVAYLSKKLDPVASGWPTCLKAVAAVALLLKDADKLTLGQNVTVIASHSLESIVRQPPDRWMTNARMTHYQSLLLNERVSFAPPAVLNPATLLPVESEATPVHRCSEILAEETGTRRDLEDQPLPGVPTWYTDGSSFITEGKRRAGAPIVDGKRTVWASSLPEGTSAQKAELVALTQALRLAEGKNINIYTDSRYAFATAHIHGAIYKQRGWLTSAGKDIKNKEEILALLEAIHLPRRVAIIHCPGHQRGSNPVATGNRRADEAAKQAALSTRVLAGTTKPAGKRTADGSEFEKRTADGSEFESPKKKAKVE

SEQ ID NO: 1469 - protein, 2094 aa, synthetic construct
MPAAKRVKLDGGDKKYSIGLDIGTNSVGWAVITDEYKVPSKKFKVLGNTDRHSIKKNLIGALLFDSGETAEATRLKRTARRRYTRRKNRICYLQEIFSNEMAKVDDSFFHRLEESFLVEEDKKHERHPIFGNIVDEVAYHEKYPTIYHLRKKLVDSTDKADLRLIYLALAHMIKFRGHFLIEGDLNPDNSDVDKLFIQLVQTYNQLFEENPINASGVDAKAILSARLSKSRRLENLIAQLPGEKKNGLFGNLIALSLGLTPNFKSNFDLAEDAKLQLSKDTYDDDLDNLLAQIGDQYADLFLAAKNLSDAILLSDILRVNTEITKAPLSASMIKRYDEHHQDLTLLKALVRQQLPEKYKEIFFDQSKNGYAGYIDGGASQEEFYKFIKPILEKMDGTEELLVKLNREDLLRKQRTFDNGSIPHQIHLGELHAILRRQEDFYPFLKDNREKIEKILTFRIPYYVGPLARGNSRFAWMTRKSEETITPWNFEEVVDKGASAQSFIERMTNFDKNLPNEKVLPKHSLLYEYFTVYNELTKVKYVTEGMRKPAFLSGEQKKAIVDLLFKTNRKVTVKQLKEDYFKKIECFDSVEISGVEDRFNASLGTYHDLLKIIKDKDFLDNEENEDILEDIVLTLTLFEDREMIEERLKTYAHLFDDKVMKQLKRRRYTGWGRLSRKLINGIRDKQSGKTILDFLKSDGFANRNFMQLIHDDSLTFKEDIQKAQVSGQGDSLHEHIANLAGSPAIKKGILQTVKVVDELVKVMGRHKPENIVIEMARENQTTQKGQKNSRERMKRIEEGIKELGSQILKEHPVENTQLQNEKLYLYYLQNGRDMYVDQELDINRLSDYDVDHIVPQSFLKDDSIDNKVLTRSDKARGKSDNVPSEEVVKKMKNYWRQLLNAKLITQRKFDNLTKAERGGLSELDKAGFIKRQLVETRQITKHVAQILDSRMNTKYDENDKLIREVKVITLKSKLVSDFRKDFQFYKVREINNYHHAHDAYLNAVVGTALIKKYPKLESEFVYGDYKVYDVRKMIAKSEQEIGKATAKYFFYSNIMNFFKTEITLANGEIRKRPLIETNGETGEIVWDKGRDFATVRKVLSMPQVNIVKKTEVQTGGFSKESILPKRNSDKLIARKKDWDPKKYGGFDSPTVAYSVLVVAKVEKGKSKKLKSVKELLGITIMERSSFEKNPIDFLEAKGYKEVKKDLIIKLPKYSLFELENGRKRMLASAGELQKGNELALPSKYVNFLYLASHYEKLKGSPEDNEQKQLFVEQHKHYLDEIIEQISEFSKRVILADANLDKVLSAYNKHRDKPIREQAENIIHLFTLTNLGAPAAFKYFDTTIDRKRYTSTKEVLDATLIHQSITGLYETRIDLSQLGGDGGEAAAKPAPGGSGGVLNLEEEYRLHEKPVPSSIDPSWLQLFPTVWAERAGMGLANQVPPVVVELRSGASPVAVRQYPMSKEAREGIRPHIQKFLDLGVLVPCRSPWNTPLLPVKKPGTNDYRPVQDLREINKRVQDIHPTVPNPYNLLSSLPPSYTWYSVLDLKDAFFCLRLHPNSQPLFAFEWKDPEKGNTGQLTWTRLPQGFKNSPTLFNEALHRDLAPFRALNPQVVLLQYVDDLLVAAPTYEDCKKGTQKLLQELSKLGYRVSAKKAQLCQREVTYLGYLLKEGKRWLTPARKATVMKIPVPTTPRQVREFLGKAGFCRLFIPGFASLAAPLYPLTKPSIPFIWTEEHQQAFDHIKKALLSAPALALPDLTKPFTLYIDERAGVARGVLTQTLGPWRRPVAYLSKKLDPVASGWPTCLKAVAAVALLLKDADKLTLGQNVTVIASHSLESIVRQPPDRWMTNARMTHYQSLLLNERVSFAPPAVLNPATLLPVESEATPVHRCSEILAEETGTRRDLEDQPLPGVPTWYTDGSSFITEGKRRAGAPIVDGKRTVWASSLPEGTSAQKAELVALTQALRLAEGKNINIYTDSRYAFATAHIHGAIYKQRGWLTSAGKDIKNKEEILALLEAIHLPRRVAIIHCPGHQRGSNPVATGNRRADEAAKQAALSTRVLAGTTKPAGKRTADGSEFEKRTADGSEFESPKKKAKVE

SEQ ID NO: 1470 - protein, 2089 aa, synthetic construct
MPAAKRVKLDGGDKKYSIGLDIGTNSVGWAVITDEYKVPSKKFKVLGNTDRHSIKKNLIGALLFDSGETAEATRLKRTARRRYTRRKNRICYLQEIFSNEMAKVDDSFFHRLEESFLVEEDKKHERHPIFGNIVDEVAYHEKYPTIYHLRKKLVDSTDKADLRLIYLALAHMIKFRGHFLIEGDLNPDNSDVDKLFIQLVQTYNQLFEENPINASGVDAKAILSARLSKSRRLENLIAQLPGEKKNGLFGNLIALSLGLTPNFKSNFDLAEDAKLQLSKDTYDDDLDNLLAQIGDQYADLFLAAKNLSDAILLSDILRVNTEITKAPLSASMIKRYDEHHQDLTLLKALVRQQLPEKYKEIFFDQSKNGYAGYIDGGASQEEFYKFIKPILEKMDGTEELLVKLNREDLLRKQRTFDNGSIPHQIHLGELHAILRRQEDFYPFLKDNREKIEKILTFRIPYYVGPLARGNSRFAWMTRKSEETITPWNFEEVVDKGASAQSFIERMTNFDKNLPNEKVLPKHSLLYEYFTVYNELTKVKYVTEGMRKPAFLSGEQKKAIVDLLFKTNRKVTVKQLKEDYFKKIECFDSVEISGVEDRFNASLGTYHDLLKIIKDKDFLDNEENEDILEDIVLTLTLFEDREMIEERLKTYAHLFDDKVMKQLKRRRYTGWGRLSRKLINGIRDKQSGKTILDFLKSDGFANRNFMQLIHDDSLTFKEDIQKAQVSGQGDSLHEHIANLAGSPAIKKGILQTVKVVDELVKVMGRHKPENIVIEMARENQTTQKGQKNSRERMKRIEEGIKELGSQILKEHPVENTQLQNEKLYLYYLQNGRDMYVDQELDINRLSDYDVDHIVPQSFLKDDSIDNKVLTRSDKARGKSDNVPSEEVVKKMKNYWRQLLNAKLITQRKFDNLTKAERGGLSELDKAGFIKRQLVETRQITKHVAQILDSRMNTKYDENDKLIREVKVITLKSKLVSDFRKDFQFYKVREINNYHHAHDAYLNAVVGTALIKKYPKLESEFVYGDYKVYDVRKMIAKSEQEIGKATAKYFFYSNIMNFFKTEITLANGEIRKRPLIETNGETGEIVWDKGRDFATVRKVLSMPQVNIVKKTEVQTGGFSKESILPKRNSDKLIARKKDWDPKKYGGFDSPTVAYSVLVVAKVEKGKSKKLKSVKELLGITIMERSSFEKNPIDFLEAKGYKEVKKDLIIKLPKYSLFELENGRKRMLASAGELQKGNELALPSKYVNFLYLASHYEKLKGSPEDNEQKQLFVEQHKHYLDEIIEQISEFSKRVILADANLDKVLSAYNKHRDKPIREQAENIIHLFTLTNLGAPAAFKYFDTTIDRKRYTSTKEVLDATLIHQSITGLYETRIDLSQLGGDGGGGSPAPGGVLNLEEEYRLHEKPVPSSIDPSWLQLFPTVWAERAGMGLANQVPPVVVELRSGASPVAVRQYPMSKEAREGIRPHIQKFLDLGVLVPCRSPWNTPLLPVKKPGTNDYRPVQDLREINKRVQDIHPTVPNPYNLLSSLPPSYTWYSVLDLKDAFFCLRLHPNSQPLFAFEWKDPEKGNTGQLTWTRLPQGFKNSPTLFNEALHRDLAPFRALNPQVVLLQYVDDLLVAAPTYEDCKKGTQKLLQELSKLGYRVSAKKAQLCQREVTYLGYLLKEGKRWLTPARKATVMKIPVPTTPRQVREFLGKAGFCRLFIPGFASLAAPLYPLTKPSIPFIWTEEHQQAFDHIKKALLSAPALALPDLTKPFTLYIDERAGVARGVLTQTLGPWRRPVAYLSKKLDPVASGWPTCLKAVAAVALLLKDADKLTLGQNVTVIASHSLESIVRQPPDRWMTNARMTHYQSLLLNERVSFAPPAVLNPATLLPVESEATPVHRCSEILAEETGTRRDLEDQPLPGVPTWYTDGSSFITEGKRRAGAPIVDGKRTVWASSLPEGTSAQKAELVALTQALRLAEGKNINIYTDSRYAFATAHIHGAIYKQRGWLTSAGKDIKNKEEILALLEAIHLPRRVAIIHCPGHQRGSNPVATGNRRADEAAKQAALSTRVLAGTTKPAGKRTADGSEFEKRTADGSEFESPKKKAKVE

SEQ ID NO: 1471 - protein, 2092 aa, synthetic construct
MPAAKRVKLDGGDKKYSIGLDIGTNSVGWAVITDEYKVPSKKFKVLGNTDRHSIKKNLIGALLFDSGETAEATRLKRTARRRYTRRKNRICYLQEIFSNEMAKVDDSFFHRLEESFLVEEDKKHERHPIFGNIVDEVAYHEKYPTIYHLRKKLVDSTDKADLRLIYLALAHMIKFRGHFLIEGDLNPDNSDVDKLFIQLVQTYNQLFEENPINASGVDAKAILSARLSKSRRLENLIAQLPGEKKNGLFGNLIALSLGLTPNFKSNFDLAEDAKLQLSKDTYDDDLDNLLAQIGDQYADLFLAAKNLSDAILLSDILRVNTEITKAPLSASMIKRYDEHHQDLTLLKALVRQQLPEKYKEIFFDQSKNGYAGYIDGGASQEEFYKFIKPILEKMDGTEELLVKLNREDLLRKQRTFDNGSIPHQIHLGELHAILRRQEDFYPFLKDNREKIEKILTFRIPYYVGPLARGNSRFAWMTRKSEETITPWNFEEVVDKGASAQSFIERMTNFDKNLPNEKVLPKHSLLYEYFTVYNELTKVKYVTEGMRKPAFLSGEQKKAIVDLLFKTNRKVTVKQLKEDYFKKIECFDSVEISGVEDRFNASLGTYHDLLKIIKDKDFLDNEENEDILEDIVLTLTLFEDREMIEERLKTYAHLFDDKVMKQLKRRRYTGWGRLSRKLINGIRDKQSGKTILDFLKSDGFANRNFMQLIHDDSLTFKEDIQKAQVSGQGDSLHEHIANLAGSPAIKKGILQTVKVVDELVKVMGRHKPENIVIEMARENQTTQKGQKNSRERMKRIEEGIKELGSQILKEHPVENTQLQNEKLYLYYLQNGRDMYVDQELDINRLSDYDVDHIVPQSFLKDDSIDNKVLTRSDKARGKSDNVPSEEVVKKMKNYWRQLLNAKLITQRKFDNLTKAERGGLSELDKAGFIKRQLVETRQITKHVAQILDSRMNTKYDENDKLIREVKVITLKSKLVSDFRKDFQFYKVREINNYHHAHDAYLNAVVGTALIKKYPKLESEFVYGDYKVYDVRKMIAKSEQEIGKATAKYFFYSNIMNFFKTEITLANGEIRKRPLIETNGETGEIVWDKGRDFATVRKVLSMPQVNIVKKTEVQTGGFSKESILPKRNSDKLIARKKDWDPKKYGGFDSPTVAYSVLVVAKVEKGKSKKLKSVKELLGITIMERSSFEKNPIDFLEAKGYKEVKKDLIIKLPKYSLFELENGRKRMLASAGELQKGNELALPSKYVNFLYLASHYEKLKGSPEDNEQKQLFVEQHKHYLDEIIEQISEFSKRVILADANLDKVLSAYNKHRDKPIREQAENIIHLFTLTNLGAPAAFKYFDTTIDRKRYTSTKEVLDATLIHQSITGLYETRIDLSQLGGDGGGGGGSSGGSGGVLNLEEEYRLHEKPVPSSIDPSWLQLFPTVWAERAGMGLANQVPPVVVELRSGASPVAVRQYPMSKEAREGIRPHIQKFLDLGVLVPCRSPWNTPLLPVKKPGTNDYRPVQDLREINKRVQDIHPTVPNPYNLLSSLPPSYTWYSVLDLKDAFFCLRLHPNSQPLFAFEWKDPEKGNTGQLTWTRLPQGFKNSPTLFNEALHRDLAPFRALNPQVVLLQYVDDLLVAAPTYEDCKKGTQKLLQELSKLGYRVSAKKAQLCQREVTYLGYLLKEGKRWLTPARKATVMKIPVPTTPRQVREFLGKAGFCRLFIPGFASLAAPLYPLTKPSIPFIWTEEHQQAFDHIKKALLSAPALALPDLTKPFTLYIDERAGVARGVLTQTLGPWRRPVAYLSKKLDPVASGWPTCLKAVAAVALLLKDADKLTLGQNVTVIASHSLESIVRQPPDRWMTNARMTHYQSLLLNERVSFAPPAVLNPATLLPVESEATPVHRCSEILAEETGTRRDLEDQPLPGVPTWYTDGSSFITEGKRRAGAPIVDGKRTVWASSLPEGTSAQKAELVALTQALRLAEGKNINIYTDSRYAFATAHIHGAIYKQRGWLTSAGKDIKNKEEILALLEAIHLPRRVAIIHCPGHQRGSNPVATGNRRADEAAKQAALSTRVLAGTTKPAGKRTADGSEFEKRTADGSEFESPKKKAKVE

SEQ ID NO: 1472 - protein, 2092 aa, synthetic construct
MPAAKRVKLDGGDKKYSIGLDIGTNSVGWAVITDEYKVPSKKFKVLGNTDRHSIKKNLIGALLFDSGETAEATRLKRTARRRYTRRKNRICYLQEIFSNEMAKVDDSFFHRLEESFLVEEDKKHERHPIFGNIVDEVAYHEKYPTIYHLRKKLVDSTDKADLRLIYLALAHMIKFRGHFLIEGDLNPDNSDVDKLFIQLVQTYNQLFEENPINASGVDAKAILSARLSKSRRLENLIAQLPGEKKNGLFGNLIALSLGLTPNFKSNFDLAEDAKLQLSKDTYDDDLDNLLAQIGDQYADLFLAAKNLSDAILLSDILRVNTEITKAPLSASMIKRYDEHHQDLTLLKALVRQQLPEKYKEIFFDQSKNGYAGYIDGGASQEEFYKFIKPILEKMDGTEELLVKLNREDLLRKQRTFDNGSIPHQIHLGELHAILRRQEDFYPFLKDNREKIEKILTFRIPYYVGPLARGNSRFAWMTRKSEETITPWNFEEVVDKGASAQSFIERMTNFDKNLPNEKVLPKHSLLYEYFTVYNELTKVKYVTEGMRKPAFLSGEQKKAIVDLLFKTNRKVTVKQLKEDYFKKIECFDSVEISGVEDRFNASLGTYHDLLKIIKDKDFLDNEENEDILEDIVLTLTLFEDREMIEERLKTYAHLFDDKVMKQLKRRRYTGWGRLSRKLINGIRDKQSGKTILDFLKSDGFANRNFMQLIHDDSLTFKEDIQKAQVSGQGDSLHEHIANLAGSPAIKKGILQTVKVVDELVKVMGRHKPENIVIEMARENQTTQKGQKNSRERMKRIEEGIKELGSQILKEHPVENTQLQNEKLYLYYLQNGRDMYVDQELDINRLSDYDVDHIVPQSFLKDDSIDNKVLTRSDKARGKSDNVPSEEVVKKMKNYWRQLLNAKLITQRKFDNLTKAERGGLSELDKAGFIKRQLVETRQITKHVAQILDSRMNTKYDENDKLIREVKVITLKSKLVSDFRKDFQFYKVREINNYHHAHDAYLNAVVGTALIKKYPKLESEFVYGDYKVYDVRKMIAKSEQEIGKATAKYFFYSNIMNFFKTEITLANGEIRKRPLIETNGETGEIVWDKGRDFATVRKVLSMPQVNIVKKTEVQTGGFSKESILPKRNSDKLIARKKDWDPKKYGGFDSPTVAYSVLVVAKVEKGKSKKLKSVKELLGITIMERSSFEKNPIDFLEAKGYKEVKKDLIIKLPKYSLFELENGRKRMLASAGELQKGNELALPSKYVNFLYLASHYEKLKGSPEDNEQKQLFVEQHKHYLDEIIEQISEFSKRVILADANLDKVLSAYNKHRDKPIREQAENIIHLFTLTNLGAPAAFKYFDTTIDRKRYTSTKEVLDATLIHQSITGLYETRIDLSQLGGDGGGGSGGGGSSGGVLNLEEEYRLHEKPVPSSIDPSWLQLFPTVWAERAGMGLANQVPPVVVELRSGASPVAVRQYPMSKEAREGIRPHIQKFLDLGVLVPCRSPWNTPLLPVKKPGTNDYRPVQDLREINKRVQDIHPTVPNPYNLLSSLPPSYTWYSVLDLKDAFFCLRLHPNSQPLFAFEWKDPEKGNTGQLTWTRLPQGFKNSPTLFNEALHRDLAPFRALNPQVVLLQYVDDLLVAAPTYEDCKKGTQKLLQELSKLGYRVSAKKAQLCQREVTYLGYLLKEGKRWLTPARKATVMKIPVPTTPRQVREFLGKAGFCRLFIPGFASLAAPLYPLTKPSIPFIWTEEHQQAFDHIKKALLSAPALALPDLTKPFTLYIDERAGVARGVLTQTLGPWRRPVAYLSKKLDPVASGWPTCLKAVAAVALLLKDADKLTLGQNVTVIASHSLESIVRQPPDRWMTNARMTHYQSLLLNERVSFAPPAVLNPATLLPVESEATPVHRCSEILAEETGTRRDLEDQPLPGVPTWYTDGSSFITEGKRRAGAPIVDGKRTVWASSLPEGTSAQKAELVALTQALRLAEGKNINIYTDSRYAFATAHIHGAIYKQRGWLTSAGKDIKNKEEILALLEAIHLPRRVAIIHCPGHQRGSNPVATGNRRADEAAKQAALSTRVLAGTTKPAGKRTADGSEFEKRTADGSEFESPKKKAKVE

SEQ ID NO: 1473 - protein, 2094 aa, synthetic construct
MPAAKRVKLDGGDKKYSIGLDIGTNSVGWAVITDEYKVPSKKFKVLGNTDRHSIKKNLIGALLFDSGETAEATRLKRTARRRYTRRKNRICYLQEIFSNEMAKVDDSFFHRLEESFLVEEDKKHERHPIFGNIVDEVAYHEKYPTIYHLRKKLVDSTDKADLRLIYLALAHMIKFRGHFLIEGDLNPDNSDVDKLFIQLVQTYNQLFEENPINASGVDAKAILSARLSKSRRLENLIAQLPGEKKNGLFGNLIALSLGLTPNFKSNFDLAEDAKLQLSKDTYDDDLDNLLAQIGDQYADLFLAAKNLSDAILLSDILRVNTEITKAPLSASMIKRYDEHHQDLTLLKALVRQQLPEKYKEIFFDQSKNGYAGYIDGGASQEEFYKFIKPILEKMDGTEELLVKLNREDLLRKQRTFDNGSIPHQIHLGELHAILRRQEDFYPFLKDNREKIEKILTFRIPYYVGPLARGNSRFAWMTRKSEETITPWNFEEVVDKGASAQSFIERMTNFDKNLPNEKVLPKHSLLYEYFTVYNELTKVKYVTEGMRKPAFLSGEQKKAIVDLLFKTNRKVTVKQLKEDYFKKIECFDSVEISGVEDRFNASLGTYHDLLKIIKDKDFLDNEENEDILEDIVLTLTLFEDREMIEERLKTYAHLFDDKVMKQLKRRRYTGWGRLSRKLINGIRDKQSGKTILDFLKSDGFANRNFMQLIHDDSLTFKEDIQKAQVSGQGDSLHEHIANLAGSPAIKKGILQTVKVVDELVKVMGRHKPENIVIEMARENQTTQKGQKNSRERMKRIEEGIKELGSQILKEHPVENTQLQNEKLYLYYLQNGRDMYVDQELDINRLSDYDVDHIVPQSFLKDDSIDNKVLTRSDKARGKSDNVPSEEVVKKMKNYWRQLLNAKLITQRKFDNLTKAERGGLSELDKAGFIKRQLVETRQITKHVAQILDSRMNTKYDENDKLIREVKVITLKSKLVSDFRKDFQFYKVREINNYHHAHDAYLNAVVGTALIKKYPKLESEFVYGDYKVYDVRKMIAKSEQEIGKATAKYFFYSNIMNFFKTEITLANGEIRKRPLIETNGETGEIVWDKGRDFATVRKVLSMPQVNIVKKTEVQTGGFSKESILPKRNSDKLIARKKDWDPKKYGGFDSPTVAYSVLVVAKVEKGKSKKLKSVKELLGITIMERSSFEKNPIDFLEAKGYKEVKKDLIIKLPKYSLFELENGRKRMLASAGELQKGNELALPSKYVNFLYLASHYEKLKGSPEDNEQKQLFVEQHKHYLDEIIEQISEFSKRVILADANLDKVLSAYNKHRDKPIREQAENIIHLFTLTNLGAPAAFKYFDTTIDRKRYTSTKEVLDATLIHQSITGLYETRIDLSQLGGDGGGGSEAAAKGSSGGVLNLEEEYRLHEKPVPSSIDPSWLQLFPTVWAERAGMGLANQVPPVVVELRSGASPVAVRQYPMSKEAREGIRPHIQKFLDLGVLVPCRSPWNTPLLPVKKPGTNDYRPVQDLREINKRVQDIHPTVPNPYNLLSSLPPSYTWYSVLDLKDAFFCLRLHPNSQPLFAFEWKDPEKGNTGQLTWTRLPQGFKNSPTLFNEALHRDLAPFRALNPQVVLLQYVDDLLVAAPTYEDCKKGTQKLLQELSKLGYRVSAKKAQLCQREVTYLGYLLKEGKRWLTPARKATVMKIPVPTTPRQVREFLGKAGFCRLFIPGFASLAAPLYPLTKPSIPFIWTEEHQQAFDHIKKALLSAPALALPDLTKPFTLYIDERAGVARGVLTQTLGPWRRPVAYLSKKLDPVASGWPTCLKAVAAVALLLKDADKLTLGQNVTVIASHSLESIVRQPPDRWMTNARMTHYQSLLLNERVSFAPPAVLNPATLLPVESEATPVHRCSEILAEETGTRRDLEDQPLPGVPTWYTDGSSFITEGKRRAGAPIVDGKRTVWASSLPEGTSAQKAELVALTQALRLAEGKNINIYTDSRYAFATAHIHGAIYKQRGWLTSAGKDIKNKEEILALLEAIHLPRRVAIIHCPGHQRGSNPVATGNRRADEAAKQAALSTRVLAGTTKPAGKRTADGSEFEKRTADGSEFESPKKKAKVE

SEQ ID NO: 1474 - protein, 2094 aa, synthetic construct
MPAAKRVKLDGGDKKYSIGLDIGTNSVGWAVITDEYKVPSKKFKVLGNTDRHSIKKNLIGALLFDSGETAEATRLKRTARRRYTRRKNRICYLQEIFSNEMAKVDDSFFHRLEESFLVEEDKKHERHPIFGNIVDEVAYHEKYPTIYHLRKKLVDSTDKADLRLIYLALAHMIKFRGHFLIEGDLNPDNSDVDKLFIQLVQTYNQLFEENPINASGVDAKAILSARLSKSRRLENLIAQLPGEKKNGLFGNLIALSLGLTPNFKSNFDLAEDAKLQLSKDTYDDDLDNLLAQIGDQYADLFLAAKNLSDAILLSDILRVNTEITKAPLSASMIKRYDEHHQDLTLLKALVRQQLPEKYKEIFFDQSKNGYAGYIDGGASQEEFYKFIKPILEKMDGTEELLVKLNREDLLRKQRTFDNGSIPHQIHLGELHAILRRQEDFYPFLKDNREKIEKILTFRIPYYVGPLARGNSRFAWMTRKSEETITPWNFEEVVDKGASAQSFIERMTNFDKNLPNEKVLPKHSLLYEYFTVYNELTKVKYVTEGMRKPAFLSGEQKKAIVDLLFKTNRKVTVKQLKEDYFKKIECFDSVEISGVEDRFNASLGTYHDLLKIIKDKDFLDNEENEDILEDIVLTLTLFEDREMIEERLKTYAHLFDDKVMKQLKRRRYTGWGRLSRKLINGIRDKQSGKTILDFLKSDGFANRNFMQLIHDDSLTFKEDIQKAQVSGQGDSLHEHIANLAGSPAIKKGILQTVKVVDELVKVMGRHKPENIVIEMARENQTTQKGQKNSRERMKRIEEGIKELGSQILKEHPVENTQLQNEKLYLYYLQNGRDMYVDQELDINRLSDYDVDHIVPQSFLKDDSIDNKVLTRSDKARGKSDNVPSEEVVKKMKNYWRQLLNAKLITQRKFDNLTKAERGGLSELDKAGFIKRQLVETRQITKHVAQILDSRMNTKYDENDKLIREVKVITLKSKLVSDFRKDFQFYKVREINNYHHAHDAYLNAVVGTALIKKYPKLESEFVYGDYKVYDVRKMIAKSEQEIGKATAKYFFYSNIMNFFKTEITLANGEIRKRPLIETNGETGEIVWDKGRDFATVRKVLSMPQVNIVKKTEVQTGGFSKESILPKRNSDKLIARKKDWDPKKYGGFDSPTVAYSVLVVAKVEKGKSKKLKSVKELLGITIMERSSFEKNPIDFLEAKGYKEVKKDLIIKLPKYSLFELENGRKRMLASAGELQKGNELALPSKYVNFLYLASHYEKLKGSPEDNEQKQLFVEQHKHYLDEIIEQISEFSKRVILADANLDKVLSAYNKHRDKPIREQAENIIHLFTLTNLGAPAAFKYFDTTIDRKRYTSTKEVLDATLIHQSITGLYETRIDLSQLGGDGGGSSEAAAKGGSGGVLNLEEEYRLHEKPVPSSIDPSWLQLFPTVWAERAGMGLANQVPPVVVELRSGASPVAVRQYPMSKEAREGIRPHIQKFLDLGVLVPCRSPWNTPLLPVKKPGTNDYRPVQDLREINKRVQDIHPTVPNPYNLLSSLPPSYTWYSVLDLKDAFFCLRLHPNSQPLFAFEWKDPEKGNTGQLTWTRLPQGFKNSPTLFNEALHRDLAPFRALNPQVVLLQYVDDLLVAAPTYEDCKKGTQKLLQELSKLGYRVSAKKAQLCQREVTYLGYLLKEGKRWLTPARKATVMKIPVPTTPRQVREFLGKAGFCRLFIPGFASLAAPLYPLTKPSIPFIWTEEHQQAFDHIKKALLSAPALALPDLTKPFTLYIDERAGVARGVLTQTLGPWRRPVAYLSKKLDPVASGWPTCLKAVAAVALLLKDADKLTLGQNVTVIASHSLESIVRQPPDRWMTNARMTHYQSLLLNERVSFAPPAVLNPATLLPVESEATPVHRCSEILAEETGTRRDLEDQPLPGVPTWYTDGSSFITEGKRRAGAPIVDGKRTVWASSLPEGTSAQKAELVALTQALRLAEGKNINIYTDSRYAFATAHIHGAIYKQRGWLTSAGKDIKNKEEILALLEAIHLPRRVAIIHCPGHQRGSNPVATGNRRADEAAKQAALSTRVLAGTTKPAGKRTADGSEFEKRTADGSEFESPKKKAKVE

SEQ ID NO: 1475 - protein, 2089 aa, synthetic construct
MPAAKRVKLDGGDKKYSIGLDIGTNSVGWAVITDEYKVPSKKFKVLGNTDRHSIKKNLIGALLFDSGETAEATRLKRTARRRYTRRKNRICYLQEIFSNEMAKVDDSFFHRLEESFLVEEDKKHERHPIFGNIVDEVAYHEKYPTIYHLRKKLVDSTDKADLRLIYLALAHMIKFRGHFLIEGDLNPDNSDVDKLFIQLVQTYNQLFEENPINASGVDAKAILSARLSKSRRLENLIAQLPGEKKNGLFGNLIALSLGLTPNFKSNFDLAEDAKLQLSKDTYDDDLDNLLAQIGDQYADLFLAAKNLSDAILLSDILRVNTEITKAPLSASMIKRYDEHHQDLTLLKALVRQQLPEKYKEIFFDQSKNGYAGYIDGGASQEEFYKFIKPILEKMDGTEELLVKLNREDLLRKQRTFDNGSIPHQIHLGELHAILRRQEDFYPFLKDNREKIEKILTFRIPYYVGPLARGNSRFAWMTRKSEETITPWNFEEVVDKGASAQSFIERMTNFDKNLPNEKVLPKHSLLYEYFTVYNELTKVKYVTEGMRKPAFLSGEQKKAIVDLLFKTNRKVTVKQLKEDYFKKIECFDSVEISGVEDRFNASLGTYHDLLKIIKDKDFLDNEENEDILEDIVLTLTLFEDREMIEERLKTYAHLFDDKVMKQLKRRRYTGWGRLSRKLINGIRDKQSGKTILDFLKSDGFANRNFMQLIHDDSLTFKEDIQKAQVSGQGDSLHEHIANLAGSPAIKKGILQTVKVVDELVKVMGRHKPENIVIEMARENQTTQKGQKNSRERMKRIEEGIKELGSQILKEHPVENTQLQNEKLYLYYLQNGRDMYVDQELDINRLSDYDVDHIVPQSFLKDDSIDNKVLTRSDKARGKSDNVPSEEVVKKMKNYWRQLLNAKLITQRKFDNLTKAERGGLSELDKAGFIKRQLVETRQITKHVAQILDSRMNTKYDENDKLIREVKVITLKSKLVSDFRKDFQFYKVREINNYHHAHDAYLNAVVGTALIKKYPKLESEFVYGDYKVYDVRKMIAKSEQEIGKATAKYFFYSNIMNFFKTEITLANGEIRKRPLIETNGETGEIVWDKGRDFATVRKVLSMPQVNIVKKTEVQTGGFSKESILPKRNSDKLIARKKDWDPKKYGGFDSPTVAYSVLVVAKVEKGKSKKLKSVKELLGITIMERSSFEKNPIDFLEAKGYKEVKKDLIIKLPKYSLFELENGRKRMLASAGELQKGNELALPSKYVNFLYLASHYEKLKGSPEDNEQKQLFVEQHKHYLDEIIEQISEFSKRVILADANLDKVLSAYNKHRDKPIREQAENIIHLFTLTNLGAPAAFKYFDTTIDRKRYTSTKEVLDATLIHQSITGLYETRIDLSQLGGDGGGGSGGSGGVLNLEEEYRLHEKPVPSSIDPSWLQLFPTVWAERAGMGLANQVPPVVVELRSGASPVAVRQYPMSKEAREGIRPHIQKFLDLGVLVPCRSPWNTPLLPVKKPGTNDYRPVQDLREINKRVQDIHPTVPNPYNLLSSLPPSYTWYSVLDLKDAFFCLRLHPNSQPLFAFEWKDPEKGNTGQLTWTRLPQGFKNSPTLFNEALHRDLAPFRALNPQVVLLQYVDDLLVAAPTYEDCKKGTQKLLQELSKLGYRVSAKKAQLCQREVTYLGYLLKEGKRWLTPARKATVMKIPVPTTPRQVREFLGKAGFCRLFIPGFASLAAPLYPLTKPSIPFIWTEEHQQAFDHIKKALLSAPALALPDLTKPFTLYIDERAGVARGVLTQTLGPWRRPVAYLSKKLDPVASGWPTCLKAVAAVALLLKDADKLTLGQNVTVIASHSLESIVRQPPDRWMTNARMTHYQSLLLNERVSFAPPAVLNPATLLPVESEATPVHRCSEILAEETGTRRDLEDQPLPGVPTWYTDGSSFITEGKRRAGAPIVDGKRTVWASSLPEGTSAQKAELVALTQALRLAEGKNINIYTDSRYAFATAHIHGAIYKQRGWLTSAGKDIKNKEEILALLEAIHLPRRVAIIHCPGHQRGSNPVATGNRRADEAAKQAALSTRVLAGTTKPAGKRTADGSEFEKRTADGSEFESPKKKAKVE

SEQ ID NO: 1476 - protein, 2092 aa, synthetic construct
MPAAKRVKLDGGDKKYSIGLDIGTNSVGWAVITDEYKVPSKKFKVLGNTDRHSIKKNLIGALLFDSGETAEATRLKRTARRRYTRRKNRICYLQEIFSNEMAKVDDSFFHRLEESFLVEEDKKHERHPIFGNIVDEVAYHEKYPTIYHLRKKLVDSTDKADLRLIYLALAHMIKFRGHFLIEGDLNPDNSDVDKLFIQLVQTYNQLFEENPINASGVDAKAILSARLSKSRRLENLIAQLPGEKKNGLFGNLIALSLGLTPNFKSNFDLAEDAKLQLSKDTYDDDLDNLLAQIGDQYADLFLAAKNLSDAILLSDILRVNTEITKAPLSASMIKRYDEHHQDLTLLKALVRQQLPEKYKEIFFDQSKNGYAGYIDGGASQEEFYKFIKPILEKMDGTEELLVKLNREDLLRKQRTFDNGSIPHQIHLGELHAILRRQEDFYPFLKDNREKIEKILTFRIPYYVGPLARGNSRFAWMTRKSEETITPWNFEEVVDKGASAQSFIERMTNFDKNLPNEKVLPKHSLLYEYFTVYNELTKVKYVTEGMRKPAFLSGEQKKAIVDLLFKTNRKVTVKQLKEDYFKKIECFDSVEISGVEDRFNASLGTYHDLLKIIKDKDFLDNEENEDILEDIVLTLTLFEDREMIEERLKTYAHLFDDKVMKQLKRRRYTGWGRLSRKLINGIRDKQSGKTILDFLKSDGFANRNFMQLIHDDSLTFKEDIQKAQVSGQGDSLHEHIANLAGSPAIKKGILQTVKVVDELVKVMGRHKPENIVIEMARENQTTQKGQKNSRERMKRIEEGIKELGSQILKEHPVENTQLQNEKLYLYYLQNGRDMYVDQELDINRLSDYDVDHIVPQSFLKDDSIDNKVLTRSDKARGKSDNVPSEEVVKKMKNYWRQLLNAKLITQRKFDNLTKAERGGLSELDKAGFIKRQLVETRQITKHVAQILDSRMNTKYDENDKLIREVKVITLKSKLVSDFRKDFQFYKVREINNYHHAHDAYLNAVVGTALIKKYPKLESEFVYGDYKVYDVRKMIAKSEQEIGKATAKYFFYSNIMNFFKTEITLANGEIRKRPLIETNGETGEIVWDKGRDFATVRKVLSMPQVNIVKKTEVQTGGFSKESILPKRNSDKLIARKKDWDPKKYGGFDSPTVAYSVLVVAKVEKGKSKKLKSVKELLGITIMERSSFEKNPIDFLEAKGYKEVKKDLIIKLPKYSLFELENGRKRMLASAGELQKGNELALPSKYVNFLYLASHYEKLKGSPEDNEQKQLFVEQHKHYLDEIIEQISEFSKRVILADANLDKVLSAYNKHRDKPIREQAENIIHLFTLTNLGAPAAFKYFDTTIDRKRYTSTKEVLDATLIHQSITGLYETRIDLSQLGGDGGGGSGSSPAPGGVLNLEEEYRLHEKPVPSSIDPSWLQLFPTVWAERAGMGLANQVPPVVVELRSGASPVAVRQYPMSKEAREGIRPHIQKFLDLGVLVPCRSPWNTPLLPVKKPGTNDYRPVQDLREINKRVQDIHPTVPNPYNLLSSLPPSYTWYSVLDLKDAFFCLRLHPNSQPLFAFEWKDPEKGNTGQLTWTRLPQGFKNSPTLFNEALHRDLAPFRALNPQVVLLQYVDDLLVAAPTYEDCKKGTQKLLQELSKLGYRVSAKKAQLCQREVTYLGYLLKEGKRWLTPARKATVMKIPVPTTPRQVREFLGKAGFCRLFIPGFASLAAPLYPLTKPSIPFIWTEEHQQAFDHIKKALLSAPALALPDLTKPFTLYIDERAGVARGVLTQTLGPWRRPVAYLSKKLDPVASGWPTCLKAVAAVALLLKDADKLTLGQNVTVIASHSLESIVRQPPDRWMTNARMTHYQSLLLNERVSFAPPAVLNPATLLPVESEATPVHRCSEILAEETGTRRDLEDQPLPGVPTWYTDGSSFITEGKRRAGAPIVDGKRTVWASSLPEGTSAQKAELVALTQALRLAEGKNINIYTDSRYAFATAHIHGAIYKQRGWLTSAGKDIKNKEEILALLEAIHLPRRVAIIHCPGHQRGSNPVATGNRRADEAAKQAALSTRVLAGTTKPAGKRTADGSEFEKRTADGSEFESPKKKAKVE

SEQ ID NO: 1477 - protein, 2092 aa, synthetic construct
MPAAKRVKLDGGDKKYSIGLDIGTNSVGWAVITDEYKVPSKKFKVLGNTDRHSIKKNLIGALLFDSGETAEATRLKRTARRRYTRRKNRICYLQEIFSNEMAKVDDSFFHRLEESFLVEEDKKHERHPIFGNIVDEVAYHEKYPTIYHLRKKLVDSTDKADLRLIYLALAHMIKFRGHFLIEGDLNPDNSDVDKLFIQLVQTYNQLFEENPINASGVDAKAILSARLSKSRRLENLIAQLPGEKKNGLFGNLIALSLGLTPNFKSNFDLAEDAKLQLSKDTYDDDLDNLLAQIGDQYADLFLAAKNLSDAILLSDILRVNTEITKAPLSASMIKRYDEHHQDLTLLKALVRQQLPEKYKEIFFDQSKNGYAGYIDGGASQEEFYKFIKPILEKMDGTEELLVKLNREDLLRKQRTFDNGSIPHQIHLGELHAILRRQEDFYPFLKDNREKIEKILTFRIPYYVGPLARGNSRFAWMTRKSEETITPWNFEEVVDKGASAQSFIERMTNFDKNLPNEKVLPKHSLLYEYFTVYNELTKVKYVTEGMRKPAFLSGEQKKAIVDLLFKTNRKVTVKQLKEDYFKKIECFDSVEISGVEDRFNASLGTYHDLLKIIKDKDFLDNEENEDILEDIVLTLTLFEDREMIEERLKTYAHLFDDKVMKQLKRRRYTGWGRLSRKLINGIRDKQSGKTILDFLKSDGFANRNFMQLIHDDSLTFKEDIQKAQVSGQGDSLHEHIANLAGSPAIKKGILQTVKVVDELVKVMGRHKPENIVIEMARENQTTQKGQKNSRERMKRIEEGIKELGSQILKEHPVENTQLQNEKLYLYYLQNGRDMYVDQELDINRLSDYDVDHIVPQSFLKDDSIDNKVLTRSDKARGKSDNVPSEEVVKKMKNYWRQLLNAKLITQRKFDNLTKAERGGLSELDKAGFIKRQLVETRQITKHVAQILDSRMNTKYDENDKLIREVKVITLKSKLVSDFRKDFQFYKVREINNYHHAHDAYLNAVVGTALIKKYPKLESEFVYGDYKVYDVRKMIAKSEQEIGKATAKYFFYSNIMNFFKTEITLANGEIRKRPLIETNGETGEIVWDKGRDFATVRKVLSMPQVNIVKKTEVQTGGFSKESILPKRNSDKLIARKKDWDPKKYGGFDSPTVAYSVLVVAKVEKGKSKKLKSVKELLGITIMERSSFEKNPIDFLEAKGYKEVKKDLIIKLPKYSLFELENGRKRMLASAGELQKGNELALPSKYVNFLYLASHYEKLKGSPEDNEQKQLFVEQHKHYLDEIIEQISEFSKRVILADANLDKVLSAYNKHRDKPIREQAENIIHLFTLTNLGAPAAFKYFDTTIDRKRYTSTKEVLDATLIHQSITGLYETRIDLSQLGGDGGGSSGGGGGSGGVLNLEEEYRLHEKPVPSSIDPSWLQLFPTVWAERAGMGLANQVPPVVVELRSGASPVAVRQYPMSKEAREGIRPHIQKFLDLGVLVPCRSPWNTPLLPVKKPGTNDYRPVQDLREINKRVQDIHPTVPNPYNLLSSLPPSYTWYSVLDLKDAFFCLRLHPNSQPLFAFEWKDPEKGNTGQLTWTRLPQGFKNSPTLFNEALHRDLAPFRALNPQVVLLQYVDDLLVAAPTYEDCKKGTQKLLQELSKLGYRVSAKKAQLCQREVTYLGYLLKEGKRWLTPARKATVMKIPVPTTPRQVREFLGKAGFCRLFIPGFASLAAPLYPLTKPSIPFIWTEEHQQAFDHIKKALLSAPALALPDLTKPFTLYIDERAGVARGVLTQTLGPWRRPVAYLSKKLDPVASGWPTCLKAVAAVALLLKDADKLTLGQNVTVIASHSLESIVRQPPDRWMTNARMTHYQSLLLNERVSFAPPAVLNPATLLPVESEATPVHRCSEILAEETGTRRDLEDQPLPGVPTWYTDGSSFITEGKRRAGAPIVDGKRTVWASSLPEGTSAQKAELVALTQALRLAEGKNINIYTDSRYAFATAHIHGAIYKQRGWLTSAGKDIKNKEEILALLEAIHLPRRVAIIHCPGHQRGSNPVATGNRRADEAAKQAALSTRVLAGTTKPAGKRTADGSEFEKRTADGSEFESPKKKAKVE

SEQ ID NO: 1478 - protein, 2007 aa, synthetic construct
MPAAKRVKLDGGDKKYSIGLDIGTNSVGWAVITDEYKVPSKKFKVLGNTDRHSIKKNLIGALLFDSGETAEATRLKRTARRRYTRRKNRICYLQEIFSNEMAKVDDSFFHRLEESFLVEEDKKHERHPIFGNIVDEVAYHEKYPTIYHLRKKLVDSTDKADLRLIYLALAHMIKFRGHFLIEGDLNPDNSDVDKLFIQLVQTYNQLFEENPINASGVDAKAILSARLSKSRRLENLIAQLPGEKKNGLFGNLIALSLGLTPNFKSNFDLAEDAKLQLSKDTYDDDLDNLLAQIGDQYADLFLAAKNLSDAILLSDILRVNTEITKAPLSASMIKRYDEHHQDLTLLKALVRQQLPEKYKEIFFDQSKNGYAGYIDGGASQEEFYKFIKPILEKMDGTEELLVKLNREDLLRKQRTFDNGSIPHQIHLGELHAILRRQEDFYPFLKDNREKIEKILTFRIPYYVGPLARGNSRFAWMTRKSEETITPWNFEEVVDKGASAQSFIERMTNFDKNLPNEKVLPKHSLLYEYFTVYNELTKVKYVTEGMRKPAFLSGEQKKAIVDLLFKTNRKVTVKQLKEDYFKKIECFDSVEISGVEDRFNASLGTYHDLLKIIKDKDFLDNEENEDILEDIVLTLTLFEDREMIEERLKTYAHLFDDKVMKQLKRRRYTGWGRLSRKLINGIRDKQSGKTILDFLKSDGFANRNFMQLIHDDSLTFKEDIQKAQVSGQGDSLHEHIANLAGSPAIKKGILQTVKVVDELVKVMGRHKPENIVIEMARENQTTQKGQKNSRERMKRIEEGIKELGSQILKEHPVENTQLQNEKLYLYYLQNGRDMYVDQELDINRLSDYDVDHIVPQSFLKDDSIDNKVLTRSDKARGKSDNVPSEEVVKKMKNYWRQLLNAKLITQRKFDNLTKAERGGLSELDKAGFIKRQLVETRQITKHVAQILDSRMNTKYDENDKLIREVKVITLKSKLVSDFRKDFQFYKVREINNYHHAHDAYLNAVVGTALIKKYPKLESEFVYGDYKVYDVRKMIAKSEQEIGKATAKYFFYSNIMNFFKTEITLANGEIRKRPLIETNGETGEIVWDKGRDFATVRKVLSMPQVNIVKKTEVQTGGFSKESILPKRNSDKLIARKKDWDPKKYGGFDSPTVAYSVLVVAKVEKGKSKKLKSVKELLGITIMERSSFEKNPIDFLEAKGYKEVKKDLIIKLPKYSLFELENGRKRMLASAGELQKGNELALPSKYVNFLYLASHYEKLKGSPEDNEQKQLFVEQHKHYLDEIIEQISEFSKRVILADANLDKVLSAYNKHRDKPIREQAENIIHLFTLTNLGAPAAFKYFDTTIDRKRYTSTKEVLDATLIHQSITGLYETRIDLSQLGGDGGGGGGGGGAVLGLEHLPRPPQISQFPLNPERLQALQHLVRKALEAGHIEPYTGPGNNPVFPVKKANGTWRFIHDLRATNSLTIDLSSSSPGPPDLSSLPTTLAHLQTIDLRDAFFQIPLPKQFQPYFAFTVPQQCNYGPGTRYAWKVLPQGFKNSPTLFEMQLAHILQPIRQAFPQCTILQYMDDILLASPSHEDLLLLSEATMASLISHGLPVSENKTQQTPGTIKFLGQIISPNHLTYDAVPTVPIRSRWALPELQALLGEIQWVSKGTPTLRQPLHSLYCALQRHTDPRDQIYLNPSQVQSLVQLRQALSQNCRSRLVQTLPLLGAIMLTLTGTTTVVFQSKEQWPLVWLHAPLPHTSQCPWGQLLASAVLLLDKYTLQSYGLLCQTIHHNISTQTFNQFIQTSDHPSVPILLHHSHRFKNLGAQTGELWNTFLKTAAPLAPVKALMPVFTLSPVIINTAPCLFSDGSTSRAAYILWDKQILSQRSFPLPPPHKSAQRAELLGLLHGLSSARSWRCLNIFLDSKYLYHYLRTLALGTFQGRSSQAPFQALLPRLLSRKVVYLHHVRSHTNLPDPISRLNALTDALLITPVLQLAGKRTADGSEFEKRTADGSEFESPKKKAKVE

SEQ ID NO: 1479 - protein, 2013 aa, synthetic construct
MPAAKRVKLDGGDKKYSIGLDIGTNSVGWAVITDEYKVPSKKFKVLGNTDRHSIKKNLIGALLFDSGETAEATRLKRTARRRYTRRKNRICYLQEIFSNEMAKVDDSFFHRLEESFLVEEDKKHERHPIFGNIVDEVAYHEKYPTIYHLRKKLVDSTDKADLRLIYLALAHMIKFRGHFLIEGDLNPDNSDVDKLFIQLVQTYNQLFEENPINASGVDAKAILSARLSKSRRLENLIAQLPGEKKNGLFGNLIALSLGLTPNFKSNFDLAEDAKLQLSKDTYDDDLDNLLAQIGDQYADLFLAAKNLSDAILLSDILRVNTEITKAPLSASMIKRYDEHHQDLTLLKALVRQQLPEKYKEIFFDQSKNGYAGYIDGGASQEEFYKFIKPILEKMDGTEELLVKLNREDLLRKQRTFDNGSIPHQIHLGELHAILRRQEDFYPFLKDNREKIEKILTFRIPYYVGPLARGNSRFAWMTRKSEETITPWNFEEVVDKGASAQSFIERMTNFDKNLPNEKVLPKHSLLYEYFTVYNELTKVKYVTEGMRKPAFLSGEQKKAIVDLLFKTNRKVTVKQLKEDYFKKIECFDSVEISGVEDRFNASLGTYHDLLKIIKDKDFLDNEENEDILEDIVLTLTLFEDREMIEERLKTYAHLFDDKVMKQLKRRRYTGWGRLSRKLINGIRDKQSGKTILDFLKSDGFANRNFMQLIHDDSLTFKEDIQKAQVSGQGDSLHEHIANLAGSPAIKKGILQTVKVVDELVKVMGRHKPENIVIEMARENQTTQKGQKNSRERMKRIEEGIKELGSQILKEHPVENTQLQNEKLYLYYLQNGRDMYVDQELDINRLSDYDVDHIVPQSFLKDDSIDNKVLTRSDKARGKSDNVPSEEVVKKMKNYWRQLLNAKLITQRKFDNLTKAERGGLSELDKAGFIKRQLVETRQITKHVAQILDSRMNTKYDENDKLIREVKVITLKSKLVSDFRKDFQFYKVREINNYHHAHDAYLNAVVGTALIKKYPKLESEFVYGDYKVYDVRKMIAKSEQEIGKATAKYFFYSNIMNFFKTEITLANGEIRKRPLIETNGETGEIVWDKGRDFATVRKVLSMPQVNIVKKTEVQTGGFSKESILPKRNSDKLIARKKDWDPKKYGGFDSPTVAYSVLVVAKVEKGKSKKLKSVKELLGITIMERSSFEKNPIDFLEAKGYKEVKKDLIIKLPKYSLFELENGRKRMLASAGELQKGNELALPSKYVNFLYLASHYEKLKGSPEDNEQKQLFVEQHKHYLDEIIEQISEFSKRVILADANLDKVLSAYNKHRDKPIREQAENIIHLFTLTNLGAPAAFKYFDTTIDRKRYTSTKEVLDATLIHQSITGLYETRIDLSQLGGDGGPAPAPAPAPAPGGAVLGLEHLPRPPQISQFPLNPERLQALQHLVRKALEAGHIEPYTGPGNNPVFPVKKANGTWRFIHDLRATNSLTIDLSSSSPGPPDLSSLPTTLAHLQTIDLRDAFFQIPLPKQFQPYFAFTVPQQCNYGPGTRYAWKVLPQGFKNSPTLFEMQLAHILQPIRQAFPQCTILQYMDDILLASPSHEDLLLLSEATMASLISHGLPVSENKTQQTPGTIKFLGQIISPNHLTYDAVPTVPIRSRWALPELQALLGEIQWVSKGTPTLRQPLHSLYCALQRHTDPRDQIYLNPSQVQSLVQLRQALSQNCRSRLVQTLPLLGAIMLTLTGTTTVVFQSKEQWPLVWLHAPLPHTSQCPWGQLLASAVLLLDKYTLQSYGLLCQTIHHNISTQTFNQFIQTSDHPSVPILLHHSHRFKNLGAQTGELWNTFLKTAAPLAPVKALMPVFTLSPVIINTAPCLFSDGSTSRAAYILWDKQILSQRSFPLPPPHKSAQRAELLGLLHGLSSARSWRCLNIFLDSKYLYHYLRTLALGTFQGRSSQAPFQALLPRLLSRKVVYLHHVRSHTNLPDPISRLNALTDALLITPVLQLAGKRTADGSEFEKRTADGSEFESPKKKAKVE

SEQ ID NO: 1480 - protein, 2013 aa, synthetic construct
MPAAKRVKLDGGDKKYSIGLDIGTNSVGWAVITDEYKVPSKKFKVLGNTDRHSIKKNLIGALLFDSGETAEATRLKRTARRRYTRRKNRICYLQEIFSNEMAKVDDSFFHRLEESFLVEEDKKHERHPIFGNIVDEVAYHEKYPTIYHLRKKLVDSTDKADLRLIYLALAHMIKFRGHFLIEGDLNPDNSDVDKLFIQLVQTYNQLFEENPINASGVDAKAILSARLSKSRRLENLIAQLPGEKKNGLFGNLIALSLGLTPNFKSNFDLAEDAKLQLSKDTYDDDLDNLLAQIGDQYADLFLAAKNLSDAILLSDILRVNTEITKAPLSASMIKRYDEHHQDLTLLKALVRQQLPEKYKEIFFDQSKNGYAGYIDGGASQEEFYKFIKPILEKMDGTEELLVKLNREDLLRKQRTFDNGSIPHQIHLGELHAILRRQEDFYPFLKDNREKIEKILTFRIPYYVGPLARGNSRFAWMTRKSEETITPWNFEEVVDKGASAQSFIERMTNFDKNLPNEKVLPKHSLLYEYFTVYNELTKVKYVTEGMRKPAFLSGEQKKAIVDLLFKTNRKVTVKQLKEDYFKKIECFDSVEISGVEDRFNASLGTYHDLLKIIKDKDFLDNEENEDILEDIVLTLTLFEDREMIEERLKTYAHLFDDKVMKQLKRRRYTGWGRLSRKLINGIRDKQSGKTILDFLKSDGFANRNFMQLIHDDSLTFKEDIQKAQVSGQGDSLHEHIANLAGSPAIKKGILQTVKVVDELVKVMGRHKPENIVIEMARENQTTQKGQKNSRERMKRIEEGIKELGSQILKEHPVENTQLQNEKLYLYYLQNGRDMYVDQELDINRLSDYDVDHIVPQSFLKDDSIDNKVLTRSDKARGKSDNVPSEEVVKKMKNYWRQLLNAKLITQRKFDNLTKAERGGLSELDKAGFIKRQLVETRQITKHVAQILDSRMNTKYDENDKLIREVKVITLKSKLVSDFRKDFQFYKVREINNYHHAHDAYLNAVVGTALIKKYPKLESEFVYGDYKVYDVRKMIAKSEQEIGKATAKYFFYSNIMNFFKTEITLANGEIRKRPLIETNGETGEIVWDKGRDFATVRKVLSMPQVNIVKKTEVQTGGFSKESILPKRNSDKLIARKKDWDPKKYGGFDSPTVAYSVLVVAKVEKGKSKKLKSVKELLGITIMERSSFEKNPIDFLEAKGYKEVKKDLIIKLPKYSLFELENGRKRMLASAGELQKGNELALPSKYVNFLYLASHYEKLKGSPEDNEQKQLFVEQHKHYLDEIIEQISEFSKRVILADANLDKVLSAYNKHRDKPIREQAENIIHLFTLTNLGAPAAFKYFDTTIDRKRYTSTKEVLDATLIHQSITGLYETRIDLSQLGGDGGPAPEAAAKGGSGGAVLGLEHLPRPPQISQFPLNPERLQALQHLVRKALEAGHIEPYTGPGNNPVFPVKKANGTWRFIHDLRATNSLTIDLSSSSPGPPDLSSLPTTLAHLQTIDLRDAFFQIPLPKQFQPYFAFTVPQQCNYGPGTRYAWKVLPQGFKNSPTLFEMQLAHILQPIRQAFPQCTILQYMDDILLASPSHEDLLLLSEATMASLISHGLPVSENKTQQTPGTIKFLGQIISPNHLTYDAVPTVPIRSRWALPELQALLGEIQWVSKGTPTLRQPLHSLYCALQRHTDPRDQIYLNPSQVQSLVQLRQALSQNCRSRLVQTLPLLGAIMLTLTGTTTVVFQSKEQWPLVWLHAPLPHTSQCPWGQLLASAVLLLDKYTLQSYGLLCQTIHHNISTQTFNQFIQTSDHPSVPILLHHSHRFKNLGAQTGELWNTFLKTAAPLAPVKALMPVFTLSPVIINTAPCLFSDGSTSRAAYILWDKQILSQRSFPLPPPHKSAQRAELLGLLHGLSSARSWRCLNIFLDSKYLYHYLRTLALGTFQGRSSQAPFQALLPRLLSRKVVYLHHVRSHTNLPDPISRLNALTDALLITPVLQLAGKRTADGSEFEKRTADGSEFESPKKKAKVE

SEQ ID NO: 1481 - protein, 2011 aa, synthetic construct
MPAAKRVKLDGGDKKYSIGLDIGTNSVGWAVITDEYKVPSKKFKVLGNTDRHSIKKNLIGALLFDSGETAEATRLKRTARRRYTRRKNRICYLQEIFSNEMAKVDDSFFHRLEESFLVEEDKKHERHPIFGNIVDEVAYHEKYPTIYHLRKKLVDSTDKADLRLIYLALAHMIKFRGHFLIEGDLNPDNSDVDKLFIQLVQTYNQLFEENPINASGVDAKAILSARLSKSRRLENLIAQLPGEKKNGLFGNLIALSLGLTPNFKSNFDLAEDAKLQLSKDTYDDDLDNLLAQIGDQYADLFLAAKNLSDAILLSDILRVNTEITKAPLSASMIKRYDEHHQDLTLLKALVRQQLPEKYKEIFFDQSKNGYAGYIDGGASQEEFYKFIKPILEKMDGTEELLVKLNREDLLRKQRTFDNGSIPHQIHLGELHAILRRQEDFYPFLKDNREKIEKILTFRIPYYVGPLARGNSRFAWMTRKSEETITPWNFEEVVDKGASAQSFIERMTNFDKNLPNEKVLPKHSLLYEYFTVYNELTKVKYVTEGMRKPAFLSGEQKKAIVDLLFKTNRKVTVKQLKEDYFKKIECFDSVEISGVEDRFNASLGTYHDLLKIIKDKDFLDNEENEDILEDIVLTLTLFEDREMIEERLKTYAHLFDDKVMKQLKRRRYTGWGRLSRKLINGIRDKQSGKTILDFLKSDGFANRNFMQLIHDDSLTFKEDIQKAQVSGQGDSLHEHIANLAGSPAIKKGILQTVKVVDELVKVMGRHKPENIVIEMARENQTTQKGQKNSRERMKRIEEGIKELGSQILKEHPVENTQLQNEKLYLYYLQNGRDMYVDQELDINRLSDYDVDHIVPQSFLKDDSIDNKVLTRSDKARGKSDNVPSEEVVKKMKNYWRQLLNAKLITQRKFDNLTKAERGGLSELDKAGFIKRQLVETRQITKHVAQILDSRMNTKYDENDKLIREVKVITLKSKLVSDFRKDFQFYKVREINNYHHAHDAYLNAVVGTALIKKYPKLESEFVYGDYKVYDVRKMIAKSEQEIGKATAKYFFYSNIMNFFKTEITLANGEIRKRPLIETNGETGEIVWDKGRDFATVRKVLSMPQVNIVKKTEVQTGGFSKESILPKRNSDKLIARKKDWDPKKYGGFDSPTVAYSVLVVAKVEKGKSKKLKSVKELLGITIMERSSFEKNPIDFLEAKGYKEVKKDLIIKLPKYSLFELENGRKRMLASAGELQKGNELALPSKYVNFLYLASHYEKLKGSPEDNEQKQLFVEQHKHYLDEIIEQISEFSKRVILADANLDKVLSAYNKHRDKPIREQAENIIHLFTLTNLGAPAAFKYFDTTIDRKRYTSTKEVLDATLIHQSITGLYETRIDLSQLGGDGGPAPGSSGGGGGAVLGLEHLPRPPQISQFPLNPERLQALQHLVRKALEAGHIEPYTGPGNNPVFPVKKANGTWRFIHDLRATNSLTIDLSSSSPGPPDLSSLPTTLAHLQTIDLRDAFFQIPLPKQFQPYFAFTVPQQCNYGPGTRYAWKVLPQGFKNSPTLFEMQLAHILQPIRQAFPQCTILQYMDDILLASPSHEDLLLLSEATMASLISHGLPVSENKTQQTPGTIKFLGQIISPNHLTYDAVPTVPIRSRWALPELQALLGEIQWVSKGTPTLRQPLHSLYCALQRHTDPRDQIYLNPSQVQSLVQLRQALSQNCRSRLVQTLPLLGAIMLTLTGTTTVVFQSKEQWPLVWLHAPLPHTSQCPWGQLLASAVLLLDKYTLQSYGLLCQTIHHNISTQTFNQFIQTSDHPSVPILLHHSHRFKNLGAQTGELWNTFLKTAAPLAPVKALMPVFTLSPVIINTAPCLFSDGSTSRAAYILWDKQILSQRSFPLPPPHKSAQRAELLGLLHGLSSARSWRCLNIFLDSKYLYHYLRTLALGTFQGRSSQAPFQALLPRLLSRKVVYLHHVRSHTNLPDPISRLNALTDALLITPVLQLAGKRTADGSEFEKRTADGSEFESPKKKAKVE

SEQ ID NO: 1482 - protein, 2013 aa, synthetic construct
MPAAKRVKLDGGDKKYSIGLDIGTNSVGWAVITDEYKVPSKKFKVLGNTDRHSIKKNLIGALLFDSGETAEATRLKRTARRRYTRRKNRICYLQEIFSNEMAKVDDSFFHRLEESFLVEEDKKHERHPIFGNIVDEVAYHEKYPTIYHLRKKLVDSTDKADLRLIYLALAHMIKFRGHFLIEGDLNPDNSDVDKLFIQLVQTYNQLFEENPINASGVDAKAILSARLSKSRRLENLIAQLPGEKKNGLFGNLIALSLGLTPNFKSNFDLAEDAKLQLSKDTYDDDLDNLLAQIGDQYADLFLAAKNLSDAILLSDILRVNTEITKAPLSASMIKRYDEHHQDLTLLKALVRQQLPEKYKEIFFDQSKNGYAGYIDGGASQEEFYKFIKPILEKMDGTEELLVKLNREDLLRKQRTFDNGSIPHQIHLGELHAILRRQEDFYPFLKDNREKIEKILTFRIPYYVGPLARGNSRFAWMTRKSEETITPWNFEEVVDKGASAQSFIERMTNFDKNLPNEKVLPKHSLLYEYFTVYNELTKVKYVTEGMRKPAFLSGEQKKAIVDLLFKTNRKVTVKQLKEDYFKKIECFDSVEISGVEDRFNASLGTYHDLLKIIKDKDFLDNEENEDILEDIVLTLTLFEDREMIEERLKTYAHLFDDKVMKQLKRRRYTGWGRLSRKLINGIRDKQSGKTILDFLKSDGFANRNFMQLIHDDSLTFKEDIQKAQVSGQGDSLHEHIANLAGSPAIKKGILQTVKVVDELVKVMGRHKPENIVIEMARENQTTQKGQKNSRERMKRIEEGIKELGSQILKEHPVENTQLQNEKLYLYYLQNGRDMYVDQELDINRLSDYDVDHIVPQSFLKDDSIDNKVLTRSDKARGKSDNVPSEEVVKKMKNYWRQLLNAKLITQRKFDNLTKAERGGLSELDKAGFIKRQLVETRQITKHVAQILDSRMNTKYDENDKLIREVKVITLKSKLVSDFRKDFQFYKVREINNYHHAHDAYLNAVVGTALIKKYPKLESEFVYGDYKVYDVRKMIAKSEQEIGKATAKYFFYSNIMNFFKTEITLANGEIRKRPLIETNGETGEIVWDKGRDFATVRKVLSMPQVNIVKKTEVQTGGFSKESILPKRNSDKLIARKKDWDPKKYGGFDSPTVAYSVLVVAKVEKGKSKKLKSVKELLGITIMERSSFEKNPIDFLEAKGYKEVKKDLIIKLPKYSLFELENGRKRMLASAGELQKGNELALPSKYVNFLYLASHYEKLKGSPEDNEQKQLFVEQHKHYLDEIIEQISEFSKRVILADANLDKVLSAYNKHRDKPIREQAENIIHLFTLTNLGAPAAFKYFDTTIDRKRYTSTKEVLDATLIHQSITGLYETRIDLSQLGGDGGEAAAKGSSGGSGGAVLGLEHLPRPPQISQFPLNPERLQALQHLVRKALEAGHIEPYTGPGNNPVFPVKKANGTWRFIHDLRATNSLTIDLSSSSPGPPDLSSLPTTLAHLQTIDLRDAFFQIPLPKQFQPYFAFTVPQQCNYGPGTRYAWKVLPQGFKNSPTLFQMQLAHILQPIRQAFPQCTILQYMDDILLASPSHEDLLLLSEATMASLISHGLPVSENKTQQTPGTIKFLGQIISPNHLTYDAVPTVPIRSRWALPELQALLGEIQWVSKGTPTLRQPLHSLYCALQPHTDPRDQIYLNPSQVQSLVQLRQALSQNCRSRLVQTLPLLGAIMLTLTGTTTVVFQSKEQWPLVWLHAPLPHTSQCPWGQLLASAVLLLDKYTLQSYGLLCQTIHHNISTQTFNQFIQTSDHPSVPILLHHSHRFKNLGAQTGELWNTFLKTAAPLAPVKALMPVFTLSPVIINTAPCLFSDGSTSRAAYILWDKQILSQRSFPLPPPHKSAQRAELLGLLHGLSSARSWRCLNIFLDSKYLYHYLRTLALGTFQGRSSQAPFQALLPRLLSRKVVYLHHVRSHTNLPDPISRLNALTDALLITPVLQLAGKRTADGSEFEKRTADGSEFESPKKKAKVE

SEQ ID NO: 1483 - protein, 2010 aa, synthetic construct
MPAAKRVKLDGGDKKYSIGLDIGTNSVGWAVITDEYKVPSKKFKVLGNTDRHSIKKNLIGALLFDSGETAEATRLKRTARRRYTRRKNRICYLQEIFSNEMAKVDDSFFHRLEESFLVEEDKKHERHPIFGNIVDEVAYHEKYPTIYHLRKKLVDSTDKADLRLIYLALAHMIKFRGHFLIEGDLNPDNSDVDKLFIQLVQTYNQLFEENPINASGVDAKAILSARLSKSRRLENLIAQLPGEKKNGLFGNLIALSLGLTPNFKSNFDLAEDAKLQLSKDTYDDDLDNLLAQIGDQYADLFLAAKNLSDAILLSDILRVNTEITKAPLSASMIKRYDEHHQDLTLLKALVRQQLPEKYKEIFFDQSKNGYAGYIDGGASQEEFYKFIKPILEKMDGTEELLVKLNREDLLRKQRTFDNGSIPHQIHLGELHAILRRQEDFYPFLKDNREKIEKILTFRIPYYVGPLARGNSRFAWMTRKSEETITPWNFEEVVDKGASAQSFIERMTNFDKNLPNEKVLPKHSLLYEYFTVYNELTKVKYVTEGMRKPAFLSGEQKKAIVDLLFKTNRKVTVKQLKEDYFKKIECFDSVEISGVEDRFNASLGTYHDLLKIIKDKDFLDNEENEDILEDIVLTLTLFEDREMIEERLKTYAHLFDDKVMKQLKRRRYTGWGRLSRKLINGIRDKQSGKTILDFLKSDGFANRNFMQLIHDDSLTFKEDIQKAQVSGQGDSLHEHIANLAGSPAIKKGILQTVKVVDELVKVMGRHKPENIVIEMARENQTTQKGQKNSRERMKRIEEGIKELGSQILKEHPVENTQLQNEKLYLYYLQNGRDMYVDQELDINRLSDYDVDHIVPQSFLKDDSIDNKVLTRSDKARGKSDNVPSEEVVKKMKNYWRQLLNAKLITQRKFDNLTKAERGGLSELDKAGFIKRQLVETRQITKHVAQILDSRMNTKYDENDKLIREVKVITLKSKLVSDFRKDFQFYKVREINNYHHAHDAYLNAVVGTALIKKYPKLESEFVYGDYKVYDVRKMIAKSEQEIGKATAKYFFYSNIMNFFKTEITLANGEIRKRPLIETNGETGEIVWDKGRDFATVRKVLSMPQVNIVKKTEVQTGGFSKESILPKRNSDKLIARKKDWDPKKYGGFDSPTVAYSVLVVAKVEKGKSKKLKSVKELLGITIMERSSFEKNPIDFLEAKGYKEVKKDLIIKLPKYSLFELENGRKRMLASAGELQKGNELALPSKYVNFLYLASHYEKLKGSPEDNEQKQLFVEQHKHYLDEIIEQISEFSKRVILADANLDKVLSAYNKHRDKPIREQAENIIHLFTLTNLGAPAAFKYFDTTIDRKRYTSTKEVLDATLIHQSITGLYETRIDLSQLGGDGGEAAAKGGSGGAVLGLEHLPRPPQISQFPLNPERLQALQHLVRKALEAGHIEPYTGPGNNPVFPVKKANGTWRFIHDLRATNSLTIDLSSSSPGPPDLSSLPTTLAHLQTIDLRDAFFQIPLPKQFQPYFAFTVPQQCNYGPGTRYAWKVLPQGFKNSPTLFQMQLAHILQPIRQAFPQCTILQYMDDILLASPSHEDLLLLSEATMASLISHGLPVSENKTQQTPGTIKFLGQIISPNHLTYDAVPTVPIRSRWALPELQALLGEIQWVSKGTPTLRQPLHSLYCALQPHTDPRDQIYLNPSQVQSLVQLRQALSQNCRSRLVQTLPLLGAIMLTLTGTTTVVFQSKEQWPLVWLHAPLPHTSQCPWGQLLASAVLLLDKYTLQSYGLLCQTIHHNISTQTFNQFIQTSDHPSVPILLHHSHRFKNLGAQTGELWNTFLKTAAPLAPVKALMPVFTLSPVIINTAPCLFSDGSTSRAAYILWDKQILSQRSFPLPPPHKSAQRAELLGLLHGLSSARSWRCLNIFLDSKYLYHYLRTLALGTFQGRSSQAPFQALLPRLLSRKVVYLHHVRSHTNLPDPISRLNALTDALLITPVLQLAGKRTADGSEFEKRTADGSEFESPKKKAKVE

SEQ ID NO: 1484 - protein, 2013 aa, synthetic construct
MPAAKRVKLDGGDKKYSIGLDIGTNSVGWAVITDEYKVPSKKFKVLGNTDRHSIKKNLIGALLFDSGETAEATRLKRTARRRYTRRKNRICYLQEIFSNEMAKVDDSFFHRLEESFLVEEDKKHERHPIFGNIVDEVAYHEKYPTIYHLRKKLVDSTDKADLRLIYLALAHMIKFRGHFLIEGDLNPDNSDVDKLFIQLVQTYNQLFEENPINASGVDAKAILSARLSKSRRLENLIAQLPGEKKNGLFGNLIALSLGLTPNFKSNFDLAEDAKLQLSKDTYDDDLDNLLAQIGDQYADLFLAAKNLSDAILLSDILRVNTEITKAPLSASMIKRYDEHHQDLTLLKALVRQQLPEKYKEIFFDQSKNGYAGYIDGGASQEEFYKFIKPILEKMDGTEELLVKLNREDLLRKQRTFDNGSIPHQIHLGELHAILRRQEDFYPFLKDNREKIEKILTFRIPYYVGPLARGNSRFAWMTRKSEETITPWNFEEVVDKGASAQSFIERMTNFDKNLPNEKVLPKHSLLYEYFTVYNELTKVKYVTEGMRKPAFLSGEQKKAIVDLLFKTNRKVTVKQLKEDYFKKIECFDSVEISGVEDRFNASLGTYHDLLKIIKDKDFLDNEENEDILEDIVLTLTLFEDREMIEERLKTYAHLFDDKVMKQLKRRRYTGWGRLSRKLINGIRDKQSGKTILDFLKSDGFANRNFMQLIHDDSLTFKEDIQKAQVSGQGDSLHEHIANLAGSPAIKKGILQTVKVVDELVKVMGRHKPENIVIEMARENQTTQKGQKNSRERMKRIEEGIKELGSQILKEHPVENTQLQNEKLYLYYLQNGRDMYVDQELDINRLSDYDVDHIVPQSFLKDDSIDNKVLTRSDKARGKSDNVPSEEVVKKMKNYWRQLLNAKLITQRKFDNLTKAERGGLSELDKAGFIKRQLVETRQITKHVAQILDSRMNTKYDENDKLIREVKVITLKSKLVSDFRKDFQFYKVREINNYHHAHDAYLNAVVGTALIKKYPKLESEFVYGDYKVYDVRKMIAKSEQEIGKATAKYFFYSNIMNFFKTEITLANGEIRKRPLIETNGETGEIVWDKGRDFATVRKVLSMPQVNIVKKTEVQTGGFSKESILPKRNSDKLIARKKDWDPKKYGGFDSPTVAYSVLVVAKVEKGKSKKLKSVKELLGITIMERSSFEKNPIDFLEAKGYKEVKKDLIIKLPKYSLFELENGRKRMLASAGELQKGNELALPSKYVNFLYLASHYEKLKGSPEDNEQKQLFVEQHKHYLDEIIEQISEFSKRVILADANLDKVLSAYNKHRDKPIREQAENIIHLFTLTNLGAPAAFKYFDTTIDRKRYTSTKEVLDATLIHQSITGLYETRIDLSQLGGDGGGGSEAAAKPAPGGAVLGLEHLPRPPQISQFPLNPERLQALQHLVRKALEAGHIEPYTGPGNNPVFPVKKANGTWRFIHDLRATNSLTIDLSSSSPGPPDLSSLPTTLAHLQTIDLRDAFFQIPLPKQFQPYFAFTVPQQCNYGPGTRYAWKVLPQGFKNSPTLFQMQLAHILQPIRQAFPQCTILQYMDDILLASPSHEDLLLLSEATMASLISHGLPVSENKTQQTPGTIKFLGQIISPNHLTYDAVPTVPIRSRWALPELQALLGEIQWVSKGTPTLRQPLHSLYCALQPHTDPRDQIYLNPSQVQSLVQLRQALSQNCRSRLVQTLPLLGAIMLTLTGTTTVVFQSKEQWPLVWLHAPLPHTSQCPWGQLLASAVLLLDKYTLQSYGLLCQTIHHNISTQTFNQFIQTSDHPSVPILLHHSHRFKNLGAQTGELWNTFLKTAAPLAPVKALMPVFTLSPVIINTAPCLFSDGSTSRAAYILWDKQILSQRSFPLPPPHKSAQRAELLGLLHGLSSARSWRCLNIFLDSKYLYHYLRTLALGTFQGRSSQAPFQALLPRLLSRKVVYLHHVRSHTNLPDPISRLNALTDALLITPVLQLAGKRTADGSEFEKRTADGSEFESPKKKAKVE

SEQ ID NO: 1485 - protein, 2011 aa, synthetic construct
MPAAKRVKLDGGDKKYSIGLDIGTNSVGWAVITDEYKVPSKKFKVLGNTDRHSIKKNLIGALLFDSGETAEATRLKRTARRRYTRRKNRICYLQEIFSNEMAKVDDSFFHRLEESFLVEEDKKHERHPIFGNIVDEVAYHEKYPTIYHLRKKLVDSTDKADLRLIYLALAHMIKFRGHFLIEGDLNPDNSDVDKLFIQLVQTYNQLFEENPINASGVDAKAILSARLSKSRRLENLIAQLPGEKKNGLFGNLIALSLGLTPNFKSNFDLAEDAKLQLSKDTYDDDLDNLLAQIGDQYADLFLAAKNLSDAILLSDILRVNTEITKAPLSASMIKRYDEHHQDLTLLKALVRQQLPEKYKEIFFDQSKNGYAGYIDGGASQEEFYKFIKPILEKMDGTEELLVKLNREDLLRKQRTFDNGSIPHQIHLGELHAILRRQEDFYPFLKDNREKIEKILTFRIPYYVGPLARGNSRFAWMTRKSEETITPWNFEEVVDKGASAQSFIERMTNFDKNLPNEKVLPKHSLLYEYFTVYNELTKVKYVTEGMRKPAFLSGEQKKAIVDLLFKTNRKVTVKQLKEDYFKKIECFDSVEISGVEDRFNASLGTYHDLLKIIKDKDFLDNEENEDILEDIVLTLTLFEDREMIEERLKTYAHLFDDKVMKQLKRRRYTGWGRLSRKLINGIRDKQSGKTILDFLKSDGFANRNFMQLIHDDSLTFKEDIQKAQVSGQGDSLHEHIANLAGSPAIKKGILQTVKVVDELVKVMGRHKPENIVIEMARENQTTQKGQKNSRERMKRIEEGIKELGSQILKEHPVENTQLQNEKLYLYYLQNGRDMYVDQELDINRLSDYDVDHIVPQSFLKDDSIDNKVLTRSDKARGKSDNVPSEEVVKKMKNYWRQLLNAKLITQRKFDNLTKAERGGLSELDKAGFIKRQLVETRQITKHVAQILDSRMNTKYDENDKLIREVKVITLKSKLVSDFRKDFQFYKVREINNYHHAHDAYLNAVVGTALIKKYPKLESEFVYGDYKVYDVRKMIAKSEQEIGKATAKYFFYSNIMNFFKTEITLANGEIRKRPLIETNGETGEIVWDKGRDFATVRKVLSMPQVNIVKKTEVQTGGFSKESILPKRNSDKLIARKKDWDPKKYGGFDSPTVAYSVLVVAKVEKGKSKKLKSVKELLGITIMERSSFEKNPIDFLEAKGYKEVKKDLIIKLPKYSLFELENGRKRMLASAGELQKGNELALPSKYVNFLYLASHYEKLKGSPEDNEQKQLFVEQHKHYLDEIIEQISEFSKRVILADANLDKVLSAYNKHRDKPIREQAENIIHLFTLTNLGAPAAFKYFDTTIDRKRYTSTKEVLDATLIHQSITGLYETRIDLSQLGGDGGGGGGGSGSSGGAVLGLEHLPRPPQISQFPLNPERLQALQHLVRKALEAGHIEPYTGPGNNPVFPVKKANGTWRFIHDLRATNSLTIDLSSSSPGPPDLSSPPTTLAHLQTIDLRDAFFQIPLPKQFQPYFAFTVPQQCNYGPGTRYAWKVLPQGFKNSPTLFQMQLAHILQPIRQAFPQCTILQYMDDILLASPSHEDLLLLSEATMASLISHGLPVSENKTQQTPGTIKFLGQIISPNHLTYDAVPTVPIRSRWALPELQALLGEIQWVSKGTPTLRQPLHSLYCALQPHTDPRDQIYLNPSQVQSLVQLRQALSQNCRSRLVQTLPLLGAIMLTLTGTTTVVFQSKEQWPLVWLHAPLPHTSQCPWGQLLASAVLLLDKYTLQSYGLLCQTIHHNISTQTFNQFIQTSDHPSVPILLHHSHRFKNLGAQTGELWNTFLKTAAPLAPVKALMPVFTLSPVIINTAPCLFSDGSTSRAAYILWDKQILSQRSFPLPPPHKSAQRAELLGLLHGLSSARSWRCLNIFLDSKYLYHYLRTLALGTFQGRSSQAPFQALLPRLLSRKVVYLHHVRSHTNLPDPISRLNALTDALLITPVLQLAGKRTADGSEFEKRTADGSEFESPKKKAKVE

SEQ ID NO: 1486 - protein, 2013 aa, synthetic construct
MPAAKRVKLDGGDKKYSIGLDIGTNSVGWAVITDEYKVPSKKFKVLGNTDRHSIKKNLIGALLFDSGETAEATRLKRTARRRYTRRKNRICYLQEIFSNEMAKVDDSFFHRLEESFLVEEDKKHERHPIFGNIVDEVAYHEKYPTIYHLRKKLVDSTDKADLRLIYLALAHMIKFRGHFLIEGDLNPDNSDVDKLFIQLVQTYNQLFEENPINASGVDAKAILSARLSKSRRLENLIAQLPGEKKNGLFGNLIALSLGLTPNFKSNFDLAEDAKLQLSKDTYDDDLDNLLAQIGDQYADLFLAAKNLSDAILLSDILRVNTEITKAPLSASMIKRYDEHHQDLTLLKALVRQQLPEKYKEIFFDQSKNGYAGYIDGGASQEEFYKFIKPILEKMDGTEELLVKLNREDLLRKQRTFDNGSIPHQIHLGELHAILRRQEDFYPFLKDNREKIEKILTFRIPYYVGPLARGNSRFAWMTRKSEETITPWNFEEVVDKGASAQSFIERMTNFDKNLPNEKVLPKHSLLYEYFTVYNELTKVKYVTEGMRKPAFLSGEQKKAIVDLLFKTNRKVTVKQLKEDYFKKIECFDSVEISGVEDRFNASLGTYHDLLKIIKDKDFLDNEENEDILEDIVLTLTLFEDREMIEERLKTYAHLFDDKVMKQLKRRRYTGWGRLSRKLINGIRDKQSGKTILDFLKSDGFANRNFMQLIHDDSLTFKEDIQKAQVSGQGDSLHEHIANLAGSPAIKKGILQTVKVVDELVKVMGRHKPENIVIEMARENQTTQKGQKNSRERMKRIEEGIKELGSQILKEHPVENTQLQNEKLYLYYLQNGRDMYVDQELDINRLSDYDVDHIVPQSFLKDDSIDNKVLTRSDKARGKSDNVPSEEVVKKMKNYWRQLLNAKLITQRKFDNLTKAERGGLSELDKAGFIKRQLVETRQITKHVAQILDSRMNTKYDENDKLIREVKVITLKSKLVSDFRKDFQFYKVREINNYHHAHDAYLNAVVGTALIKKYPKLESEFVYGDYKVYDVRKMIAKSEQEIGKATAKYFFYSNIMNFFKTEITLANGEIRKRPLIETNGETGEIVWDKGRDFATVRKVLSMPQVNIVKKTEVQTGGFSKESILPKRNSDKLIARKKDWDPKKYGGFDSPTVAYSVLVVAKVEKGKSKKLKSVKELLGITIMERSSFEKNPIDFLEAKGYKEVKKDLIIKLPKYSLFELENGRKRMLASAGELQKGNELALPSKYVNFLYLASHYEKLKGSPEDNEQKQLFVEQHKHYLDEIIEQISEFSKRVILADANLDKVLSAYNKHRDKPIREQAENIIHLFTLTNLGAPAAFKYFDTTIDRKRYTSTKEVLDATLIHQSITGLYETRIDLSQLGGDGGEAAAKGSSGGSGGAVLGLEHLPRPPQISQFPLNPERLQALQHLVRKALEAGHIEPYTGPGNNPVFPVKKANGTWRFIHDLRATNSLTIDLSSSSPGPPDLSSPPTTLAHLQTIDLRDAFFQIPLPKQFQPYFAFTVPQQCNYGPGTRYAWKVLPQGFKNSPTLFQMQLAHILQPIRQAFPQCTILQYMDDILLASPSHEDLLLLSEATMASLISHGLPVSENKTQQTPGTIKFLGQIISPNHLTYDAVPTVPIRSRWALPELQALLGEIQWVSKGTPTLRQPLHSLYCALQPHTDPRDQIYLNPSQVQSLVQLRQALSQNCRSRLVQTLPLLGAIMLTLTGTTTVVFQSKEQWPLVWLHAPLPHTSQCPWGQLLASAVLLLDKYTLQSYGLLCQTIHHNISTQTFNQFIQTSDHPSVPILLHHSHRFKNLGAQTGELWNTFLKTAAPLAPVKALMPVFTLSPVIINTAPCLFSDGSTSRAAYILWDKQILSQRSFPLPPPHKSAQRAELLGLLHGLSSARSWRCLNIFLDSKYLYHYLRTLALGTFQGRSSQAPFQALLPRLLSRKVVYLHHVRSHTNLPDPISRLNALTDALLITPVLQLAGKRTADGSEFEKRTADGSEFESPKKKAKVE

SEQ ID NO: 1487 - protein, 2013 aa, synthetic construct
MPAAKRVKLDGGDKKYSIGLDIGTNSVGWAVITDEYKVPSKKFKVLGNTDRHSIKKNLIGALLFDSGETAEATRLKRTARRRYTRRKNRICYLQEIFSNEMAKVDDSFFHRLEESFLVEEDKKHERHPIFGNIVDEVAYHEKYPTIYHLRKKLVDSTDKADLRLIYLALAHMIKFRGHFLIEGDLNPDNSDVDKLFIQLVQTYNQLFEENPINASGVDAKAILSARLSKSRRLENLIAQLPGEKKNGLFGNLIALSLGLTPNFKSNFDLAEDAKLQLSKDTYDDDLDNLLAQIGDQYADLFLAAKNLSDAILLSDILRVNTEITKAPLSASMIKRYDEHHQDLTLLKALVRQQLPEKYKEIFFDQSKNGYAGYIDGGASQEEFYKFIKPILEKMDGTEELLVKLNREDLLRKQRTFDNGSIPHQIHLGELHAILRRQEDFYPFLKDNREKIEKILTFRIPYYVGPLARGNSRFAWMTRKSEETITPWNFEEVVDKGASAQSFIERMTNFDKNLPNEKVLPKHSLLYEYFTVYNELTKVKYVTEGMRKPAFLSGEQKKAIVDLLFKTNRKVTVKQLKEDYFKKIECFDSVEISGVEDRFNASLGTYHDLLKIIKDKDFLDNEENEDILEDIVLTLTLFEDREMIEERLKTYAHLFDDKVMKQLKRRRYTGWGRLSRKLINGIRDKQSGKTILDFLKSDGFANRNFMQLIHDDSLTFKEDIQKAQVSGQGDSLHEHIANLAGSPAIKKGILQTVKVVDELVKVMGRHKPENIVIEMARENQTTQKGQKNSRERMKRIEEGIKELGSQILKEHPVENTQLQNEKLYLYYLQNGRDMYVDQELDINRLSDYDVDHIVPQSFLKDDSIDNKVLTRSDKARGKSDNVPSEEVVKKMKNYWRQLLNAKLITQRKFDNLTKAERGGLSELDKAGFIKRQLVETRQITKHVAQILDSRMNTKYDENDKLIREVKVITLKSKLVSDFRKDFQFYKVREINNYHHAHDAYLNAVVGTALIKKYPKLESEFVYGDYKVYDVRKMIAKSEQEIGKATAKYFFYSNIMNFFKTEITLANGEIRKRPLIETNGETGEIVWDKGRDFATVRKVLSMPQVNIVKKTEVQTGGFSKESILPKRNSDKLIARKKDWDPKKYGGFDSPTVAYSVLVVAKVEKGKSKKLKSVKELLGITIMERSSFEKNPIDFLEAKGYKEVKKDLIIKLPKYSLFELENGRKRMLASAGELQKGNELALPSKYVNFLYLASHYEKLKGSPEDNEQKQLFVEQHKHYLDEIIEQISEFSKRVILADANLDKVLSAYNKHRDKPIREQAENIIHLFTLTNLGAPAAFKYFDTTIDRKRYTSTKEVLDATLIHQSITGLYETRIDLSQLGGDGGPAPEAAAKGGGGGAVLGLEHLPRPPQISQFPLNPERLQALQHLVRKALEAGHIEPYTGPGNNPVFPVKKANGTWRFIHDLRATNSLTIDLSSSSPGPPDLSSPPTTLAHLQTIDLRDAFFQIPLPKQFQPYFAFTVPQQCNYGPGTRYAWKVLPQGFKNSPTLFQMQLAHILQPIRQAFPQCTILQYMDDILLASPSHEDLLLLSEATMASLISHGLPVSENKTQQTPGTIKFLGQIISPNHLTYDAVPTVPIRSRWALPELQALLGEIQWVSKGTPTLRQPLHSLYCALQPHTDPRDQIYLNPSQVQSLVQLRQALSQNCRSRLVQTLPLLGAIMLTLTGTTTVVFQSKEQWPLVWLHAPLPHTSQCPWGQLLASAVLLLDKYTLQSYGLLCQTIHHNISTQTFNQFIQTSDHPSVPILLHHSHRFKNLGAQTGELWNTFLKTAAPLAPVKALMPVFTLSPVIINTAPCLFSDGSTSRAAYILWDKQILSQRSFPLPPPHKSAQRAELLGLLHGLSSARSWRCLNIFLDSKYLYHYLRTLALGTFQGRSSQAPFQALLPRLLSRKVVYLHHVRSHTNLPDPISRLNALTDALLITPVLQLAGKRTADGSEFEKRTADGSEFESPKKKAKVE

SEQ ID NO: 1488 - protein, 2017 aa, synthetic construct
MPAAKRVKLDGGDKKYSIGLDIGTNSVGWAVITDEYKVPSKKFKVLGNTDRHSIKKNLIGALLFDSGETAEATRLKRTARRRYTRRKNRICYLQEIFSNEMAKVDDSFFHRLEESFLVEEDKKHERHPIFGNIVDEVAYHEKYPTIYHLRKKLVDSTDKADLRLIYLALAHMIKFRGHFLIEGDLNPDNSDVDKLFIQLVQTYNQLFEENPINASGVDAKAILSARLSKSRRLENLIAQLPGEKKNGLFGNLIALSLGLTPNFKSNFDLAEDAKLQLSKDTYDDDLDNLLAQIGDQYADLFLAAKNLSDAILLSDILRVNTEITKAPLSASMIKRYDEHHQDLTLLKALVRQQLPEKYKEIFFDQSKNGYAGYIDGGASQEEFYKFIKPILEKMDGTEELLVKLNREDLLRKQRTFDNGSIPHQIHLGELHAILRRQEDFYPFLKDNREKIEKILTFRIPYYVGPLARGNSRFAWMTRKSEETITPWNFEEVVDKGASAQSFIERMTNFDKNLPNEKVLPKHSLLYEYFTVYNELTKVKYVTEGMRKPAFLSGEQKKAIVDLLFKTNRKVTVKQLKEDYFKKIECFDSVEISGVEDRFNASLGTYHDLLKIIKDKDFLDNEENEDILEDIVLTLTLFEDREMIEERLKTYAHLFDDKVMKQLKRRRYTGWGRLSRKLINGIRDKQSGKTILDFLKSDGFANRNFMQLIHDDSLTFKEDIQKAQVSGQGDSLHEHIANLAGSPAIKKGILQTVKVVDELVKVMGRHKPENIVIEMARENQTTQKGQKNSRERMKRIEEGIKELGSQILKEHPVENTQLQNEKLYLYYLQNGRDMYVDQELDINRLSDYDVDHIVPQSFLKDDSIDNKVLTRSDKARGKSDNVPSEEVVKKMKNYWRQLLNAKLITQRKFDNLTKAERGGLSELDKAGFIKRQLVETRQITKHVAQILDSRMNTKYDENDKLIREVKVITLKSKLVSDFRKDFQFYKVREINNYHHAHDAYLNAVVGTALIKKYPKLESEFVYGDYKVYDVRKMIAKSEQEIGKATAKYFFYSNIMNFFKTEITLANGEIRKRPLIETNGETGEIVWDKGRDFATVRKVLSMPQVNIVKKTEVQTGGFSKESILPKRNSDKLIARKKDWDPKKYGGFDSPTVAYSVLVVAKVEKGKSKKLKSVKELLGITIMERSSFEKNPIDFLEAKGYKEVKKDLIIKLPKYSLFELENGRKRMLASAGELQKGNELALPSKYVNFLYLASHYEKLKGSPEDNEQKQLFVEQHKHYLDEIIEQISEFSKRVILADANLDKVLSAYNKHRDKPIREQAENIIHLFTLTNLGAPAAFKYFDTTIDRKRYTSTKEVLDATLIHQSITGLYETRIDLSQLGGDGGGGGGSEAAAKGGGGSGGAVLGLEHLPRPPEISQFPLNPERLQALQHLVRKALEAGHIEPYTGPGNNPVFPVKKANGTWRFIHDLRATNSLTIDLSSSSPGPPDLSSLPTTLAHLQTIDLKDAFFQIPLPKQFQPYFAFTVPQQCNYGPGTRYAWRVLPQGFKNSPTLFEMQLAHILQPIRQAFPQCTILQYMDDILLASPSHADLQLLSEATMASLISHGLPVSENKTQQTPGTIKFLGQIISPNHLTYDAVPKVPIRSRWALPELQALLGEIQWVSKGTPTLRQPLHSLYCALQRHTDPRDQIYLNPSQVQSLVQLRQALSQNCRSRLVQTLPLLGAIMLTLTGTTTVVFQSKQQWPLVWLHAPLPHTSQCPWGQLLASAVLLLDKYTLQSYGLLCQTIHHNISTQTFNQFIQTSDHPSVPILLHHSHRFKNLGAQTGELWNTFLKTTAPLAPVKALMPVFTLSPVIINTAPCLFSDGSTSQAAYILWDKHILSQRSFPLPPPHKSAQRAELLGLLHGLSSARSWRCLNIFLDSKYLYHYLRTLALGTFQGRSSQAPFQALLPRLLSRKVVYLHHVRSHTNLPDPISRLNALTDALLITPVLQLAGKRTADGSEFEKRTADGSEFESPKKKAKVE

SEQ ID NO: 1489 - protein, 2017 aa, synthetic construct
MPAAKRVKLDGGDKKYSIGLDIGTNSVGWAVITDEYKVPSKKFKVLGNTDRHSIKKNLIGALLFDSGETAEATRLKRTARRRYTRRKNRICYLQEIFSNEMAKVDDSFFHRLEESFLVEEDKKHERHPIFGNIVDEVAYHEKYPTIYHLRKKLVDSTDKADLRLIYLALAHMIKFRGHFLIEGDLNPDNSDVDKLFIQLVQTYNQLFEENPINASGVDAKAILSARLSKSRRLENLIAQLPGEKKNGLFGNLIALSLGLTPNFKSNFDLAEDAKLQLSKDTYDDDLDNLLAQIGDQYADLFLAAKNLSDAILLSDILRVNTEITKAPLSASMIKRYDEHHQDLTLLKALVRQQLPEKYKEIFFDQSKNGYAGYIDGGASQEEFYKFIKPILEKMDGTEELLVKLNREDLLRKQRTFDNGSIPHQIHLGELHAILRRQEDFYPFLKDNREKIEKILTFRIPYYVGPLARGNSRFAWMTRKSEETITPWNFEEVVDKGASAQSFIERMTNFDKNLPNEKVLPKHSLLYEYFTVYNELTKVKYVTEGMRKPAFLSGEQKKAIVDLLFKTNRKVTVKQLKEDYFKKIECFDSVEISGVEDRFNASLGTYHDLLKIIKDKDFLDNEENEDILEDIVLTLTLFEDREMIEERLKTYAHLFDDKVMKQLKRRRYTGWGRLSRKLINGIRDKQSGKTILDFLKSDGFANRNFMQLIHDDSLTFKEDIQKAQVSGQGDSLHEHIANLAGSPAIKKGILQTVKVVDELVKVMGRHKPENIVIEMARENQTTQKGQKNSRERMKRIEEGIKELGSQILKEHPVENTQLQNEKLYLYYLQNGRDMYVDQELDINRLSDYDVDHIVPQSFLKDDSIDNKVLTRSDKARGKSDNVPSEEVVKKMKNYWRQLLNAKLITQRKFDNLTKAERGGLSELDKAGFIKRQLVETRQITKHVAQILDSRMNTKYDENDKLIREVKVITLKSKLVSDFRKDFQFYKVREINNYHHAHDAYLNAVVGTALIKKYPKLESEFVYGDYKVYDVRKMIAKSEQEIGKATAKYFFYSNIMNFFKTEITLANGEIRKRPLIETNGETGEIVWDKGRDFATVRKVLSMPQVNIVKKTEVQTGGFSKESILPKRNSDKLIARKKDWDPKKYGGFDSPTVAYSVLVVAKVEKGKSKKLKSVKELLGITIMERSSFEKNPIDFLEAKGYKEVKKDLIIKLPKYSLFELENGRKRMLASAGELQKGNELALPSKYVNFLYLASHYEKLKGSPEDNEQKQLFVEQHKHYLDEIIEQISEFSKRVILADANLDKVLSAYNKHRDKPIREQAENIIHLFTLTNLGAPAAFKYFDTTIDRKRYTSTKEVLDATLIHQSITGLYETRIDLSQLGGDGGEAAAKEAAAKEAAAKGGAVLGLEHLPRPPEISQFPLNPERLQALQHLVRKALEAGHIEPYTGPGNNPVFPVKKANGTWRFIHDLRATNSLTIDLSSSSPGPPDLSSLPTTLAHLQTIDLKDAFFQIPLPKQFQPYFAFTVPQQCNYGPGTRYAWRVLPQGFKNSPTLFEMQLAHILQPIRQAFPQCTILQYMDDILLASPSHADLQLLSEATMASLISHGLPVSENKTQQTPGTIKFLGQIISPNHLTYDAVPKVPIRSRWALPELQALLGEIQWVSKGTPTLRQPLHSLYCALQRHTDPRDQIYLNPSQVQSLVQLRQALSQNCRSRLVQTLPLLGAIMLTLTGTTTVVFQSKQQWPLVWLHAPLPHTSQCPWGQLLASAVLLLDKYTLQSYGLLCQTIHHNISTQTFNQFIQTSDHPSVPILLHHSHRFKNLGAQTGELWNTFLKTTAPLAPVKALMPVFTLSPVIINTAPCLFSDGSTSQAAYILWDKHILSQRSFPLPPPHKSAQRAELLGLLHGLSSARSWRCLNIFLDSKYLYHYLRTLALGTFQGRSSQAPFQALLPRLLSRKVVYLHHVRSHTNLPDPISRLNALTDALLITPVLQLAGKRTADGSEFEKRTADGSEFESPKKKAKVE

SEQ ID NO: 1490 - protein, 2010 aa, synthetic construct
MPAAKRVKLDGGDKKYSIGLDIGTNSVGWAVITDEYKVPSKKFKVLGNTDRHSIKKNLIGALLFDSGETAEATRLKRTARRRYTRRKNRICYLQEIFSNEMAKVDDSFFHRLEESFLVEEDKKHERHPIFGNIVDEVAYHEKYPTIYHLRKKLVDSTDKADLRLIYLALAHMIKFRGHFLIEGDLNPDNSDVDKLFIQLVQTYNQLFEENPINASGVDAKAILSARLSKSRRLENLIAQLPGEKKNGLFGNLIALSLGLTPNFKSNFDLAEDAKLQLSKDTYDDDLDNLLAQIGDQYADLFLAAKNLSDAILLSDILRVNTEITKAPLSASMIKRYDEHHQDLTLLKALVRQQLPEKYKEIFFDQSKNGYAGYIDGGASQEEFYKFIKPILEKMDGTEELLVKLNREDLLRKQRTFDNGSIPHQIHLGELHAILRRQEDFYPFLKDNREKIEKILTFRIPYYVGPLARGNSRFAWMTRKSEETITPWNFEEVVDKGASAQSFIERMTNFDKNLPNEKVLPKHSLLYEYFTVYNELTKVKYVTEGMRKPAFLSGEQKKAIVDLLFKTNRKVTVKQLKEDYFKKIECFDSVEISGVEDRFNASLGTYHDLLKIIKDKDFLDNEENEDILEDIVLTLTLFEDREMIEERLKTYAHLFDDKVMKQLKRRRYTGWGRLSRKLINGIRDKQSGKTILDFLKSDGFANRNFMQLIHDDSLTFKEDIQKAQVSGQGDSLHEHIANLAGSPAIKKGILQTVKVVDELVKVMGRHKPENIVIEMARENQTTQKGQKNSRERMKRIEEGIKELGSQILKEHPVENTQLQNEKLYLYYLQNGRDMYVDQELDINRLSDYDVDHIVPQSFLKDDSIDNKVLTRSDKARGKSDNVPSEEVVKKMKNYWRQLLNAKLITQRKFDNLTKAERGGLSELDKAGFIKRQLVETRQITKHVAQILDSRMNTKYDENDKLIREVKVITLKSKLVSDFRKDFQFYKVREINNYHHAHDAYLNAVVGTALIKKYPKLESEFVYGDYKVYDVRKMIAKSEQEIGKATAKYFFYSNIMNFFKTEITLANGEIRKRPLIETNGETGEIVWDKGRDFATVRKVLSMPQVNIVKKTEVQTGGFSKESILPKRNSDKLIARKKDWDPKKYGGFDSPTVAYSVLVVAKVEKGKSKKLKSVKELLGITIMERSSFEKNPIDFLEAKGYKEVKKDLIIKLPKYSLFELENGRKRMLASAGELQKGNELALPSKYVNFLYLASHYEKLKGSPEDNEQKQLFVEQHKHYLDEIIEQISEFSKRVILADANLDKVLSAYNKHRDKPIREQAENIIHLFTLTNLGAPAAFKYFDTTIDRKRYTSTKEVLDATLIHQSITGLYETRIDLSQLGGDGGGGGEAAAKGGAVLGLEHLPRPPEISQFPLNPERLQALQHLVRKALEAGHIEPYTGPGNNPVFPVKKANGTWRFIHDLRATNSLTIDLSSSSPGPPDLSSLPTTLAHLQTIDLKDAFFQIPLPKQFQPYFAFTVPQQCNYGPGTRYAWRVLPQGFKNSPTLFEMQLAHILQPIRQAFPQCTILQYMDDILLASPSHADLQLLSEATMASLISHGLPVSENKTQQTPGTIKFLGQIISPNHLTYDAVPKVPIRSRWALPELQALLGEIQWVSKGTPTLRQPLHSLYCALQRHTDPRDQIYLNPSQVQSLVQLRQALSQNCRSRLVQTLPLLGAIMLTLTGTTTVVFQSKQQWPLVWLHAPLPHTSQCPWGQLLASAVLLLDKYTLQSYGLLCQTIHHNISTQTFNQFIQTSDHPSVPILLHHSHRFKNLGAQTGELWNTFLKTTAPLAPVKALMPVFTLSPVIINTAPCLFSDGSTSQAAYILWDKHILSQRSFPLPPPHKSAQRAELLGLLHGLSSARSWRCLNIFLDSKYLYHYLRTLALGTFQGRSSQAPFQALLPRLLSRKVVYLHHVRSHTNLPDPISRLNALTDALLITPVLQLAGKRTADGSEFEKRTADGSEFESPKKKAKVE

SEQ ID NO: 1491 - protein, 2027 aa, synthetic construct
MPAAKRVKLDGGDKKYSIGLDIGTNSVGWAVITDEYKVPSKKFKVLGNTDRHSIKKNLIGALLFDSGETAEATRLKRTARRRYTRRKNRICYLQEIFSNEMAKVDDSFFHRLEESFLVEEDKKHERHPIFGNIVDEVAYHEKYPTIYHLRKKLVDSTDKADLRLIYLALAHMIKFRGHFLIEGDLNPDNSDVDKLFIQLVQTYNQLFEENPINASGVDAKAILSARLSKSRRLENLIAQLPGEKKNGLFGNLIALSLGLTPNFKSNFDLAEDAKLQLSKDTYDDDLDNLLAQIGDQYADLFLAAKNLSDAILLSDILRVNTEITKAPLSASMIKRYDEHHQDLTLLKALVRQQLPEKYKEIFFDQSKNGYAGYIDGGASQEEFYKFIKPILEKMDGTEELLVKLNREDLLRKQRTFDNGSIPHQIHLGELHAILRRQEDFYPFLKDNREKIEKILTFRIPYYVGPLARGNSRFAWMTRKSEETITPWNFEEVVDKGASAQSFIERMTNFDKNLPNEKVLPKHSLLYEYFTVYNELTKVKYVTEGMRKPAFLSGEQKKAIVDLLFKTNRKVTVKQLKEDYFKKIECFDSVEISGVEDRFNASLGTYHDLLKIIKDKDFLDNEENEDILEDIVLTLTLFEDREMIEERLKTYAHLFDDKVMKQLKRRRYTGWGRLSRKLINGIRDKQSGKTILDFLKSDGFANRNFMQLIHDDSLTFKEDIQKAQVSGQGDSLHEHIANLAGSPAIKKGILQTVKVVDELVKVMGRHKPENIVIEMARENQTTQKGQKNSRERMKRIEEGIKELGSQILKEHPVENTQLQNEKLYLYYLQNGRDMYVDQELDINRLSDYDVDHIVPQSFLKDDSIDNKVLTRSDKARGKSDNVPSEEVVKKMKNYWRQLLNAKLITQRKFDNLTKAERGGLSELDKAGFIKRQLVETRQITKHVAQILDSRMNTKYDENDKLIREVKVITLKSKLVSDFRKDFQFYKVREINNYHHAHDAYLNAVVGTALIKKYPKLESEFVYGDYKVYDVRKMIAKSEQEIGKATAKYFFYSNIMNFFKTEITLANGEIRKRPLIETNGETGEIVWDKGRDFATVRKVLSMPQVNIVKKTEVQTGGFSKESILPKRNSDKLIARKKDWDPKKYGGFDSPTVAYSVLVVAKVEKGKSKKLKSVKELLGITIMERSSFEKNPIDFLEAKGYKEVKKDLIIKLPKYSLFELENGRKRMLASAGELQKGNELALPSKYVNFLYLASHYEKLKGSPEDNEQKQLFVEQHKHYLDEIIEQISEFSKRVILADANLDKVLSAYNKHRDKPIREQAENIIHLFTLTNLGAPAAFKYFDTTIDRKRYTSTKEVLDATLIHQSITGLYETRIDLSQLGGDGGGGGGSGGGGSGGGGSGGGGSGGGGSGGAVLGLEHLPRPPEISQFPLNPERLQALQHLVRKALEAGHIEPYTGPGNNPVFPVKKANGTWRFIHDLRATNSLTIDLSSSSPGPPDLSSLPTTLAHLQTIDLKDAFFQIPLPKQFQPYFAFTVPQQCNYGPGTRYAWRVLPQGFKNSPTLFEMQLAHILQPIRQAFPQCTILQYMDDILLASPSHADLQLLSEATMASLISHGLPVSENKTQQTPGTIKFLGQIISPNHLTYDAVPKVPIRSRWALPELQALLGEIQWVSKGTPTLRQPLHSLYCALQRHTDPRDQIYLNPSQVQSLVQLRQALSQNCRSRLVQTLPLLGAIMLTLTGTTTVVFQSKQQWPLVWLHAPLPHTSQCPWGQLLASAVLLLDKYTLQSYGLLCQTIHHNISTQTFNQFIQTSDHPSVPILLHHSHRFKNLGAQTGELWNTFLKTTAPLAPVKALMPVFTLSPVIINTAPCLFSDGSTSQAAYILWDKHILSQRSFPLPPPHKSAQRAELLGLLHGLSSARSWRCLNIFLDSKYLYHYLRTLALGTFQGRSSQAPFQALLPRLLSRKVVYLHHVRSHTNLPDPISRLNALTDALLITPVLQLAGKRTADGSEFEKRTADGSEFESPKKKAKVE

SEQ ID NO: 1492 - protein, 2011 aa, synthetic construct
MPAAKRVKLDGGDKKYSIGLDIGTNSVGWAVITDEYKVPSKKFKVLGNTDRHSIKKNLIGALLFDSGETAEATRLKRTARRRYTRRKNRICYLQEIFSNEMAKVDDSFFHRLEESFLVEEDKKHERHPIFGNIVDEVAYHEKYPTIYHLRKKLVDSTDKADLRLIYLALAHMIKFRGHFLIEGDLNPDNSDVDKLFIQLVQTYNQLFEENPINASGVDAKAILSARLSKSRRLENLIAQLPGEKKNGLFGNLIALSLGLTPNFKSNFDLAEDAKLQLSKDTYDDDLDNLLAQIGDQYADLFLAAKNLSDAILLSDILRVNTEITKAPLSASMIKRYDEHHQDLTLLKALVRQQLPEKYKEIFFDQSKNGYAGYIDGGASQEEFYKFIKPILEKMDGTEELLVKLNREDLLRKQRTFDNGSIPHQIHLGELHAILRRQEDFYPFLKDNREKIEKILTFRIPYYVGPLARGNSRFAWMTRKSEETITPWNFEEVVDKGASAQSFIERMTNFDKNLPNEKVLPKHSLLYEYFTVYNELTKVKYVTEGMRKPAFLSGEQKKAIVDLLFKTNRKVTVKQLKEDYFKKIECFDSVEISGVEDRFNASLGTYHDLLKIIKDKDFLDNEENEDILEDIVLTLTLFEDREMIEERLKTYAHLFDDKVMKQLKRRRYTGWGRLSRKLINGIRDKQSGKTILDFLKSDGFANRNFMQLIHDDSLTFKEDIQKAQVSGQGDSLHEHIANLAGSPAIKKGILQTVKVVDELVKVMGRHKPENIVIEMARENQTTQKGQKNSRERMKRIEEGIKELGSQILKEHPVENTQLQNEKLYLYYLQNGRDMYVDQELDINRLSDYDVDHIVPQSFLKDDSIDNKVLTRSDKARGKSDNVPSEEVVKKMKNYWRQLLNAKLITQRKFDNLTKAERGGLSELDKAGFIKRQLVETRQITKHVAQILDSRMNTKYDENDKLIREVKVITLKSKLVSDFRKDFQFYKVREINNYHHAHDAYLNAVVGTALIKKYPKLESEFVYGDYKVYDVRKMIAKSEQEIGKATAKYFFYSNIMNFFKTEITLANGEIRKRPLIETNGETGEIVWDKGRDFATVRKVLSMPQVNIVKKTEVQTGGFSKESILPKRNSDKLIARKKDWDPKKYGGFDSPTVAYSVLVVAKVEKGKSKKLKSVKELLGITIMERSSFEKNPIDFLEAKGYKEVKKDLIIKLPKYSLFELENGRKRMLASAGELQKGNELALPSKYVNFLYLASHYEKLKGSPEDNEQKQLFVEQHKHYLDEIIEQISEFSKRVILADANLDKVLSAYNKHRDKPIREQAENIIHLFTLTNLGAPAAFKYFDTTIDRKRYTSTKEVLDATLIHQSITGLYETRIDLSQLGGDGGGGGGGSPAPGGAVLGLEHLPRPPEISQFPLNPERLQALQHLVRKALEAGHIEPYTGPGNNPVFPVKKANGTWRFIHDLRATNSLTIDLSSSSPGPPDLSSLPTTLAHLQTIDLKDAFFQIPLPKQFQPYFAFTVPQQCNYGPGTRYAWRVLPQGFKNSPTLFQMQLAHILQPIRQAFPQCTILQYMDDILLASPSHADLQLLSEATMASLISHGLPVSENKTQQTPGTIKFLGQIISPNHLTYDAVPKVPIRSRWALPELQALLGEIQWVSKGTPTLRQPLHSLYCALQPHTDPRDQIYLNPSQVQSLVQLRQALSQNCRSRLVQTLPLLGAIMLTLTGTTTVVFQSKQQWPLVWLHAPLPHTSQCPWGQLLASAVLLLDKYTLQSYGLLCQTIHHNISTQTFNQFIQTSDHPSVPILLHHSHRFKNLGAQTGELWNTFLKTTAPLAPVKALMPVFTLSPVIINTAPCLFSDGSTSQAAYILWDKHILSQRSFPLPPPHKSAQRAELLGLLHGLSSARSWRCLNIFLDSKYLYHYLRTLALGTFQGRSSQAPFQALLPRLLSRKVVYLHHVRSHTNLPDPISRLNALTDALLITPVLQLAGKRTADGSEFEKRTADGSEFESPKKKAKVE

SEQ ID NO: 1493 - protein, 2008 aa, synthetic construct
MPAAKRVKLDGGDKKYSIGLDIGTNSVGWAVITDEYKVPSKKFKVLGNTDRHSIKKNLIGALLFDSGETAEATRLKRTARRRYTRRKNRICYLQEIFSNEMAKVDDSFFHRLEESFLVEEDKKHERHPIFGNIVDEVAYHEKYPTIYHLRKKLVDSTDKADLRLIYLALAHMIKFRGHFLIEGDLNPDNSDVDKLFIQLVQTYNQLFEENPINASGVDAKAILSARLSKSRRLENLIAQLPGEKKNGLFGNLIALSLGLTPNFKSNFDLAEDAKLQLSKDTYDDDLDNLLAQIGDQYADLFLAAKNLSDAILLSDILRVNTEITKAPLSASMIKRYDEHHQDLTLLKALVRQQLPEKYKEIFFDQSKNGYAGYIDGGASQEEFYKFIKPILEKMDGTEELLVKLNREDLLRKQRTFDNGSIPHQIHLGELHAILRRQEDFYPFLKDNREKIEKILTFRIPYYVGPLARGNSRFAWMTRKSEETITPWNFEEVVDKGASAQSFIERMTNFDKNLPNEKVLPKHSLLYEYFTVYNELTKVKYVTEGMRKPAFLSGEQKKAIVDLLFKTNRKVTVKQLKEDYFKKIECFDSVEISGVEDRFNASLGTYHDLLKIIKDKDFLDNEENEDILEDIVLTLTLFEDREMIEERLKTYAHLFDDKVMKQLKRRRYTGWGRLSRKLINGIRDKQSGKTILDFLKSDGFANRNFMQLIHDDSLTFKEDIQKAQVSGQGDSLHEHIANLAGSPAIKKGILQTVKVVDELVKVMGRHKPENIVIEMARENQTTQKGQKNSRERMKRIEEGIKELGSQILKEHPVENTQLQNEKLYLYYLQNGRDMYVDQELDINRLSDYDVDHIVPQSFLKDDSIDNKVLTRSDKARGKSDNVPSEEVVKKMKNYWRQLLNAKLITQRKFDNLTKAERGGLSELDKAGFIKRQLVETRQITKHVAQILDSRMNTKYDENDKLIREVKVITLKSKLVSDFRKDFQFYKVREINNYHHAHDAYLNAVVGTALIKKYPKLESEFVYGDYKVYDVRKMIAKSEQEIGKATAKYFFYSNIMNFFKTEITLANGEIRKRPLIETNGETGEIVWDKGRDFATVRKVLSMPQVNIVKKTEVQTGGFSKESILPKRNSDKLIARKKDWDPKKYGGFDSPTVAYSVLVVAKVEKGKSKKLKSVKELLGITIMERSSFEKNPIDFLEAKGYKEVKKDLIIKLPKYSLFELENGRKRMLASAGELQKGNELALPSKYVNFLYLASHYEKLKGSPEDNEQKQLFVEQHKHYLDEIIEQISEFSKRVILADANLDKVLSAYNKHRDKPIREQAENIIHLFTLTNLGAPAAFKYFDTTIDRKRYTSTKEVLDATLIHQSITGLYETRIDLSQLGGDGGPAPGGSGGAVLGLEHLPRPPEISQFPLNPERLQALQHLVRKALEAGHIEPYTGPGNNPVFPVKKANGTWRFIHDLRATNSLTIDLSSSSPGPPDLSSLPTTLAHLQTIDLKDAFFQIPLPKQFQPYFAFTVPQQCNYGPGTRYAWRVLPQGFKNSPTLFQMQLAHILQPIRQAFPQCTILQYMDDILLASPSHADLQLLSEATMASLISHGLPVSENKTQQTPGTIKFLGQIISPNHLTYDAVPKVPIRSRWALPELQALLGEIQWVSKGTPTLRQPLHSLYCALQPHTDPRDQIYLNPSQVQSLVQLRQALSQNCRSRLVQTLPLLGAIMLTLTGTTTVVFQSKQQWPLVWLHAPLPHTSQCPWGQLLASAVLLLDKYTLQSYGLLCQTIHHNISTQTFNQFIQTSDHPSVPILLHHSHRFKNLGAQTGELWNTFLKTTAPLAPVKALMPVFTLSPVIINTAPCLFSDGSTSQAAYILWDKHILSQRSFPLPPPHKSAQRAELLGLLHGLSSARSWRCLNIFLDSKYLYHYLRTLALGTFQGRSSQAPFQALLPRLLSRKVVYLHHVRSHTNLPDPISRLNALTDALLITPVLQLAGKRTADGSEFEKRTADGSEFESPKKKAKVE

SEQ ID NO: 1494 - protein, 2011 aa, synthetic construct
MPAAKRVKLDGGDKKYSIGLDIGTNSVGWAVITDEYKVPSKKFKVLGNTDRHSIKKNLIGALLFDSGETAEATRLKRTARRRYTRRKNRICYLQEIFSNEMAKVDDSFFHRLEESFLVEEDKKHERHPIFGNIVDEVAYHEKYPTIYHLRKKLVDSTDKADLRLIYLALAHMIKFRGHFLIEGDLNPDNSDVDKLFIQLVQTYNQLFEENPINASGVDAKAILSARLSKSRRLENLIAQLPGEKKNGLFGNLIALSLGLTPNFKSNFDLAEDAKLQLSKDTYDDDLDNLLAQIGDQYADLFLAAKNLSDAILLSDILRVNTEITKAPLSASMIKRYDEHHQDLTLLKALVRQQLPEKYKEIFFDQSKNGYAGYIDGGASQEEFYKFIKPILEKMDGTEELLVKLNREDLLRKQRTFDNGSIPHQIHLGELHAILRRQEDFYPFLKDNREKIEKILTFRIPYYVGPLARGNSRFAWMTRKSEETITPWNFEEVVDKGASAQSFIERMTNFDKNLPNEKVLPKHSLLYEYFTVYNELTKVKYVTEGMRKPAFLSGEQKKAIVDLLFKTNRKVTVKQLKEDYFKKIECFDSVEISGVEDRFNASLGTYHDLLKIIKDKDFLDNEENEDILEDIVLTLTLFEDREMIEERLKTYAHLFDDKVMKQLKRRRYTGWGRLSRKLINGIRDKQSGKTILDFLKSDGFANRNFMQLIHDDSLTFKEDIQKAQVSGQGDSLHEHIANLAGSPAIKKGILQTVKVVDELVKVMGRHKPENIVIEMARENQTTQKGQKNSRERMKRIEEGIKELGSQILKEHPVENTQLQNEKLYLYYLQNGRDMYVDQELDINRLSDYDVDHIVPQSFLKDDSIDNKVLTRSDKARGKSDNVPSEEVVKKMKNYWRQLLNAKLITQRKFDNLTKAERGGLSELDKAGFIKRQLVETRQITKHVAQILDSRMNTKYDENDKLIREVKVITLKSKLVSDFRKDFQFYKVREINNYHHAHDAYLNAVVGTALIKKYPKLESEFVYGDYKVYDVRKMIAKSEQEIGKATAKYFFYSNIMNFFKTEITLANGEIRKRPLIETNGETGEIVWDKGRDFATVRKVLSMPQVNIVKKTEVQTGGFSKESILPKRNSDKLIARKKDWDPKKYGGFDSPTVAYSVLVVAKVEKGKSKKLKSVKELLGITIMERSSFEKNPIDFLEAKGYKEVKKDLIIKLPKYSLFELENGRKRMLASAGELQKGNELALPSKYVNFLYLASHYEKLKGSPEDNEQKQLFVEQHKHYLDEIIEQISEFSKRVILADANLDKVLSAYNKHRDKPIREQAENIIHLFTLTNLGAPAAFKYFDTTIDRKRYTSTKEVLDATLIHQSITGLYETRIDLSQLGGDGGGGGPAPGGSGGAVLGLEHLPRPPEISQFPLNPERLQALQHLVRKALEAGHIEPYTGPGNNPVFPVKKANGTWRFIHDLRATNSLTIDLSSSSPGPPDLSSLPTTLAHLQTIDLKDAFFQIPLPKQFQPYFAFTVPQQCNYGPGTRYAWRVLPQGFKNSPTLFQMQLAHILQPIRQAFPQCTILQYMDDILLASPSHADLQLLSEATMASLISHGLPVSENKTQQTPGTIKFLGQIISPNHLTYDAVPKVPIRSRWALPELQALLGEIQWVSKGTPTLRQPLHSLYCALQPHTDPRDQIYLNPSQVQSLVQLRQALSQNCRSRLVQTLPLLGAIMLTLTGTTTVVFQSKQQWPLVWLHAPLPHTSQCPWGQLLASAVLLLDKYTLQSYGLLCQTIHHNISTQTFNQFIQTSDHPSVPILLHHSHRFKNLGAQTGELWNTFLKTTAPLAPVKALMPVFTLSPVIINTAPCLFSDGSTSQAAYILWDKHILSQRSFPLPPPHKSAQRAELLGLLHGLSSARSWRCLNIFLDSKYLYHYLRTLALGTFQGRSSQAPFQALLPRLLSRKVVYLHHVRSHTNLPDPISRLNALTDALLITPVLQLAGKRTADGSEFEKRTADGSEFESPKKKAKVE

SEQ ID NO: 1495 - protein, 2017 aa, synthetic construct
MPAAKRVKLDGGDKKYSIGLDIGTNSVGWAVITDEYKVPSKKFKVLGNTDRHSIKKNLIGALLFDSGETAEATRLKRTARRRYTRRKNRICYLQEIFSNEMAKVDDSFFHRLEESFLVEEDKKHERHPIFGNIVDEVAYHEKYPTIYHLRKKLVDSTDKADLRLIYLALAHMIKFRGHFLIEGDLNPDNSDVDKLFIQLVQTYNQLFEENPINASGVDAKAILSARLSKSRRLENLIAQLPGEKKNGLFGNLIALSLGLTPNFKSNFDLAEDAKLQLSKDTYDDDLDNLLAQIGDQYADLFLAAKNLSDAILLSDILRVNTEITKAPLSASMIKRYDEHHQDLTLLKALVRQQLPEKYKEIFFDQSKNGYAGYIDGGASQEEFYKFIKPILEKMDGTEELLVKLNREDLLRKQRTFDNGSIPHQIHLGELHAILRRQEDFYPFLKDNREKIEKILTFRIPYYVGPLARGNSRFAWMTRKSEETITPWNFEEVVDKGASAQSFIERMTNFDKNLPNEKVLPKHSLLYEYFTVYNELTKVKYVTEGMRKPAFLSGEQKKAIVDLLFKTNRKVTVKQLKEDYFKKIECFDSVEISGVEDRFNASLGTYHDLLKIIKDKDFLDNEENEDILEDIVLTLTLFEDREMIEERLKTYAHLFDDKVMKQLKRRRYTGWGRLSRKLINGIRDKQSGKTILDFLKSDGFANRNFMQLIHDDSLTFKEDIQKAQVSGQGDSLHEHIANLAGSPAIKKGILQTVKVVDELVKVMGRHKPENIVIEMARENQTTQKGQKNSRERMKRIEEGIKELGSQILKEHPVENTQLQNEKLYLYYLQNGRDMYVDQELDINRLSDYDVDHIVPQSFLKDDSIDNKVLTRSDKARGKSDNVPSEEVVKKMKNYWRQLLNAKLITQRKFDNLTKAERGGLSELDKAGFIKRQLVETRQITKHVAQILDSRMNTKYDENDKLIREVKVITLKSKLVSDFRKDFQFYKVREINNYHHAHDAYLNAVVGTALIKKYPKLESEFVYGDYKVYDVRKMIAKSEQEIGKATAKYFFYSNIMNFFKTEITLANGEIRKRPLIETNGETGEIVWDKGRDFATVRKVLSMPQVNIVKKTEVQTGGFSKESILPKRNSDKLIARKKDWDPKKYGGFDSPTVAYSVLVVAKVEKGKSKKLKSVKELLGITIMERSSFEKNPIDFLEAKGYKEVKKDLIIKLPKYSLFELENGRKRMLASAGELQKGNELALPSKYVNFLYLASHYEKLKGSPEDNEQKQLFVEQHKHYLDEIIEQISEFSKRVILADANLDKVLSAYNKHRDKPIREQAENIIHLFTLTNLGAPAAFKYFDTTIDRKRYTSTKEVLDATLIHQSITGLYETRIDLSQLGGDGGGSSGSSGSSGSSGSSGGAVLGLEHLPRPPEISQFPLNPERLQALQHLVRKALEAGHIEPYTGPGNNPVFPVKKANGTWRFIHDLRATNSLTIDLSSSSPGPPDLSSLPTTLAHLQTIDLKDAFFQIPLPKQFQPYFAFTVPQQCNYGPGTRYAWRVLPQGFKNSPTLFQMQLAHILQPIRQAFPQCTILQYMDDILLASPSHADLQLLSEATMASLISHGLPVSENKTQQTPGTIKFLGQIISPNHLTYDAVPKVPIRSRWALPELQALLGEIQWVSKGTPTLRQPLHSLYCALQPHTDPRDQIYLNPSQVQSLVQLRQALSQNCRSRLVQTLPLLGAIMLTLTGTTTVVFQSKQQWPLVWLHAPLPHTSQCPWGQLLASAVLLLDKYTLQSYGLLCQTIHHNISTQTFNQFIQTSDHPSVPILLHHSHRFKNLGAQTGELWNTFLKTTAPLAPVKALMPVFTLSPVIINTAPCLFSDGSTSQAAYILWDKHILSQRSFPLPPPHKSAQRAELLGLLHGLSSARSWRCLNIFLDSKYLYHYLRTLALGTFQGRSSQAPFQALLPRLLSRKVVYLHHVRSHTNLPDPISRLNALTDALLITPVLQLAGKRTADGSEFEKRTADGSEFESPKKKAKVE

SEQ ID NO: 1496 - protein, 2002 aa, synthetic construct
MPAAKRVKLDGGDKKYSIGLDIGTNSVGWAVITDEYKVPSKKFKVLGNTDRHSIKKNLIGALLFDSGETAEATRLKRTARRRYTRRKNRICYLQEIFSNEMAKVDDSFFHRLEESFLVEEDKKHERHPIFGNIVDEVAYHEKYPTIYHLRKKLVDSTDKADLRLIYLALAHMIKFRGHFLIEGDLNPDNSDVDKLFIQLVQTYNQLFEENPINASGVDAKAILSARLSKSRRLENLIAQLPGEKKNGLFGNLIALSLGLTPNFKSNFDLAEDAKLQLSKDTYDDDLDNLLAQIGDQYADLFLAAKNLSDAILLSDILRVNTEITKAPLSASMIKRYDEHHQDLTLLKALVRQQLPEKYKEIFFDQSKNGYAGYIDGGASQEEFYKFIKPILEKMDGTEELLVKLNREDLLRKQRTFDNGSIPHQIHLGELHAILRRQEDFYPFLKDNREKIEKILTFRIPYYVGPLARGNSRFAWMTRKSEETITPWNFEEVVDKGASAQSFIERMTNFDKNLPNEKVLPKHSLLYEYFTVYNELTKVKYVTEGMRKPAFLSGEQKKAIVDLLFKTNRKVTVKQLKEDYFKKIECFDSVEISGVEDRFNASLGTYHDLLKIIKDKDFLDNEENEDILEDIVLTLTLFEDREMIEERLKTYAHLFDDKVMKQLKRRRYTGWGRLSRKLINGIRDKQSGKTILDFLKSDGFANRNFMQLIHDDSLTFKEDIQKAQVSGQGDSLHEHIANLAGSPAIKKGILQTVKVVDELVKVMGRHKPENIVIEMARENQTTQKGQKNSRERMKRIEEGIKELGSQILKEHPVENTQLQNEKLYLYYLQNGRDMYVDQELDINRLSDYDVDHIVPQSFLKDDSIDNKVLTRSDKARGKSDNVPSEEVVKKMKNYWRQLLNAKLITQRKFDNLTKAERGGLSELDKAGFIKRQLVETRQITKHVAQILDSRMNTKYDENDKLIREVKVITLKSKLVSDFRKDFQFYKVREINNYHHAHDAYLNAVVGTALIKKYPKLESEFVYGDYKVYDVRKMIAKSEQEIGKATAKYFFYSNIMNFFKTEITLANGEIRKRPLIETNGETGEIVWDKGRDFATVRKVLSMPQVNIVKKTEVQTGGFSKESILPKRNSDKLIARKKDWDPKKYGGFDSPTVAYSVLVVAKVEKGKSKKLKSVKELLGITIMERSSFEKNPIDFLEAKGYKEVKKDLIIKLPKYSLFELENGRKRMLASAGELQKGNELALPSKYVNFLYLASHYEKLKGSPEDNEQKQLFVEQHKHYLDEIIEQISEFSKRVILADANLDKVLSAYNKHRDKPIREQAENIIHLFTLTNLGAPAAFKYFDTTIDRKRYTSTKEVLDATLIHQSITGLYETRIDLSQLGGDGGEAAAKGGGLEHLPRPPEISQFPLNPERLQALQHLVRKALEAGHIEPYTGPGNNPVFPVKKANGTWRFIHDLRATNSLTVDLSSSSPGPPDLSSLPTTLAHLQTIDLKDAFFQIPLPKQFQPYFAFTVPQQCNYGPGTRYAWKVLPQGFKNSPTLFEMQLASILQPIRQAFPQCVILQYMDDILLASPSPEDLQQLSEATMASLISHGLPVSQDKTQQTPGTIKFLGQIISPNHITYDAVPTVPIRSRWALPELQALLGEIQWVSKGTPTLRQPLHSLYCALQGHTDPRDQIYLNPSQVQSLMQLQQALSQNCRSRLAQTLPLLGAIMLTLTGTTTVVFQSKQQWPLVWLHAPLPHTSQCPWGQLLASAVLLLDKYTLQSYGLLCQTIHHNISIQTFNQFIQTSDHPSVPILLHHSHRFKNLGAQTGELWNTFLKTAAPLAPVKALTPVFTLSPIIINTAPCLFSDGSTSQAAYILWDKHILSQRSFPLPPPHKSAQQAELLGLLHGLSSARSWHCLNIFLDSKYLYHYLRTLALGTFQGKSSQAPFQALLPRLLAHKVIYLHHVRSHTNLPDPISKLNALTDALLITPILAGKRTADGSEFEKRTADGSEFESPKKKAKVE

SEQ ID NO: 1497 - protein, 2015 aa, synthetic construct
MPAAKRVKLDGGDKKYSIGLDIGTNSVGWAVITDEYKVPSKKFKVLGNTDRHSIKKNLIGALLFDSGETAEATRLKRTARRRYTRRKNRICYLQEIFSNEMAKVDDSFFHRLEESFLVEEDKKHERHPIFGNIVDEVAYHEKYPTIYHLRKKLVDSTDKADLRLIYLALAHMIKFRGHFLIEGDLNPDNSDVDKLFIQLVQTYNQLFEENPINASGVDAKAILSARLSKSRRLENLIAQLPGEKKNGLFGNLIALSLGLTPNFKSNFDLAEDAKLQLSKDTYDDDLDNLLAQIGDQYADLFLAAKNLSDAILLSDILRVNTEITKAPLSASMIKRYDEHHQDLTLLKALVRQQLPEKYKEIFFDQSKNGYAGYIDGGASQEEFYKFIKPILEKMDGTEELLVKLNREDLLRKQRTFDNGSIPHQIHLGELHAILRRQEDFYPFLKDNREKIEKILTFRIPYYVGPLARGNSRFAWMTRKSEETITPWNFEEVVDKGASAQSFIERMTNFDKNLPNEKVLPKHSLLYEYFTVYNELTKVKYVTEGMRKPAFLSGEQKKAIVDLLFKTNRKVTVKQLKEDYFKKIECFDSVEISGVEDRFNASLGTYHDLLKIIKDKDFLDNEENEDILEDIVLTLTLFEDREMIEERLKTYAHLFDDKVMKQLKRRRYTGWGRLSRKLINGIRDKQSGKTILDFLKSDGFANRNFMQLIHDDSLTFKEDIQKAQVSGQGDSLHEHIANLAGSPAIKKGILQTVKVVDELVKVMGRHKPENIVIEMARENQTTQKGQKNSRERMKRIEEGIKELGSQILKEHPVENTQLQNEKLYLYYLQNGRDMYVDQELDINRLSDYDVDHIVPQSFLKDDSIDNKVLTRSDKARGKSDNVPSEEVVKKMKNYWRQLLNAKLITQRKFDNLTKAERGGLSELDKAGFIKRQLVETRQITKHVAQILDSRMNTKYDENDKLIREVKVITLKSKLVSDFRKDFQFYKVREINNYHHAHDAYLNAVVGTALIKKYPKLESEFVYGDYKVYDVRKMIAKSEQEIGKATAKYFFYSNIMNFFKTEITLANGEIRKRPLIETNGETGEIVWDKGRDFATVRKVLSMPQVNIVKKTEVQTGGFSKESILPKRNSDKLIARKKDWDPKKYGGFDSPTVAYSVLVVAKVEKGKSKKLKSVKELLGITIMERSSFEKNPIDFLEAKGYKEVKKDLIIKLPKYSLFELENGRKRMLASAGELQKGNELALPSKYVNFLYLASHYEKLKGSPEDNEQKQLFVEQHKHYLDEIIEQISEFSKRVILADANLDKVLSAYNKHRDKPIREQAENIIHLFTLTNLGAPAAFKYFDTTIDRKRYTSTKEVLDATLIHQSITGLYETRIDLSQLGGDGGGSSGSSGSSGSSGSSGSSGGGLEHLPRPPEISQFPLNPERLQALQHLVRKALEAGHIEPYTGPGNNPVFPVKKANGTWRFIHDLRATNSLTVDLSSSSPGPPDLSSLPTTLAHLQTIDLKDAFFQIPLPKQFQPYFAFTVPQQCNYGPGTRYAWKVLPQGFKNSPTLFEMQLASILQPIRQAFPQCVILQYMDDILLASPSPEDLQQLSEATMASLISHGLPVSQDKTQQTPGTIKFLGQIISPNHITYDAVPTVPIRSRWALPELQALLGEIQWVSKGTPTLRQPLHSLYCALQGHTDPRDQIYLNPSQVQSLMQLQQALSQNCRSRLAQTLPLLGAIMLTLTGTTTVVFQSKQQWPLVWLHAPLPHTSQCPWGQLLASAVLLLDKYTLQSYGLLCQTIHHNISIQTFNQFIQTSDHPSVPILLHHSHRFKNLGAQTGELWNTFLKTAAPLAPVKALTPVFTLSPIIINTAPCLFSDGSTSQAAYILWDKHILSQRSFPLPPPHKSAQQAELLGLLHGLSSARSWHCLNIFLDSKYLYHYLRTLALGTFQGKSSQAPFQALLPRLLAHKVIYLHHVRSHTNLPDPISKLNALTDALLITPILAGKRTADGSEFEKRTADGSEFESPKKKAKVE

SEQ ID NO: 1498 - protein, 2008 aa, synthetic construct
MPAAKRVKLDGGDKKYSIGLDIGTNSVGWAVITDEYKVPSKKFKVLGNTDRHSIKKNLIGALLFDSGETAEATRLKRTARRRYTRRKNRICYLQEIFSNEMAKVDDSFFHRLEESFLVEEDKKHERHPIFGNIVDEVAYHEKYPTIYHLRKKLVDSTDKADLRLIYLALAHMIKFRGHFLIEGDLNPDNSDVDKLFIQLVQTYNQLFEENPINASGVDAKAILSARLSKSRRLENLIAQLPGEKKNGLFGNLIALSLGLTPNFKSNFDLAEDAKLQLSKDTYDDDLDNLLAQIGDQYADLFLAAKNLSDAILLSDILRVNTEITKAPLSASMIKRYDEHHQDLTLLKALVRQQLPEKYKEIFFDQSKNGYAGYIDGGASQEEFYKFIKPILEKMDGTEELLVKLNREDLLRKQRTFDNGSIPHQIHLGELHAILRRQEDFYPFLKDNREKIEKILTFRIPYYVGPLARGNSRFAWMTRKSEETITPWNFEEVVDKGASAQSFIERMTNFDKNLPNEKVLPKHSLLYEYFTVYNELTKVKYVTEGMRKPAFLSGEQKKAIVDLLFKTNRKVTVKQLKEDYFKKIECFDSVEISGVEDRFNASLGTYHDLLKIIKDKDFLDNEENEDILEDIVLTLTLFEDREMIEERLKTYAHLFDDKVMKQLKRRRYTGWGRLSRKLINGIRDKQSGKTILDFLKSDGFANRNFMQLIHDDSLTFKEDIQKAQVSGQGDSLHEHIANLAGSPAIKKGILQTVKVVDELVKVMGRHKPENIVIEMARENQTTQKGQKNSRERMKRIEEGIKELGSQILKEHPVENTQLQNEKLYLYYLQNGRDMYVDQELDINRLSDYDVDHIVPQSFLKDDSIDNKVLTRSDKARGKSDNVPSEEVVKKMKNYWRQLLNAKLITQRKFDNLTKAERGGLSELDKAGFIKRQLVETRQITKHVAQILDSRMNTKYDENDKLIREVKVITLKSKLVSDFRKDFQFYKVREINNYHHAHDAYLNAVVGTALIKKYPKLESEFVYGDYKVYDVRKMIAKSEQEIGKATAKYFFYSNIMNFFKTEITLANGEIRKRPLIETNGETGEIVWDKGRDFATVRKVLSMPQVNIVKKTEVQTGGFSKESILPKRNSDKLIARKKDWDPKKYGGFDSPTVAYSVLVVAKVEKGKSKKLKSVKELLGITIMERSSFEKNPIDFLEAKGYKEVKKDLIIKLPKYSLFELENGRKRMLASAGELQKGNELALPSKYVNFLYLASHYEKLKGSPEDNEQKQLFVEQHKHYLDEIIEQISEFSKRVILADANLDKVLSAYNKHRDKPIREQAENIIHLFTLTNLGAPAAFKYFDTTIDRKRYTSTKEVLDATLIHQSITGLYETRIDLSQLGGDGGEAAAKGGGGGSGGGLEHLPRPPEISQFPLNPERLQALQHLVRKALEAGHIEPYTGPGNNPVFPVKKANGTWRFIHDLRATNSLTVDLSSSSPGPPDLSSLPTTLAHLQTIDLKDAFFQIPLPKQFQPYFAFTVPQQCNYGPGTRYAWKVLPQGFKNSPTLFEMQLASILQPIRQAFPQCVILQYMDDILLASPSPEDLQQLSEATMASLISHGLPVSQDKTQQTPGTIKFLGQIISPNHITYDAVPTVPIRSRWALPELQALLGEIQWVSKGTPTLRQPLHSLYCALQGHTDPRDQIYLNPSQVQSLMQLQQALSQNCRSRLAQTLPLLGAIMLTLTGTTTVVFQSKQQWPLVWLHAPLPHTSQCPWGQLLASAVLLLDKYTLQSYGLLCQTIHHNISIQTFNQFIQTSDHPSVPILLHHSHRFKNLGAQTGELWNTFLKTAAPLAPVKALTPVFTLSPIIINTAPCLFSDGSTSQAAYILWDKHILSQRSFPLPPPHKSAQQAELLGLLHGLSSARSWHCLNIFLDSKYLYHYLRTLALGTFQGKSSQAPFQALLPRLLAHKVIYLHHVRSHTNLPDPISKLNALTDALLITPILAGKRTADGSEFEKRTADGSEFESPKKKAKVE

SEQ ID NO: 1499 - protein, 2008 aa, synthetic construct
MPAAKRVKLDGGDKKYSIGLDIGTNSVGWAVITDEYKVPSKKFKVLGNTDRHSIKKNLIGALLFDSGETAEATRLKRTARRRYTRRKNRICYLQEIFSNEMAKVDDSFFHRLEESFLVEEDKKHERHPIFGNIVDEVAYHEKYPTIYHLRKKLVDSTDKADLRLIYLALAHMIKFRGHFLIEGDLNPDNSDVDKLFIQLVQTYNQLFEENPINASGVDAKAILSARLSKSRRLENLIAQLPGEKKNGLFGNLIALSLGLTPNFKSNFDLAEDAKLQLSKDTYDDDLDNLLAQIGDQYADLFLAAKNLSDAILLSDILRVNTEITKAPLSASMIKRYDEHHQDLTLLKALVRQQLPEKYKEIFFDQSKNGYAGYIDGGASQEEFYKFIKPILEKMDGTEELLVKLNREDLLRKQRTFDNGSIPHQIHLGELHAILRRQEDFYPFLKDNREKIEKILTFRIPYYVGPLARGNSRFAWMTRKSEETITPWNFEEVVDKGASAQSFIERMTNFDKNLPNEKVLPKHSLLYEYFTVYNELTKVKYVTEGMRKPAFLSGEQKKAIVDLLFKTNRKVTVKQLKEDYFKKIECFDSVEISGVEDRFNASLGTYHDLLKIIKDKDFLDNEENEDILEDIVLTLTLFEDREMIEERLKTYAHLFDDKVMKQLKRRRYTGWGRLSRKLINGIRDKQSGKTILDFLKSDGFANRNFMQLIHDDSLTFKEDIQKAQVSGQGDSLHEHIANLAGSPAIKKGILQTVKVVDELVKVMGRHKPENIVIEMARENQTTQKGQKNSRERMKRIEEGIKELGSQILKEHPVENTQLQNEKLYLYYLQNGRDMYVDQELDINRLSDYDVDHIVPQSFLKDDSIDNKVLTRSDKARGKSDNVPSEEVVKKMKNYWRQLLNAKLITQRKFDNLTKAERGGLSELDKAGFIKRQLVETRQITKHVAQILDSRMNTKYDENDKLIREVKVITLKSKLVSDFRKDFQFYKVREINNYHHAHDAYLNAVVGTALIKKYPKLESEFVYGDYKVYDVRKMIAKSEQEIGKATAKYFFYSNIMNFFKTEITLANGEIRKRPLIETNGETGEIVWDKGRDFATVRKVLSMPQVNIVKKTEVQTGGFSKESILPKRNSDKLIARKKDWDPKKYGGFDSPTVAYSVLVVAKVEKGKSKKLKSVKELLGITIMERSSFEKNPIDFLEAKGYKEVKKDLIIKLPKYSLFELENGRKRMLASAGELQKGNELALPSKYVNFLYLASHYEKLKGSPEDNEQKQLFVEQHKHYLDEIIEQISEFSKRVILADANLDKVLSAYNKHRDKPIREQAENIIHLFTLTNLGAPAAFKYFDTTIDRKRYTSTKEVLDATLIHQSITGLYETRIDLSQLGGDGGEAAAKGGSGGGGGGLEHLPRPPEISQFPLNPERLQALQHLVRKALEAGHIEPYTGPGNNPVFPVKKANGTWRFIHDLRATNSLTVDLSSSSPGPPDLSSLPTTLAHLQTIDLKDAFFQIPLPKQFQPYFAFTVPQQCNYGPGTRYAWKVLPQGFKNSPTLFEMQLASILQPIRQAFPQCVILQYMDDILLASPSPEDLQQLSEATMASLISHGLPVSQDKTQQTPGTIKFLGQIISPNHITYDAVPTVPIRSRWALPELQALLGEIQWVSKGTPTLRQPLHSLYCALQGHTDPRDQIYLNPSQVQSLMQLQQALSQNCRSRLAQTLPLLGAIMLTLTGTTTVVFQSKQQWPLVWLHAPLPHTSQCPWGQLLASAVLLLDKYTLQSYGLLCQTIHHNISIQTFNQFIQTSDHPSVPILLHHSHRFKNLGAQTGELWNTFLKTAAPLAPVKALTPVFTLSPIIINTAPCLFSDGSTSQAAYILWDKHILSQRSFPLPPPHKSAQQAELLGLLHGLSSARSWHCLNIFLDSKYLYHYLRTLALGTFQGKSSQAPFQALLPRLLAHKVIYLHHVRSHTNLPDPISKLNALTDALLITPILAGKRTADGSEFEKRTADGSEFESPKKKAKVE

SEQ ID NO: 1500 - protein, 2008 aa, synthetic construct
MPAAKRVKLDGGDKKYSIGLDIGTNSVGWAVITDEYKVPSKKFKVLGNTDRHSIKKNLIGALLFDSGETAEATRLKRTARRRYTRRKNRICYLQEIFSNEMAKVDDSFFHRLEESFLVEEDKKHERHPIFGNIVDEVAYHEKYPTIYHLRKKLVDSTDKADLRLIYLALAHMIKFRGHFLIEGDLNPDNSDVDKLFIQLVQTYNQLFEENPINASGVDAKAILSARLSKSRRLENLIAQLPGEKKNGLFGNLIALSLGLTPNFKSNFDLAEDAKLQLSKDTYDDDLDNLLAQIGDQYADLFLAAKNLSDAILLSDILRVNTEITKAPLSASMIKRYDEHHQDLTLLKALVRQQLPEKYKEIFFDQSKNGYAGYIDGGASQEEFYKFIKPILEKMDGTEELLVKLNREDLLRKQRTFDNGSIPHQIHLGELHAILRRQEDFYPFLKDNREKIEKILTFRIPYYVGPLARGNSRFAWMTRKSEETITPWNFEEVVDKGASAQSFIERMTNFDKNLPNEKVLPKHSLLYEYFTVYNELTKVKYVTEGMRKPAFLSGEQKKAIVDLLFKTNRKVTVKQLKEDYFKKIECFDSVEISGVEDRFNASLGTYHDLLKIIKDKDFLDNEENEDILEDIVLTLTLFEDREMIEERLKTYAHLFDDKVMKQLKRRRYTGWGRLSRKLINGIRDKQSGKTILDFLKSDGFANRNFMQLIHDDSLTFKEDIQKAQVSGQGDSLHEHIANLAGSPAIKKGILQTVKVVDELVKVMGRHKPENIVIEMARENQTTQKGQKNSRERMKRIEEGIKELGSQILKEHPVENTQLQNEKLYLYYLQNGRDMYVDQELDINRLSDYDVDHIVPQSFLKDDSIDNKVLTRSDKARGKSDNVPSEEVVKKMKNYWRQLLNAKLITQRKFDNLTKAERGGLSELDKAGFIKRQLVETRQITKHVAQILDSRMNTKYDENDKLIREVKVITLKSKLVSDFRKDFQFYKVREINNYHHAHDAYLNAVVGTALIKKYPKLESEFVYGDYKVYDVRKMIAKSEQEIGKATAKYFFYSNIMNFFKTEITLANGEIRKRPLIETNGETGEIVWDKGRDFATVRKVLSMPQVNIVKKTEVQTGGFSKESILPKRNSDKLIARKKDWDPKKYGGFDSPTVAYSVLVVAKVEKGKSKKLKSVKELLGITIMERSSFEKNPIDFLEAKGYKEVKKDLIIKLPKYSLFELENGRKRMLASAGELQKGNELALPSKYVNFLYLASHYEKLKGSPEDNEQKQLFVEQHKHYLDEIIEQISEFSKRVILADANLDKVLSAYNKHRDKPIREQAENIIHLFTLTNLGAPAAFKYFDTTIDRKRYTSTKEVLDATLIHQSITGLYETRIDLSQLGGDGGPAPAPAPAPAPGGGLEHLPRPPEISQFPLNPERLQALQHLVRKALEAGHIEPYTGPGNNPVFPVKKANGTWRFIHDLRATNSLTVDLSSSSPGPPDLSSLPTTLAHLQTIDLKDAFFQIPLPKQFQPYFAFTVPQQCNYGPGTRYAWKVLPQGFKNSPTLFQMQLASILQPIRQAFPQCVILQYMDDILLASPSPEDLQQLSEATMASLISHGLPVSQDKTQQTPGTIKFLGQIISPNHITYDAVPTVPIRSRWALPELQALLGEIQWVSKGTPTLRQPLHSLYCALQGHTDPRDQIYLNPSQVQSLMQLQQALSQNCRSRLAQTLPLLGAIMLTLTGTTTVVFQSKQQWPLVWLHAPLPHTSQCPWGQLLASAVLLLDKYTLQSYGLLCQTIHHNISIQTFNQFIQTSDHPSVPILLHHSHRFKNLGAQTGELWNTFLKTAAPLAPVKALTPVFTLSPIIINTAPCLFSDGSTSQAAYILWDKHILSQRSFPLPPPHKSAQQAELLGLLHGLSSARSWHCLNIFLDSKYLYHYLRTLAWGTFQGKSSQAPFQALLPRLLAHKVIYLHHVRSHTNLPDPISKLNALTDALLITPILAGKRTADGSEFEKRTADGSEFESPKKKAKVE

SEQ ID NO: 1501 - protein, 2006 aa, synthetic construct
MPAAKRVKLDGGDKKYSIGLDIGTNSVGWAVITDEYKVPSKKFKVLGNTDRHSIKKNLIGALLFDSGETAEATRLKRTARRRYTRRKNRICYLQEIFSNEMAKVDDSFFHRLEESFLVEEDKKHERHPIFGNIVDEVAYHEKYPTIYHLRKKLVDSTDKADLRLIYLALAHMIKFRGHFLIEGDLNPDNSDVDKLFIQLVQTYNQLFEENPINASGVDAKAILSARLSKSRRLENLIAQLPGEKKNGLFGNLIALSLGLTPNFKSNFDLAEDAKLQLSKDTYDDDLDNLLAQIGDQYADLFLAAKNLSDAILLSDILRVNTEITKAPLSASMIKRYDEHHQDLTLLKALVRQQLPEKYKEIFFDQSKNGYAGYIDGGASQEEFYKFIKPILEKMDGTEELLVKLNREDLLRKQRTFDNGSIPHQIHLGELHAILRRQEDFYPFLKDNREKIEKILTFRIPYYVGPLARGNSRFAWMTRKSEETITPWNFEEVVDKGASAQSFIERMTNFDKNLPNEKVLPKHSLLYEYFTVYNELTKVKYVTEGMRKPAFLSGEQKKAIVDLLFKTNRKVTVKQLKEDYFKKIECFDSVEISGVEDRFNASLGTYHDLLKIIKDKDFLDNEENEDILEDIVLTLTLFEDREMIEERLKTYAHLFDDKVMKQLKRRRYTGWGRLSRKLINGIRDKQSGKTILDFLKSDGFANRNFMQLIHDDSLTFKEDIQKAQVSGQGDSLHEHIANLAGSPAIKKGILQTVKVVDELVKVMGRHKPENIVIEMARENQTTQKGQKNSRERMKRIEEGIKELGSQILKEHPVENTQLQNEKLYLYYLQNGRDMYVDQELDINRLSDYDVDHIVPQSFLKDDSIDNKVLTRSDKARGKSDNVPSEEVVKKMKNYWRQLLNAKLITQRKFDNLTKAERGGLSELDKAGFIKRQLVETRQITKHVAQILDSRMNTKYDENDKLIREVKVITLKSKLVSDFRKDFQFYKVREINNYHHAHDAYLNAVVGTALIKKYPKLESEFVYGDYKVYDVRKMIAKSEQEIGKATAKYFFYSNIMNFFKTEITLANGEIRKRPLIETNGETGEIVWDKGRDFATVRKVLSMPQVNIVKKTEVQTGGFSKESILPKRNSDKLIARKKDWDPKKYGGFDSPTVAYSVLVVAKVEKGKSKKLKSVKELLGITIMERSSFEKNPIDFLEAKGYKEVKKDLIIKLPKYSLFELENGRKRMLASAGELQKGNELALPSKYVNFLYLASHYEKLKGSPEDNEQKQLFVEQHKHYLDEIIEQISEFSKRVILADANLDKVLSAYNKHRDKPIREQAENIIHLFTLTNLGAPAAFKYFDTTIDRKRYTSTKEVLDATLIHQSITGLYETRIDLSQLGGDGGGGGGGSPAPGGGLEHLPRPPEISQFPLNPERLQALQHLVRKALEAGHIEPYTGPGNNPVFPVKKANGTWRFIHDLRATNSLTVDLSSSSPGPPDLSSLPTTLAHLQTIDLKDAFFQIPLPKQFQPYFAFTVPQQCNYGPGTRYAWKVLPQGFKNSPTLFQMQLASILQPIRQAFPQCVILQYMDDILLASPSPEDLQQLSEATMASLISHGLPVSQDKTQQTPGTIKFLGQIISPNHITYDAVPTVPIRSRWALPELQALLGEIQWVSKGTPTLRQPLHSLYCALQGHTDPRDQIYLNPSQVQSLMQLQQALSQNCRSRLAQTLPLLGAIMLTLTGTTTVVFQSKQQWPLVWLHAPLPHTSQCPWGQLLASAVLLLDKYTLQSYGLLCQTIHHNISIQTFNQFIQTSDHPSVPILLHHSHRFKNLGAQTGELWNTFLKTAAPLAPVKALTPVFTLSPIIINTAPCLFSDGSTSQAAYILWDKHILSQRSFPLPPPHKSAQQAELLGLLHGLSSARSWHCLNIFLDSKYLYHYLRTLAWGTFQGKSSQAPFQALLPRLLAHKVIYLHHVRSHTNLPDPISKLNALTDALLITPILAGKRTADGSEFEKRTADGSEFESPKKKAKVE

SEQ ID NO: 1502 - protein, 2012 aa, synthetic construct
MPAAKRVKLDGGDKKYSIGLDIGTNSVGWAVITDEYKVPSKKFKVLGNTDRHSIKKNLIGALLFDSGETAEATRLKRTARRRYTRRKNRICYLQEIFSNEMAKVDDSFFHRLEESFLVEEDKKHERHPIFGNIVDEVAYHEKYPTIYHLRKKLVDSTDKADLRLIYLALAHMIKFRGHFLIEGDLNPDNSDVDKLFIQLVQTYNQLFEENPINASGVDAKAILSARLSKSRRLENLIAQLPGEKKNGLFGNLIALSLGLTPNFKSNFDLAEDAKLQLSKDTYDDDLDNLLAQIGDQYADLFLAAKNLSDAILLSDILRVNTEITKAPLSASMIKRYDEHHQDLTLLKALVRQQLPEKYKEIFFDQSKNGYAGYIDGGASQEEFYKFIKPILEKMDGTEELLVKLNREDLLRKQRTFDNGSIPHQIHLGELHAILRRQEDFYPFLKDNREKIEKILTFRIPYYVGPLARGNSRFAWMTRKSEETITPWNFEEVVDKGASAQSFIERMTNFDKNLPNEKVLPKHSLLYEYFTVYNELTKVKYVTEGMRKPAFLSGEQKKAIVDLLFKTNRKVTVKQLKEDYFKKIECFDSVEISGVEDRFNASLGTYHDLLKIIKDKDFLDNEENEDILEDIVLTLTLFEDREMIEERLKTYAHLFDDKVMKQLKRRRYTGWGRLSRKLINGIRDKQSGKTILDFLKSDGFANRNFMQLIHDDSLTFKEDIQKAQVSGQGDSLHEHIANLAGSPAIKKGILQTVKVVDELVKVMGRHKPENIVIEMARENQTTQKGQKNSRERMKRIEEGIKELGSQILKEHPVENTQLQNEKLYLYYLQNGRDMYVDQELDINRLSDYDVDHIVPQSFLKDDSIDNKVLTRSDKARGKSDNVPSEEVVKKMKNYWRQLLNAKLITQRKFDNLTKAERGGLSELDKAGFIKRQLVETRQITKHVAQILDSRMNTKYDENDKLIREVKVITLKSKLVSDFRKDFQFYKVREINNYHHAHDAYLNAVVGTALIKKYPKLESEFVYGDYKVYDVRKMIAKSEQEIGKATAKYFFYSNIMNFFKTEITLANGEIRKRPLIETNGETGEIVWDKGRDFATVRKVLSMPQVNIVKKTEVQTGGFSKESILPKRNSDKLIARKKDWDPKKYGGFDSPTVAYSVLVVAKVEKGKSKKLKSVKELLGITIMERSSFEKNPIDFLEAKGYKEVKKDLIIKLPKYSLFELENGRKRMLASAGELQKGNELALPSKYVNFLYLASHYEKLKGSPEDNEQKQLFVEQHKHYLDEIIEQISEFSKRVILADANLDKVLSAYNKHRDKPIREQAENIIHLFTLTNLGAPAAFKYFDTTIDRKRYTSTKEVLDATLIHQSITGLYETRIDLSQLGGDGGGGSGGSGGSGGSGGSGGGLEHLPRPPEISQFPLNPERLQALQHLVRKALEAGHIEPYTGPGNNPVFPVKKANGTWRFIHDLRATNSLTVDLSSSSPGPPDLSSLPTTLAHLQTIDLKDAFFQIPLPKQFQPYFAFTVPQQCNYGPGTRYAWKVLPQGFKNSPTLFQMQLASILQPIRQAFPQCVILQYMDDILLASPSPEDLQQLSEATMASLISHGLPVSQDKTQQTPGTIKFLGQIISPNHITYDAVPTVPIRSRWALPELQALLGEIQWVSKGTPTLRQPLHSLYCALQGHTDPRDQIYLNPSQVQSLMQLQQALSQNCRSRLAQTLPLLGAIMLTLTGTTTVVFQSKQQWPLVWLHAPLPHTSQCPWGQLLASAVLLLDKYTLQSYGLLCQTIHHNISIQTFNQFIQTSDHPSVPILLHHSHRFKNLGAQTGELWNTFLKTAAPLAPVKALTPVFTLSPIIINTAPCLFSDGSTSQAAYILWDKHILSQRSFPLPPPHKSAQQAELLGLLHGLSSARSWHCLNIFLDSKYLYHYLRTLAWGTFQGKSSQAPFQALLPRLLAHKVIYLHHVRSHTNLPDPISKLNALTDALLITPILAGKRTADGSEFEKRTADGSEFESPKKKAKVE

SEQ ID NO: 1503 - protein, 2015 aa, synthetic construct
MPAAKRVKLDGGDKKYSIGLDIGTNSVGWAVITDEYKVPSKKFKVLGNTDRHSIKKNLIGALLFDSGETAEATRLKRTARRRYTRRKNRICYLQEIFSNEMAKVDDSFFHRLEESFLVEEDKKHERHPIFGNIVDEVAYHEKYPTIYHLRKKLVDSTDKADLRLIYLALAHMIKFRGHFLIEGDLNPDNSDVDKLFIQLVQTYNQLFEENPINASGVDAKAILSARLSKSRRLENLIAQLPGEKKNGLFGNLIALSLGLTPNFKSNFDLAEDAKLQLSKDTYDDDLDNLLAQIGDQYADLFLAAKNLSDAILLSDILRVNTEITKAPLSASMIKRYDEHHQDLTLLKALVRQQLPEKYKEIFFDQSKNGYAGYIDGGASQEEFYKFIKPILEKMDGTEELLVKLNREDLLRKQRTFDNGSIPHQIHLGELHAILRRQEDFYPFLKDNREKIEKILTFRIPYYVGPLARGNSRFAWMTRKSEETITPWNFEEVVDKGASAQSFIERMTNFDKNLPNEKVLPKHSLLYEYFTVYNELTKVKYVTEGMRKPAFLSGEQKKAIVDLLFKTNRKVTVKQLKEDYFKKIECFDSVEISGVEDRFNASLGTYHDLLKIIKDKDFLDNEENEDILEDIVLTLTLFEDREMIEERLKTYAHLFDDKVMKQLKRRRYTGWGRLSRKLINGIRDKQSGKTILDFLKSDGFANRNFMQLIHDDSLTFKEDIQKAQVSGQGDSLHEHIANLAGSPAIKKGILQTVKVVDELVKVMGRHKPENIVIEMARENQTTQKGQKNSRERMKRIEEGIKELGSQILKEHPVENTQLQNEKLYLYYLQNGRDMYVDQELDINRLSDYDVDHIVPQSFLKDDSIDNKVLTRSDKARGKSDNVPSEEVVKKMKNYWRQLLNAKLITQRKFDNLTKAERGGLSELDKAGFIKRQLVETRQITKHVAQILDSRMNTKYDENDKLIREVKVITLKSKLVSDFRKDFQFYKVREINNYHHAHDAYLNAVVGTALIKKYPKLESEFVYGDYKVYDVRKMIAKSEQEIGKATAKYFFYSNIMNFFKTEITLANGEIRKRPLIETNGETGEIVWDKGRDFATVRKVLSMPQVNIVKKTEVQTGGFSKESILPKRNSDKLIARKKDWDPKKYGGFDSPTVAYSVLVVAKVEKGKSKKLKSVKELLGITIMERSSFEKNPIDFLEAKGYKEVKKDLIIKLPKYSLFELENGRKRMLASAGELQKGNELALPSKYVNFLYLASHYEKLKGSPEDNEQKQLFVEQHKHYLDEIIEQISEFSKRVILADANLDKVLSAYNKHRDKPIREQAENIIHLFTLTNLGAPAAFKYFDTTIDRKRYTSTKEVLDATLIHQSITGLYETRIDLSQLGGDGGGGSGGSGGSGGSGGSGGSGGGLEHLPRPPEISQFPLNPERLQALQHLVRKALEAGHIEPYTGPGNNPVFPVKKANGTWRFIHDLRATNSLTVDLSSSSPGPPDLSSPPTTLAHLQTIDLKDAFFQIPLPKQFQPYFAFTVPQQCNYGPGTRYAWKVLPQGFKNSPTLFQMQLASILQPIRQAFPQCVILQYMDDILLASPSPEDLQQLSEATMASLISHGLPVSQDKTQQTPGTIKFLGQIISPNHITYDAVPTVPIRSRWALPELQALLGEIQWVSKGTPTLRQPLHSLYCALQGHTDPRDQIYLNPSQVQSLMQLQQALSQNCRSRLAQTLPLLGAIMLTLTGTTTVVFQSKQQWPLVWLHAPLPHTSQCPWGQLLASAVLLLDKYTLQSYGLLCQTIHHNISIQTFNQFIQTSDHPSVPILLHHSHRFKNLGAQTGELWNTFLKTAAPLAPVKALTPVFTLSPIIINTAPCLFSDGSTSQAAYILWDKHILSQRSFPLPPPHKSAQQAELLGLLHGLSSARSWHCLNIFLDSKYLYHYLRTLAWGTFQGKSSQAPFQALLPRLLAHKVIYLHHVRSHTNLPDPISKLNALTDALLITPILAGKRTADGSEFEKRTADGSEFESPKKKAKVE

SEQ ID NO: 1504 - protein, 2099 aa, synthetic construct
MPAAKRVKLDGGDKKYSIGLDIGTNSVGWAVITDEYKVPSKKFKVLGNTDRHSIKKNLIGALLFDSGETAEATRLKRTARRRYTRRKNRICYLQEIFSNEMAKVDDSFFHRLEESFLVEEDKKHERHPIFGNIVDEVAYHEKYPTIYHLRKKLVDSTDKADLRLIYLALAHMIKFRGHFLIEGDLNPDNSDVDKLFIQLVQTYNQLFEENPINASGVDAKAILSARLSKSRRLENLIAQLPGEKKNGLFGNLIALSLGLTPNFKSNFDLAEDAKLQLSKDTYDDDLDNLLAQIGDQYADLFLAAKNLSDAILLSDILRVNTEITKAPLSASMIKRYDEHHQDLTLLKALVRQQLPEKYKEIFFDQSKNGYAGYIDGGASQEEFYKFIKPILEKMDGTEELLVKLNREDLLRKQRTFDNGSIPHQIHLGELHAILRRQEDFYPFLKDNREKIEKILTFRIPYYVGPLARGNSRFAWMTRKSEETITPWNFEEVVDKGASAQSFIERMTNFDKNLPNEKVLPKHSLLYEYFTVYNELTKVKYVTEGMRKPAFLSGEQKKAIVDLLFKTNRKVTVKQLKEDYFKKIECFDSVEISGVEDRFNASLGTYHDLLKIIKDKDFLDNEENEDILEDIVLTLTLFEDREMIEERLKTYAHLFDDKVMKQLKRRRYTGWGRLSRKLINGIRDKQSGKTILDFLKSDGFANRNFMQLIHDDSLTFKEDIQKAQVSGQGDSLHEHIANLAGSPAIKKGILQTVKVVDELVKVMGRHKPENIVIEMARENQTTQKGQKNSRERMKRIEEGIKELGSQILKEHPVENTQLQNEKLYLYYLQNGRDMYVDQELDINRLSDYDVDHIVPQSFLKDDSIDNKVLTRSDKARGKSDNVPSEEVVKKMKNYWRQLLNAKLITQRKFDNLTKAERGGLSELDKAGFIKRQLVETRQITKHVAQILDSRMNTKYDENDKLIREVKVITLKSKLVSDFRKDFQFYKVREINNYHHAHDAYLNAVVGTALIKKYPKLESEFVYGDYKVYDVRKMIAKSEQEIGKATAKYFFYSNIMNFFKTEITLANGEIRKRPLIETNGETGEIVWDKGRDFATVRKVLSMPQVNIVKKTEVQTGGFSKESILPKRNSDKLIARKKDWDPKKYGGFDSPTVAYSVLVVAKVEKGKSKKLKSVKELLGITIMERSSFEKNPIDFLEAKGYKEVKKDLIIKLPKYSLFELENGRKRMLASAGELQKGNELALPSKYVNFLYLASHYEKLKGSPEDNEQKQLFVEQHKHYLDEIIEQISEFSKRVILADANLDKVLSAYNKHRDKPIREQAENIIHLFTLTNLGAPAAFKYFDTTIDRKRYTSTKEVLDATLIHQSITGLYETRIDLSQLGGDGGEAAAKPAPGGTVSLQDEHRLFDIPVTTSLPDVWLQDFPQAWAETGGLGRAKCQAPIIIDLKPTAVPVSIKQYPMSLEAHMGIRQHIIKFLELGVLRPCRSPWNTPLLPVKKPGTQDYRPVQDLREINKRTVDIHPTVPNPYNLLSTLKPDYSWYTVLDLKDAFFCLPLAPQSQELFAFEWKDPERGISGQLTWTRLPQGFKNSPTLFDEALHRDLTDFRTQHPEVTLLQYVDDLLLAAPTKKACTQGTRHLLQELGEKGYRASAKKAQICQTKVTYLGYILSEGKRWLTPGRIETVARIPPPRNPREVREFLGTAGFCRLWIPGFAELAAPLYALTKESTPFTWQTEHQLAFEALKKALLSAPALGLPDTSKPFTLFLDERQGIAKGVLTQKLGPWKRPVAYLSKKLDPVAAGWPPCLRIMAATAMLVKDSAKLTLGQPLTVITPHTLEAIVRQPPDRWITNARLTHYQALLLDTDRVQFGPPVTLNPATLLPVPENQPSPHDCRQVLAETHGTREDLKDQELPDADHTWYTDGSSYLDSGTRRAGAAVVDGHNTIWAQSLPPGTSAQKAELIALTKALELSKGKKANIYTDSRYAFATAHTHGSIYERRGLLTSEGKEIKNKAEIIALLKALFLPQEVAIIHCPGHQKGQDPVAVGNRQADRVARQAAMAEVLTLATEPDNTSHITAGKRTADGSEFEKRTADGSEFESPKKKAKVE

SEQ ID NO: 1505 - protein, 2100 aa, synthetic construct
MPAAKRVKLDGGDKKYSIGLDIGTNSVGWAVITDEYKVPSKKFKVLGNTDRHSIKKNLIGALLFDSGETAEATRLKRTARRRYTRRKNRICYLQEIFSNEMAKVDDSFFHRLEESFLVEEDKKHERHPIFGNIVDEVAYHEKYPTIYHLRKKLVDSTDKADLRLIYLALAHMIKFRGHFLIEGDLNPDNSDVDKLFIQLVQTYNQLFEENPINASGVDAKAILSARLSKSRRLENLIAQLPGEKKNGLFGNLIALSLGLTPNFKSNFDLAEDAKLQLSKDTYDDDLDNLLAQIGDQYADLFLAAKNLSDAILLSDILRVNTEITKAPLSASMIKRYDEHHQDLTLLKALVRQQLPEKYKEIFFDQSKNGYAGYIDGGASQEEFYKFIKPILEKMDGTEELLVKLNREDLLRKQRTFDNGSIPHQIHLGELHAILRRQEDFYPFLKDNREKIEKILTFRIPYYVGPLARGNSRFAWMTRKSEETITPWNFEEVVDKGASAQSFIERMTNFDKNLPNEKVLPKHSLLYEYFTVYNELTKVKYVTEGMRKPAFLSGEQKKAIVDLLFKTNRKVTVKQLKEDYFKKIECFDSVEISGVEDRFNASLGTYHDLLKIIKDKDFLDNEENEDILEDIVLTLTLFEDREMIEERLKTYAHLFDDKVMKQLKRRRYTGWGRLSRKLINGIRDKQSGKTILDFLKSDGFANRNFMQLIHDDSLTFKEDIQKAQVSGQGDSLHEHIANLAGSPAIKKGILQTVKVVDELVKVMGRHKPENIVIEMARENQTTQKGQKNSRERMKRIEEGIKELGSQILKEHPVENTQLQNEKLYLYYLQNGRDMYVDQELDINRLSDYDVDHIVPQSFLKDDSIDNKVLTRSDKARGKSDNVPSEEVVKKMKNYWRQLLNAKLITQRKFDNLTKAERGGLSELDKAGFIKRQLVETRQITKHVAQILDSRMNTKYDENDKLIREVKVITLKSKLVSDFRKDFQFYKVREINNYHHAHDAYLNAVVGTALIKKYPKLESEFVYGDYKVYDVRKMIAKSEQEIGKATAKYFFYSNIMNFFKTEITLANGEIRKRPLIETNGETGEIVWDKGRDFATVRKVLSMPQVNIVKKTEVQTGGFSKESILPKRNSDKLIARKKDWDPKKYGGFDSPTVAYSVLVVAKVEKGKSKKLKSVKELLGITIMERSSFEKNPIDFLEAKGYKEVKKDLIIKLPKYSLFELENGRKRMLASAGELQKGNELALPSKYVNFLYLASHYEKLKGSPEDNEQKQLFVEQHKHYLDEIIEQISEFSKRVILADANLDKVLSAYNKHRDKPIREQAENIIHLFTLTNLGAPAAFKYFDTTIDRKRYTSTKEVLDATLIHQSITGLYETRIDLSQLGGDGGGGGGSSPAPGGTVSLQDEHRLFDIPVTTSLPDVWLQDFPQAWAETGGLGRAKCQAPIIIDLKPTAVPVSIKQYPMSLEAHMGIRQHIIKFLELGVLRPCRSPWNTPLLPVKKPGTQDYRPVQDLREINKRTVDIHPTVPNPYNLLSTLKPDYSWYTVLDLKDAFFCLPLAPQSQELFAFEWKDPERGISGQLTWTRLPQGFKNSPTLFDEALHRDLTDFRTQHPEVTLLQYVDDLLLAAPTKKACTQGTRHLLQELGEKGYRASAKKAQICQTKVTYLGYILSEGKRWLTPGRIETVARIPPPRNPREVREFLGTAGFCRLWIPGFAELAAPLYALTKESTPFTWQTEHQLAFEALKKALLSAPALGLPDTSKPFTLFLDERQGIAKGVLTQKLGPWKRPVAYLSKKLDPVAAGWPPCLRIMAATAMLVKDSAKLTLGQPLTVITPHTLEAIVRQPPDRWITNARLTHYQALLLDTDRVQFGPPVTLNPATLLPVPENQPSPHDCRQVLAETHGTREDLKDQELPDADHTWYTDGSSYLDSGTRRAGAAVVDGHNTIWAQSLPPGTSAQKAELIALTKALELSKGKKANIYTDSRYAFATAHTHGSIYERRGLLTSEGKEIKNKAEIIALLKALFLPQEVAIIHCPGHQKGQDPVAVGNRQADRVARQAAMAEVLTLATEPDNTSHITAGKRTADGSEFEKRTADGSEFESPKKKAKVE

SEQ ID NO: 1506 - protein, 2100 aa, synthetic construct
MPAAKRVKLDGGDKKYSIGLDIGTNSVGWAVITDEYKVPSKKFKVLGNTDRHSIKKNLIGALLFDSGETAEATRLKRTARRRYTRRKNRICYLQEIFSNEMAKVDDSFFHRLEESFLVEEDKKHERHPIFGNIVDEVAYHEKYPTIYHLRKKLVDSTDKADLRLIYLALAHMIKFRGHFLIEGDLNPDNSDVDKLFIQLVQTYNQLFEENPINASGVDAKAILSARLSKSRRLENLIAQLPGEKKNGLFGNLIALSLGLTPNFKSNFDLAEDAKLQLSKDTYDDDLDNLLAQIGDQYADLFLAAKNLSDAILLSDILRVNTEITKAPLSASMIKRYDEHHQDLTLLKALVRQQLPEKYKEIFFDQSKNGYAGYIDGGASQEEFYKFIKPILEKMDGTEELLVKLNREDLLRKQRTFDNGSIPHQIHLGELHAILRRQEDFYPFLKDNREKIEKILTFRIPYYVGPLARGNSRFAWMTRKSEETITPWNFEEVVDKGASAQSFIERMTNFDKNLPNEKVLPKHSLLYEYFTVYNELTKVKYVTEGMRKPAFLSGEQKKAIVDLLFKTNRKVTVKQLKEDYFKKIECFDSVEISGVEDRFNASLGTYHDLLKIIKDKDFLDNEENEDILEDIVLTLTLFEDREMIEERLKTYAHLFDDKVMKQLKRRRYTGWGRLSRKLINGIRDKQSGKTILDFLKSDGFANRNFMQLIHDDSLTFKEDIQKAQVSGQGDSLHEHIANLAGSPAIKKGILQTVKVVDELVKVMGRHKPENIVIEMARENQTTQKGQKNSRERMKRIEEGIKELGSQILKEHPVENTQLQNEKLYLYYLQNGRDMYVDQELDINRLSDYDVDHIVPQSFLKDDSIDNKVLTRSDKARGKSDNVPSEEVVKKMKNYWRQLLNAKLITQRKFDNLTKAERGGLSELDKAGFIKRQLVETRQITKHVAQILDSRMNTKYDENDKLIREVKVITLKSKLVSDFRKDFQFYKVREINNYHHAHDAYLNAVVGTALIKKYPKLESEFVYGDYKVYDVRKMIAKSEQEIGKATAKYFFYSNIMNFFKTEITLANGEIRKRPLIETNGETGEIVWDKGRDFATVRKVLSMPQVNIVKKTEVQTGGFSKESILPKRNSDKLIARKKDWDPKKYGGFDSPTVAYSVLVVAKVEKGKSKKLKSVKELLGITIMERSSFEKNPIDFLEAKGYKEVKKDLIIKLPKYSLFELENGRKRMLASAGELQKGNELALPSKYVNFLYLASHYEKLKGSPEDNEQKQLFVEQHKHYLDEIIEQISEFSKRVILADANLDKVLSAYNKHRDKPIREQAENIIHLFTLTNLGAPAAFKYFDTTIDRKRYTSTKEVLDATLIHQSITGLYETRIDLSQLGGDGGPAPGGSGGGGGTVSLQDEHRLFDIPVTTSLPDVWLQDFPQAWAETGGLGRAKCQAPIIIDLKPTAVPVSIKQYPMSLEAHMGIRQHIIKFLELGVLRPCRSPWNTPLLPVKKPGTQDYRPVQDLREINKRTVDIHPTVPNPYNLLSTLKPDYSWYTVLDLKDAFFCLPLAPQSQELFAFEWKDPERGISGQLTWTRLPQGFKNSPTLFDEALHRDLTDFRTQHPEVTLLQYVDDLLLAAPTKKACTQGTRHLLQELGEKGYRASAKKAQICQTKVTYLGYILSEGKRWLTPGRIETVARIPPPRNPREVREFLGTAGFCRLWIPGFAELAAPLYALTKESTPFTWQTEHQLAFEALKKALLSAPALGLPDTSKPFTLFLDERQGIAKGVLTQKLGPWKRPVAYLSKKLDPVAAGWPPCLRIMAATAMLVKDSAKLTLGQPLTVITPHTLEAIVRQPPDRWITNARLTHYQALLLDTDRVQFGPPVTLNPATLLPVPENQPSPHDCRQVLAETHGTREDLKDQELPDADHTWYTDGSSYLDSGTRRAGAAVVDGHNTIWAQSLPPGTSAQKAELIALTKALELSKGKKANIYTDSRYAFATAHTHGSIYERRGLLTSEGKEIKNKAEIIALLKALFLPQEVAIIHCPGHQKGQDPVAVGNRQADRVARQAAMAEVLTLATEPDNTSHITAGKRTADGSEFEKRTADGSEFESPKKKAKVE

SEQ ID NO: 1507 - protein, 2106 aa, synthetic construct
MPAAKRVKLDGGDKKYSIGLDIGTNSVGWAVITDEYKVPSKKFKVLGNTDRHSIKKNLIGALLFDSGETAEATRLKRTARRRYTRRKNRICYLQEIFSNEMAKVDDSFFHRLEESFLVEEDKKHERHPIFGNIVDEVAYHEKYPTIYHLRKKLVDSTDKADLRLIYLALAHMIKFRGHFLIEGDLNPDNSDVDKLFIQLVQTYNQLFEENPINASGVDAKAILSARLSKSRRLENLIAQLPGEKKNGLFGNLIALSLGLTPNFKSNFDLAEDAKLQLSKDTYDDDLDNLLAQIGDQYADLFLAAKNLSDAILLSDILRVNTEITKAPLSASMIKRYDEHHQDLTLLKALVRQQLPEKYKEIFFDQSKNGYAGYIDGGASQEEFYKFIKPILEKMDGTEELLVKLNREDLLRKQRTFDNGSIPHQIHLGELHAILRRQEDFYPFLKDNREKIEKILTFRIPYYVGPLARGNSRFAWMTRKSEETITPWNFEEVVDKGASAQSFIERMTNFDKNLPNEKVLPKHSLLYEYFTVYNELTKVKYVTEGMRKPAFLSGEQKKAIVDLLFKTNRKVTVKQLKEDYFKKIECFDSVEISGVEDRFNASLGTYHDLLKIIKDKDFLDNEENEDILEDIVLTLTLFEDREMIEERLKTYAHLFDDKVMKQLKRRRYTGWGRLSRKLINGIRDKQSGKTILDFLKSDGFANRNFMQLIHDDSLTFKEDIQKAQVSGQGDSLHEHIANLAGSPAIKKGILQTVKVVDELVKVMGRHKPENIVIEMARENQTTQKGQKNSRERMKRIEEGIKELGSQILKEHPVENTQLQNEKLYLYYLQNGRDMYVDQELDINRLSDYDVDHIVPQSFLKDDSIDNKVLTRSDKARGKSDNVPSEEVVKKMKNYWRQLLNAKLITQRKFDNLTKAERGGLSELDKAGFIKRQLVETRQITKHVAQILDSRMNTKYDENDKLIREVKVITLKSKLVSDFRKDFQFYKVREINNYHHAHDAYLNAVVGTALIKKYPKLESEFVYGDYKVYDVRKMIAKSEQEIGKATAKYFFYSNIMNFFKTEITLANGEIRKRPLIETNGETGEIVWDKGRDFATVRKVLSMPQVNIVKKTEVQTGGFSKESILPKRNSDKLIARKKDWDPKKYGGFDSPTVAYSVLVVAKVEKGKSKKLKSVKELLGITIMERSSFEKNPIDFLEAKGYKEVKKDLIIKLPKYSLFELENGRKRMLASAGELQKGNELALPSKYVNFLYLASHYEKLKGSPEDNEQKQLFVEQHKHYLDEIIEQISEFSKRVILADANLDKVLSAYNKHRDKPIREQAENIIHLFTLTNLGAPAAFKYFDTTIDRKRYTSTKEVLDATLIHQSITGLYETRIDLSQLGGDGGGGSGGSGGSGGSGGSGGTVSLQDEHRLFDIPVTTSLPDVWLQDFPQAWAETGGLGRAKCQAPIIIDLKPTAVPVSIKQYPMSLEAHMGIRQHIIKFLELGVLRPCRSPWNTPLLPVKKPGTQDYRPVQDLREINKRTVDIHPTVPNPYNLLSTLKPDYSWYTVLDLKDAFFCLPLAPQSQELFAFEWKDPERGISGQLTWTRLPQGFKNSPTLFDEALHRDLTDFRTQHPEVTLLQYVDDLLLAAPTKKACTQGTRHLLQELGEKGYRASAKKAQICQTKVTYLGYILSEGKRWLTPGRIETVARIPPPRNPREVREFLGTAGFCRLWIPGFAELAAPLYALTKESTPFTWQTEHQLAFEALKKALLSAPALGLPDTSKPFTLFLDERQGIAKGVLTQKLGPWKRPVAYLSKKLDPVAAGWPPCLRIMAATAMLVKDSAKLTLGQPLTVITPHTLEAIVRQPPDRWITNARLTHYQALLLDTDRVQFGPPVTLNPATLLPVPENQPSPHDCRQVLAETHGTREDLKDQELPDADHTWYTDGSSYLDSGTRRAGAAVVDGHNTIWAQSLPPGTSAQKAELIALTKALELSKGKKANIYTDSRYAFATAHTHGSIYERRGLLTSEGKEIKNKAEIIALLKALFLPQEVAIIHCPGHQKGQDPVAVGNRQADRVARQAAMAEVLTLATEPDNTSHITAGKRTADGSEFEKRTADGSEFESPKKKAKVE

SEQ ID NO: 1508 - protein, 2100 aa, synthetic construct
MPAAKRVKLDGGDKKYSIGLDIGTNSVGWAVITDEYKVPSKKFKVLGNTDRHSIKKNLIGALLFDSGETAEATRLKRTARRRYTRRKNRICYLQEIFSNEMAKVDDSFFHRLEESFLVEEDKKHERHPIFGNIVDEVAYHEKYPTIYHLRKKLVDSTDKADLRLIYLALAHMIKFRGHFLIEGDLNPDNSDVDKLFIQLVQTYNQLFEENPINASGVDAKAILSARLSKSRRLENLIAQLPGEKKNGLFGNLIALSLGLTPNFKSNFDLAEDAKLQLSKDTYDDDLDNLLAQIGDQYADLFLAAKNLSDAILLSDILRVNTEITKAPLSASMIKRYDEHHQDLTLLKALVRQQLPEKYKEIFFDQSKNGYAGYIDGGASQEEFYKFIKPILEKMDGTEELLVKLNREDLLRKQRTFDNGSIPHQIHLGELHAILRRQEDFYPFLKDNREKIEKILTFRIPYYVGPLARGNSRFAWMTRKSEETITPWNFEEVVDKGASAQSFIERMTNFDKNLPNEKVLPKHSLLYEYFTVYNELTKVKYVTEGMRKPAFLSGEQKKAIVDLLFKTNRKVTVKQLKEDYFKKIECFDSVEISGVEDRFNASLGTYHDLLKIIKDKDFLDNEENEDILEDIVLTLTLFEDREMIEERLKTYAHLFDDKVMKQLKRRRYTGWGRLSRKLINGIRDKQSGKTILDFLKSDGFANRNFMQLIHDDSLTFKEDIQKAQVSGQGDSLHEHIANLAGSPAIKKGILQTVKVVDELVKVMGRHKPENIVIEMARENQTTQKGQKNSRERMKRIEEGIKELGSQILKEHPVENTQLQNEKLYLYYLQNGRDMYVDQELDINRLSDYDVDHIVPQSFLKDDSIDNKVLTRSDKARGKSDNVPSEEVVKKMKNYWRQLLNAKLITQRKFDNLTKAERGGLSELDKAGFIKRQLVETRQITKHVAQILDSRMNTKYDENDKLIREVKVITLKSKLVSDFRKDFQFYKVREINNYHHAHDAYLNAVVGTALIKKYPKLESEFVYGDYKVYDVRKMIAKSEQEIGKATAKYFFYSNIMNFFKTEITLANGEIRKRPLIETNGETGEIVWDKGRDFATVRKVLSMPQVNIVKKTEVQTGGFSKESILPKRNSDKLIARKKDWDPKKYGGFDSPTVAYSVLVVAKVEKGKSKKLKSVKELLGITIMERSSFEKNPIDFLEAKGYKEVKKDLIIKLPKYSLFELENGRKRMLASAGELQKGNELALPSKYVNFLYLASHYEKLKGSPEDNEQKQLFVEQHKHYLDEIIEQISEFSKRVILADANLDKVLSAYNKHRDKPIREQAENIIHLFTLTNLGAPAAFKYFDTTIDRKRYTSTKEVLDATLIHQSITGLYETRIDLSQLGGDGGGSSGGSPAPGGTVSLQDEHRLFDIPVTTSLPDVWLQDFPQAWAETGGLGRAKCQAPIIIDLKPTAVPVSIKQYPMSLEAHMGIRQHIIKFLELGVLRPCRSPWNTPLLPVKKPGTQDYRPVQDLREINKRTVDIHPTVPNPYNLLSTLKPDYSWYTVLDLKDAFFCLPLAPQSQELFAFEWKDPERGISGQLTWTRLPQGFKNSPTLFDEALHRDLTDFRTQHPEVTLLQYVDDLLLAAPTKKACTQGTRHLLQELGEKGYRASAKKAQICQTKVTYLGYILSEGKRWLTPGRIETVARIPPPRNPREVREFLGTAGFCRLWIPGFAELAAPLYALTKESTPFTWQTEHQLAFEALKKALLSAPALGLPDTSKPFTLFLDERQGIAKGVLTQKLGPWKRPVAYLSKKLDPVAAGWPPCLRIMAATAMLVKDSAKLTLGQPLTVITPHTLEAIVRQPPDRWITNARLTHYQALLLDTDRVQFGPPVTLNPATLLPVPENQPSPHDCRQVLAETHGTREDLKDQELPDADHTWYTDGSSYLDSGTRRAGAAVVDGHNTIWAQSLPPGTSAQKAELIALTKALELSKGKKANIYTDSRYAFATAHTHGSIYERRGLLTSEGKEIKNKAEIIALLKALFLPQEVAIIHCPGHQKGQDPVAVGNRQADRVARQAAMAEVLTLATEPDNTSHITAGKRTADGSEFEKRTADGSEFESPKKKAKVE

SEQ ID NO: 1509 - protein, 2097 aa, synthetic construct
MPAAKRVKLDGGDKKYSIGLDIGTNSVGWAVITDEYKVPSKKFKVLGNTDRHSIKKNLIGALLFDSGETAEATRLKRTARRRYTRRKNRICYLQEIFSNEMAKVDDSFFHRLEESFLVEEDKKHERHPIFGNIVDEVAYHEKYPTIYHLRKKLVDSTDKADLRLIYLALAHMIKFRGHFLIEGDLNPDNSDVDKLFIQLVQTYNQLFEENPINASGVDAKAILSARLSKSRRLENLIAQLPGEKKNGLFGNLIALSLGLTPNFKSNFDLAEDAKLQLSKDTYDDDLDNLLAQIGDQYADLFLAAKNLSDAILLSDILRVNTEITKAPLSASMIKRYDEHHQDLTLLKALVRQQLPEKYKEIFFDQSKNGYAGYIDGGASQEEFYKFIKPILEKMDGTEELLVKLNREDLLRKQRTFDNGSIPHQIHLGELHAILRRQEDFYPFLKDNREKIEKILTFRIPYYVGPLARGNSRFAWMTRKSEETITPWNFEEVVDKGASAQSFIERMTNFDKNLPNEKVLPKHSLLYEYFTVYNELTKVKYVTEGMRKPAFLSGEQKKAIVDLLFKTNRKVTVKQLKEDYFKKIECFDSVEISGVEDRFNASLGTYHDLLKIIKDKDFLDNEENEDILEDIVLTLTLFEDREMIEERLKTYAHLFDDKVMKQLKRRRYTGWGRLSRKLINGIRDKQSGKTILDFLKSDGFANRNFMQLIHDDSLTFKEDIQKAQVSGQGDSLHEHIANLAGSPAIKKGILQTVKVVDELVKVMGRHKPENIVIEMARENQTTQKGQKNSRERMKRIEEGIKELGSQILKEHPVENTQLQNEKLYLYYLQNGRDMYVDQELDINRLSDYDVDHIVPQSFLKDDSIDNKVLTRSDKARGKSDNVPSEEVVKKMKNYWRQLLNAKLITQRKFDNLTKAERGGLSELDKAGFIKRQLVETRQITKHVAQILDSRMNTKYDENDKLIREVKVITLKSKLVSDFRKDFQFYKVREINNYHHAHDAYLNAVVGTALIKKYPKLESEFVYGDYKVYDVRKMIAKSEQEIGKATAKYFFYSNIMNFFKTEITLANGEIRKRPLIETNGETGEIVWDKGRDFATVRKVLSMPQVNIVKKTEVQTGGFSKESILPKRNSDKLIARKKDWDPKKYGGFDSPTVAYSVLVVAKVEKGKSKKLKSVKELLGITIMERSSFEKNPIDFLEAKGYKEVKKDLIIKLPKYSLFELENGRKRMLASAGELQKGNELALPSKYVNFLYLASHYEKLKGSPEDNEQKQLFVEQHKHYLDEIIEQISEFSKRVILADANLDKVLSAYNKHRDKPIREQAENIIHLFTLTNLGAPAAFKYFDTTIDRKRYTSTKEVLDATLIHQSITGLYETRIDLSQLGGDGGPAPGSSGGTVSLQDEHRLFDIPVTTSLPDVWLQDFPQAWAETGGLGRAKCQAPIIIDLKPTAVPVSIKQYPMSLEAHMGIRQHIIKFLELGVLRPCRSPWNTPLLPVKKPGTQDYRPVQDLREINKRTVDIHPTVPNPYNLLSTLKPDYSWYTVLDLKDAFFCLPLAPQSQELFAFEWKDPERGISGQLTWTRLPQGFKNSPTLFDEALHRDLTDFRTQHPEVTLLQYVDDLLLAAPTKKACTQGTRHLLQELGEKGYRASAKKAQICQTKVTYLGYILSEGKRWLTPGRIETVARIPPPRNPREVREFLGTAGFCRLWIPGFAELAAPLYALTKESTPFTWQTEHQLAFEALKKALLSAPALGLPDTSKPFTLFLDERQGIAKGVLTQKLGPWKRPVAYLSKKLDPVAAGWPPCLRIMAATAMLVKDSAKLTLGQPLTVITPHTLEAIVRQPPDRWITNARLTHYQALLLDTDRVQFGPPVTLNPATLLPVPENQPSPHDCRQVLAETHGTREDLKDQELPDADHTWYTDGSSYLDSGTRRAGAAVVDGHNTIWAQSLPPGTSAQKAELIALTKALELSKGKKANIYTDSRYAFATAHTHGSIYERRGLLTSEGKEIKNKAEIIALLKALFLPQEVAIIHCPGHQKGQDPVAVGNRQADRVARQAAMAEVLTLATEPDNTSHITAGKRTADGSEFEKRTADGSEFESPKKKAKVE

SEQ ID NO: 1510 - protein, 2009 aa, synthetic construct
MPAAKRVKLDGGDKKYSIGLDIGTNSVGWAVITDEYKVPSKKFKVLGNTDRHSIKKNLIGALLFDSGETAEATRLKRTARRRYTRRKNRICYLQEIFSNEMAKVDDSFFHRLEESFLVEEDKKHERHPIFGNIVDEVAYHEKYPTIYHLRKKLVDSTDKADLRLIYLALAHMIKFRGHFLIEGDLNPDNSDVDKLFIQLVQTYNQLFEENPINASGVDAKAILSARLSKSRRLENLIAQLPGEKKNGLFGNLIALSLGLTPNFKSNFDLAEDAKLQLSKDTYDDDLDNLLAQIGDQYADLFLAAKNLSDAILLSDILRVNTEITKAPLSASMIKRYDEHHQDLTLLKALVRQQLPEKYKEIFFDQSKNGYAGYIDGGASQEEFYKFIKPILEKMDGTEELLVKLNREDLLRKQRTFDNGSIPHQIHLGELHAILRRQEDFYPFLKDNREKIEKILTFRIPYYVGPLARGNSRFAWMTRKSEETITPWNFEEVVDKGASAQSFIERMTNFDKNLPNEKVLPKHSLLYEYFTVYNELTKVKYVTEGMRKPAFLSGEQKKAIVDLLFKTNRKVTVKQLKEDYFKKIECFDSVEISGVEDRFNASLGTYHDLLKIIKDKDFLDNEENEDILEDIVLTLTLFEDREMIEERLKTYAHLFDDKVMKQLKRRRYTGWGRLSRKLINGIRDKQSGKTILDFLKSDGFANRNFMQLIHDDSLTFKEDIQKAQVSGQGDSLHEHIANLAGSPAIKKGILQTVKVVDELVKVMGRHKPENIVIEMARENQTTQKGQKNSRERMKRIEEGIKELGSQILKEHPVENTQLQNEKLYLYYLQNGRDMYVDQELDINRLSDYDVDHIVPQSFLKDDSIDNKVLTRSDKARGKSDNVPSEEVVKKMKNYWRQLLNAKLITQRKFDNLTKAERGGLSELDKAGFIKRQLVETRQITKHVAQILDSRMNTKYDENDKLIREVKVITLKSKLVSDFRKDFQFYKVREINNYHHAHDAYLNAVVGTALIKKYPKLESEFVYGDYKVYDVRKMIAKSEQEIGKATAKYFFYSNIMNFFKTEITLANGEIRKRPLIETNGETGEIVWDKGRDFATVRKVLSMPQVNIVKKTEVQTGGFSKESILPKRNSDKLIARKKDWDPKKYGGFDSPTVAYSVLVVAKVEKGKSKKLKSVKELLGITIMERSSFEKNPIDFLEAKGYKEVKKDLIIKLPKYSLFELENGRKRMLASAGELQKGNELALPSKYVNFLYLASHYEKLKGSPEDNEQKQLFVEQHKHYLDEIIEQISEFSKRVILADANLDKVLSAYNKHRDKPIREQAENIIHLFTLTNLGAPAAFKYFDTTIDRKRYTSTKEVLDATLIHQSITGLYETRIDLSQLGGDGGEAAAKGGGPAPGGGLEHLPPPPEVSQFPLNPERLQALTDLVSRALEAKHIEPYQGPGNNPIFPVKKPNGKWRFIHDLRATNSVTRDLASPSPGPPDLTSLPQGLPHLRTIDLTDAFFQIPLPTIFQPYFAFTLPQPNNYGPGTRYSWRVLPQGFKNSPTLFEQQLSHILTPVRKTFPNSLIIQYMDDILLASPAPGELAALTDKVTNALTKEGLPLSPEKTQATPGPIHFLGQVISQDCITYETLPSINVKSTWSLAELQSMLGELQWVSKGTPVLRSSLHQLYLALRGHRDPRDTIKLTSIQVQALRTIQKALTLNCRSRLVNQLPILALIMLRPTGTTAVLFQTKQKWPLVWLHTPHPATSLRPWGQLLANAVIILDKYSLQHYGQVCKSFHHNISNQALTYYLHTSDQSSVAILLQHSHRFHNLGAQPSGPWRSLLQMPQIFQNIDVLRPPFTISPVVINHAPCLFSDGSASKAAFIIWDRQVIHQQVLSLPSTCSAQAGELFGLLAGLQKSQPWVALNIFLDSKFLIGHLRRMALGAFPGPSTQCELHTQLLPLLQGKTVYVHHVRSHTLLQDPISRLNEATDALMLAPLLPLAGKRTADGSEFEKRTADGSEFESPKKKAKVE

SEQ ID NO: 1511 - protein, 2001 aa, synthetic construct
MPAAKRVKLDGGDKKYSIGLDIGTNSVGWAVITDEYKVPSKKFKVLGNTDRHSIKKNLIGALLFDSGETAEATRLKRTARRRYTRRKNRICYLQEIFSNEMAKVDDSFFHRLEESFLVEEDKKHERHPIFGNIVDEVAYHEKYPTIYHLRKKLVDSTDKADLRLIYLALAHMIKFRGHFLIEGDLNPDNSDVDKLFIQLVQTYNQLFEENPINASGVDAKAILSARLSKSRRLENLIAQLPGEKKNGLFGNLIALSLGLTPNFKSNFDLAEDAKLQLSKDTYDDDLDNLLAQIGDQYADLFLAAKNLSDAILLSDILRVNTEITKAPLSASMIKRYDEHHQDLTLLKALVRQQLPEKYKEIFFDQSKNGYAGYIDGGASQEEFYKFIKPILEKMDGTEELLVKLNREDLLRKQRTFDNGSIPHQIHLGELHAILRRQEDFYPFLKDNREKIEKILTFRIPYYVGPLARGNSRFAWMTRKSEETITPWNFEEVVDKGASAQSFIERMTNFDKNLPNEKVLPKHSLLYEYFTVYNELTKVKYVTEGMRKPAFLSGEQKKAIVDLLFKTNRKVTVKQLKEDYFKKIECFDSVEISGVEDRFNASLGTYHDLLKIIKDKDFLDNEENEDILEDIVLTLTLFEDREMIEERLKTYAHLFDDKVMKQLKRRRYTGWGRLSRKLINGIRDKQSGKTILDFLKSDGFANRNFMQLIHDDSLTFKEDIQKAQVSGQGDSLHEHIANLAGSPAIKKGILQTVKVVDELVKVMGRHKPENIVIEMARENQTTQKGQKNSRERMKRIEEGIKELGSQILKEHPVENTQLQNEKLYLYYLQNGRDMYVDQELDINRLSDYDVDHIVPQSFLKDDSIDNKVLTRSDKARGKSDNVPSEEVVKKMKNYWRQLLNAKLITQRKFDNLTKAERGGLSELDKAGFIKRQLVETRQITKHVAQILDSRMNTKYDENDKLIREVKVITLKSKLVSDFRKDFQFYKVREINNYHHAHDAYLNAVVGTALIKKYPKLESEFVYGDYKVYDVRKMIAKSEQEIGKATAKYFFYSNIMNFFKTEITLANGEIRKRPLIETNGETGEIVWDKGRDFATVRKVLSMPQVNIVKKTEVQTGGFSKESILPKRNSDKLIARKKDWDPKKYGGFDSPTVAYSVLVVAKVEKGKSKKLKSVKELLGITIMERSSFEKNPIDFLEAKGYKEVKKDLIIKLPKYSLFELENGRKRMLASAGELQKGNELALPSKYVNFLYLASHYEKLKGSPEDNEQKQLFVEQHKHYLDEIIEQISEFSKRVILADANLDKVLSAYNKHRDKPIREQAENIIHLFTLTNLGAPAAFKYFDTTIDRKRYTSTKEVLDATLIHQSITGLYETRIDLSQLGGDGGGGSGGGLEHLPPPPEVSQFPLNPERLQALTDLVSRALEAKHIEPYQGPGNNPIFPVKKPNGKWRFIHDLRATNSVTRDLASPSPGPPDLTSLPQGLPHLRTIDLTDAFFQIPLPTIFQPYFAFTLPQPNNYGPGTRYSWRVLPQGFKNSPTLFQQQLSHILTPVRKTFPNSLIIQYMDDILLASPAPGELAALTDKVTNALTKEGLPLSPEKTQATPGPIHFLGQVISQDCITYETLPSINVKSTWSLAELQSMLGELQWVSKGTPVLRSSLHQLYLALRGHRDPRDTIKLTSIQVQALRTIQKALTLNCRSRLVNQLPILALIMLRPTGTTAVLFQTKQKWPLVWLHTPHPATSLRPWGQLLANAVIILDKYSLQHYGQVCKSFHHNISNQALTYYLHTSDQSSVAILLQHSHRFHNLGAQPSGPWRSLLQMPQIFQNIDVLRPPFTISPVVINHAPCLFSDGSASKAAFIIWDRQVIHQQVLSLPSTCSAQAGELFGLLAGLQKSQPWVALNIFLDSKFLIGHLRRMAWGAFPGPSTQCELHTQLLPLLQGKTVYVHHVRSHTLLQDPISRLNEATDALMLAPLLPLAGKRTADGSEFEKRTADGSEFESPKKKAKVE

SEQ ID NO: 1512 - protein, 2004 aa, synthetic construct
MPAAKRVKLDGGDKKYSIGLDIGTNSVGWAVITDEYKVPSKKFKVLGNTDRHSIKKNLIGALLFDSGETAEATRLKRTARRRYTRRKNRICYLQEIFSNEMAKVDDSFFHRLEESFLVEEDKKHERHPIFGNIVDEVAYHEKYPTIYHLRKKLVDSTDKADLRLIYLALAHMIKFRGHFLIEGDLNPDNSDVDKLFIQLVQTYNQLFEENPINASGVDAKAILSARLSKSRRLENLIAQLPGEKKNGLFGNLIALSLGLTPNFKSNFDLAEDAKLQLSKDTYDDDLDNLLAQIGDQYADLFLAAKNLSDAILLSDILRVNTEITKAPLSASMIKRYDEHHQDLTLLKALVRQQLPEKYKEIFFDQSKNGYAGYIDGGASQEEFYKFIKPILEKMDGTEELLVKLNREDLLRKQRTFDNGSIPHQIHLGELHAILRRQEDFYPFLKDNREKIEKILTFRIPYYVGPLARGNSRFAWMTRKSEETITPWNFEEVVDKGASAQSFIERMTNFDKNLPNEKVLPKHSLLYEYFTVYNELTKVKYVTEGMRKPAFLSGEQKKAIVDLLFKTNRKVTVKQLKEDYFKKIECFDSVEISGVEDRFNASLGTYHDLLKIIKDKDFLDNEENEDILEDIVLTLTLFEDREMIEERLKTYAHLFDDKVMKQLKRRRYTGWGRLSRKLINGIRDKQSGKTILDFLKSDGFANRNFMQLIHDDSLTFKEDIQKAQVSGQGDSLHEHIANLAGSPAIKKGILQTVKVVDELVKVMGRHKPENIVIEMARENQTTQKGQKNSRERMKRIEEGIKELGSQILKEHPVENTQLQNEKLYLYYLQNGRDMYVDQELDINRLSDYDVDHIVPQSFLKDDSIDNKVLTRSDKARGKSDNVPSEEVVKKMKNYWRQLLNAKLITQRKFDNLTKAERGGLSELDKAGFIKRQLVETRQITKHVAQILDSRMNTKYDENDKLIREVKVITLKSKLVSDFRKDFQFYKVREINNYHHAHDAYLNAVVGTALIKKYPKLESEFVYGDYKVYDVRKMIAKSEQEIGKATAKYFFYSNIMNFFKTEITLANGEIRKRPLIETNGETGEIVWDKGRDFATVRKVLSMPQVNIVKKTEVQTGGFSKESILPKRNSDKLIARKKDWDPKKYGGFDSPTVAYSVLVVAKVEKGKSKKLKSVKELLGITIMERSSFEKNPIDFLEAKGYKEVKKDLIIKLPKYSLFELENGRKRMLASAGELQKGNELALPSKYVNFLYLASHYEKLKGSPEDNEQKQLFVEQHKHYLDEIIEQISEFSKRVILADANLDKVLSAYNKHRDKPIREQAENIIHLFTLTNLGAPAAFKYFDTTIDRKRYTSTKEVLDATLIHQSITGLYETRIDLSQLGGDGGGGSGGGGGGLEHLPPPPEVSQFPLNPERLQALTDLVSRALEAKHIEPYQGPGNNPIFPVKKPNGKWRFIHDLRATNSVTRDLASPSPGPPDLTSLPQGLPHLRTIDLTDAFFQIPLPTIFQPYFAFTLPQPNNYGPGTRYSWRVLPQGFKNSPTLFQQQLSHILTPVRKTFPNSLIIQYMDDILLASPAPGELAALTDKVTNALTKEGLPLSPEKTQATPGPIHFLGQVISQDCITYETLPSINVKSTWSLAELQSMLGELQWVSKGTPVLRSSLHQLYLALRGHRDPRDTIKLTSIQVQALRTIQKALTLNCRSRLVNQLPILALIMLRPTGTTAVLFQTKQKWPLVWLHTPHPATSLRPWGQLLANAVIILDKYSLQHYGQVCKSFHHNISNQALTYYLHTSDQSSVAILLQHSHRFHNLGAQPSGPWRSLLQMPQIFQNIDVLRPPFTISPVVINHAPCLFSDGSASKAAFIIWDRQVIHQQVLSLPSTCSAQAGELFGLLAGLQKSQPWVALNIFLDSKFLIGHLRRMAWGAFPGPSTQCELHTQLLPLLQGKTVYVHHVRSHTLLQDPISRLNEATDALMLAPLLPLAGKRTADGSEFEKRTADGSEFESPKKKAKVE

SEQ ID NO: 1513 - protein, 2007 aa, synthetic construct
MPAAKRVKLDGGDKKYSIGLDIGTNSVGWAVITDEYKVPSKKFKVLGNTDRHSIKKNLIGALLFDSGETAEATRLKRTARRRYTRRKNRICYLQEIFSNEMAKVDDSFFHRLEESFLVEEDKKHERHPIFGNIVDEVAYHEKYPTIYHLRKKLVDSTDKADLRLIYLALAHMIKFRGHFLIEGDLNPDNSDVDKLFIQLVQTYNQLFEENPINASGVDAKAILSARLSKSRRLENLIAQLPGEKKNGLFGNLIALSLGLTPNFKSNFDLAEDAKLQLSKDTYDDDLDNLLAQIGDQYADLFLAAKNLSDAILLSDILRVNTEITKAPLSASMIKRYDEHHQDLTLLKALVRQQLPEKYKEIFFDQSKNGYAGYIDGGASQEEFYKFIKPILEKMDGTEELLVKLNREDLLRKQRTFDNGSIPHQIHLGELHAILRRQEDFYPFLKDNREKIEKILTFRIPYYVGPLARGNSRFAWMTRKSEETITPWNFEEVVDKGASAQSFIERMTNFDKNLPNEKVLPKHSLLYEYFTVYNELTKVKYVTEGMRKPAFLSGEQKKAIVDLLFKTNRKVTVKQLKEDYFKKIECFDSVEISGVEDRFNASLGTYHDLLKIIKDKDFLDNEENEDILEDIVLTLTLFEDREMIEERLKTYAHLFDDKVMKQLKRRRYTGWGRLSRKLINGIRDKQSGKTILDFLKSDGFANRNFMQLIHDDSLTFKEDIQKAQVSGQGDSLHEHIANLAGSPAIKKGILQTVKVVDELVKVMGRHKPENIVIEMARENQTTQKGQKNSRERMKRIEEGIKELGSQILKEHPVENTQLQNEKLYLYYLQNGRDMYVDQELDINRLSDYDVDHIVPQSFLKDDSIDNKVLTRSDKARGKSDNVPSEEVVKKMKNYWRQLLNAKLITQRKFDNLTKAERGGLSELDKAGFIKRQLVETRQITKHVAQILDSRMNTKYDENDKLIREVKVITLKSKLVSDFRKDFQFYKVREINNYHHAHDAYLNAVVGTALIKKYPKLESEFVYGDYKVYDVRKMIAKSEQEIGKATAKYFFYSNIMNFFKTEITLANGEIRKRPLIETNGETGEIVWDKGRDFATVRKVLSMPQVNIVKKTEVQTGGFSKESILPKRNSDKLIARKKDWDPKKYGGFDSPTVAYSVLVVAKVEKGKSKKLKSVKELLGITIMERSSFEKNPIDFLEAKGYKEVKKDLIIKLPKYSLFELENGRKRMLASAGELQKGNELALPSKYVNFLYLASHYEKLKGSPEDNEQKQLFVEQHKHYLDEIIEQISEFSKRVILADANLDKVLSAYNKHRDKPIREQAENIIHLFTLTNLGAPAAFKYFDTTIDRKRYTSTKEVLDATLIHQSITGLYETRIDLSQLGGDGGPAPGGGGSSGGGLEHLPPPPEVSQFPLNPERLQALTDLVSRALEAKHIEPYQGPGNNPIFPVKKPNGKWRFIHDLRATNSVTRDLASPSPGPPDLTSLPQGLPHLRTIDLTDAFFQIPLPTIFQPYFAFTLPQPNNYGPGTRYSWRVLPQGFKNSPTLFQQQLSHILTPVRKTFPNSLIIQYMDDILLASPAPGELAALTDKVTNALTKEGLPLSPEKTQATPGPIHFLGQVISQDCITYETLPSINVKSTWSLAELQSMLGELQWVSKGTPVLRSSLHQLYLALRGHRDPRDTIKLTSIQVQALRTIQKALTLNCRSRLVNQLPILALIMLRPTGTTAVLFQTKQKWPLVWLHTPHPATSLRPWGQLLANAVIILDKYSLQHYGQVCKSFHHNISNQALTYYLHTSDQSSVAILLQHSHRFHNLGAQPSGPWRSLLQMPQIFQNIDVLRPPFTISPVVINHAPCLFSDGSASKAAFIIWDRQVIHQQVLSLPSTCSAQAGELFGLLAGLQKSQPWVALNIFLDSKFLIGHLRRMAWGAFPGPSTQCELHTQLLPLLQGKTVYVHHVRSHTLLQDPISRLNEATDALMLAPLLPLAGKRTADGSEFEKRTADGSEFESPKKKAKVE

SEQ ID NO: 1514 - protein, 2007 aa, synthetic construct
MPAAKRVKLDGGDKKYSIGLDIGTNSVGWAVITDEYKVPSKKFKVLGNTDRHSIKKNLIGALLFDSGETAEATRLKRTARRRYTRRKNRICYLQEIFSNEMAKVDDSFFHRLEESFLVEEDKKHERHPIFGNIVDEVAYHEKYPTIYHLRKKLVDSTDKADLRLIYLALAHMIKFRGHFLIEGDLNPDNSDVDKLFIQLVQTYNQLFEENPINASGVDAKAILSARLSKSRRLENLIAQLPGEKKNGLFGNLIALSLGLTPNFKSNFDLAEDAKLQLSKDTYDDDLDNLLAQIGDQYADLFLAAKNLSDAILLSDILRVNTEITKAPLSASMIKRYDEHHQDLTLLKALVRQQLPEKYKEIFFDQSKNGYAGYIDGGASQEEFYKFIKPILEKMDGTEELLVKLNREDLLRKQRTFDNGSIPHQIHLGELHAILRRQEDFYPFLKDNREKIEKILTFRIPYYVGPLARGNSRFAWMTRKSEETITPWNFEEVVDKGASAQSFIERMTNFDKNLPNEKVLPKHSLLYEYFTVYNELTKVKYVTEGMRKPAFLSGEQKKAIVDLLFKTNRKVTVKQLKEDYFKKIECFDSVEISGVEDRFNASLGTYHDLLKIIKDKDFLDNEENEDILEDIVLTLTLFEDREMIEERLKTYAHLFDDKVMKQLKRRRYTGWGRLSRKLINGIRDKQSGKTILDFLKSDGFANRNFMQLIHDDSLTFKEDIQKAQVSGQGDSLHEHIANLAGSPAIKKGILQTVKVVDELVKVMGRHKPENIVIEMARENQTTQKGQKNSRERMKRIEEGIKELGSQILKEHPVENTQLQNEKLYLYYLQNGRDMYVDQELDINRLSDYDVDHIVPQSFLKDDSIDNKVLTRSDKARGKSDNVPSEEVVKKMKNYWRQLLNAKLITQRKFDNLTKAERGGLSELDKAGFIKRQLVETRQITKHVAQILDSRMNTKYDENDKLIREVKVITLKSKLVSDFRKDFQFYKVREINNYHHAHDAYLNAVVGTALIKKYPKLESEFVYGDYKVYDVRKMIAKSEQEIGKATAKYFFYSNIMNFFKTEITLANGEIRKRPLIETNGETGEIVWDKGRDFATVRKVLSMPQVNIVKKTEVQTGGFSKESILPKRNSDKLIARKKDWDPKKYGGFDSPTVAYSVLVVAKVEKGKSKKLKSVKELLGITIMERSSFEKNPIDFLEAKGYKEVKKDLIIKLPKYSLFELENGRKRMLASAGELQKGNELALPSKYVNFLYLASHYEKLKGSPEDNEQKQLFVEQHKHYLDEIIEQISEFSKRVILADANLDKVLSAYNKHRDKPIREQAENIIHLFTLTNLGAPAAFKYFDTTIDRKRYTSTKEVLDATLIHQSITGLYETRIDLSQLGGDGGGGGPAPGSSGGGLEHLPPPPEVSQFPLNPERLQALTDLVSRALEAKHIEPYQGPGNNPIFPVKKPNGKWRFIHDLRATNSVTRDLASPSPGPPDLTSPPQGLPHLRTIDLTDAFFQIPLPTIFQPYFAFTLPQPNNYGPGTRYSWRVLPQGFKNSPTLFQQQLSHILTPVRKTFPNSLIIQYMDDILLASPAPGELAALTDKVTNALTKEGLPLSPEKTQATPGPIHFLGQVISQDCITYETLPSINVKSTWSLAELQSMLGELQWVSKGTPVLRSSLHQLYLALRGHRDPRDTIKLTSIQVQALRTIQKALTLNCRSRLVNQLPILALIMLRPTGTTAVLFQTKQKWPLVWLHTPHPATSLRPWGQLLANAVIILDKYSLQHYGQVCKSFHHNISNQALTYYLHTSDQSSVAILLQHSHRFHNLGAQPSGPWRSLLQMPQIFQNIDVLRPPFTISPVVINHAPCLFSDGSASKAAFIIWDRQVIHQQVLSLPSTCSAQAGELFGLLAGLQKSQPWVALNIFLDSKFLIGHLRRMAWGAFPGPSTQCELHTQLLPLLQGKTVYVHHVRSHTLLQDPISRLNEATDALMLAPLLPLAGKRTADGSEFEKRTADGSEFESPKKKAKVE

SEQ ID NO: 1515 - protein, 2007 aa, synthetic construct
MPAAKRVKLDGGDKKYSIGLDIGTNSVGWAVITDEYKVPSKKFKVLGNTDRHSIKKNLIGALLFDSGETAEATRLKRTARRRYTRRKNRICYLQEIFSNEMAKVDDSFFHRLEESFLVEEDKKHERHPIFGNIVDEVAYHEKYPTIYHLRKKLVDSTDKADLRLIYLALAHMIKFRGHFLIEGDLNPDNSDVDKLFIQLVQTYNQLFEENPINASGVDAKAILSARLSKSRRLENLIAQLPGEKKNGLFGNLIALSLGLTPNFKSNFDLAEDAKLQLSKDTYDDDLDNLLAQIGDQYADLFLAAKNLSDAILLSDILRVNTEITKAPLSASMIKRYDEHHQDLTLLKALVRQQLPEKYKEIFFDQSKNGYAGYIDGGASQEEFYKFIKPILEKMDGTEELLVKLNREDLLRKQRTFDNGSIPHQIHLGELHAILRRQEDFYPFLKDNREKIEKILTFRIPYYVGPLARGNSRFAWMTRKSEETITPWNFEEVVDKGASAQSFIERMTNFDKNLPNEKVLPKHSLLYEYFTVYNELTKVKYVTEGMRKPAFLSGEQKKAIVDLLFKTNRKVTVKQLKEDYFKKIECFDSVEISGVEDRFNASLGTYHDLLKIIKDKDFLDNEENEDILEDIVLTLTLFEDREMIEERLKTYAHLFDDKVMKQLKRRRYTGWGRLSRKLINGIRDKQSGKTILDFLKSDGFANRNFMQLIHDDSLTFKEDIQKAQVSGQGDSLHEHIANLAGSPAIKKGILQTVKVVDELVKVMGRHKPENIVIEMARENQTTQKGQKNSRERMKRIEEGIKELGSQILKEHPVENTQLQNEKLYLYYLQNGRDMYVDQELDINRLSDYDVDHIVPQSFLKDDSIDNKVLTRSDKARGKSDNVPSEEVVKKMKNYWRQLLNAKLITQRKFDNLTKAERGGLSELDKAGFIKRQLVETRQITKHVAQILDSRMNTKYDENDKLIREVKVITLKSKLVSDFRKDFQFYKVREINNYHHAHDAYLNAVVGTALIKKYPKLESEFVYGDYKVYDVRKMIAKSEQEIGKATAKYFFYSNIMNFFKTEITLANGEIRKRPLIETNGETGEIVWDKGRDFATVRKVLSMPQVNIVKKTEVQTGGFSKESILPKRNSDKLIARKKDWDPKKYGGFDSPTVAYSVLVVAKVEKGKSKKLKSVKELLGITIMERSSFEKNPIDFLEAKGYKEVKKDLIIKLPKYSLFELENGRKRMLASAGELQKGNELALPSKYVNFLYLASHYEKLKGSPEDNEQKQLFVEQHKHYLDEIIEQISEFSKRVILADANLDKVLSAYNKHRDKPIREQAENIIHLFTLTNLGAPAAFKYFDTTIDRKRYTSTKEVLDATLIHQSITGLYETRIDLSQLGGDGGGSSGGGPAPGGGLEHLPPPPEVSQFPLNPERLQALTDLVSRALEAKHIEPYQGPGNNPIFPVKKPNGKWRFIHDLRATNSVTRDLASPSPGPPDLTSPPQGLPHLRTIDLTDAFFQIPLPTIFQPYFAFTLPQPNNYGPGTRYSWRVLPQGFKNSPTLFQQQLSHILTPVRKTFPNSLIIQYMDDILLASPAPGELAALTDKVTNALTKEGLPLSPEKTQATPGPIHFLGQVISQDCITYETLPSINVKSTWSLAELQSMLGELQWVSKGTPVLRSSLHQLYLALRGHRDPRDTIKLTSIQVQALRTIQKALTLNCRSRLVNQLPILALIMLRPTGTTAVLFQTKQKWPLVWLHTPHPATSLRPWGQLLANAVIILDKYSLQHYGQVCKSFHHNISNQALTYYLHTSDQSSVAILLQHSHRFHNLGAQPSGPWRSLLQMPQIFQNIDVLRPPFTISPVVINHAPCLFSDGSASKAAFIIWDRQVIHQQVLSLPSTCSAQAGELFGLLAGLQKSQPWVALNIFLDSKFLIGHLRRMAWGAFPGPSTQCELHTQLLPLLQGKTVYVHHVRSHTLLQDPISRLNEATDALMLAPLLPLAGKRTADGSEFEKRTADGSEFESPKKKAKVE

SEQ ID NO: 1516 - protein, 2006 aa, synthetic construct
MPAAKRVKLDGGDKKYSIGLDIGTNSVGWAVITDEYKVPSKKFKVLGNTDRHSIKKNLIGALLFDSGETAEATRLKRTARRRYTRRKNRICYLQEIFSNEMAKVDDSFFHRLEESFLVEEDKKHERHPIFGNIVDEVAYHEKYPTIYHLRKKLVDSTDKADLRLIYLALAHMIKFRGHFLIEGDLNPDNSDVDKLFIQLVQTYNQLFEENPINASGVDAKAILSARLSKSRRLENLIAQLPGEKKNGLFGNLIALSLGLTPNFKSNFDLAEDAKLQLSKDTYDDDLDNLLAQIGDQYADLFLAAKNLSDAILLSDILRVNTEITKAPLSASMIKRYDEHHQDLTLLKALVRQQLPEKYKEIFFDQSKNGYAGYIDGGASQEEFYKFIKPILEKMDGTEELLVKLNREDLLRKQRTFDNGSIPHQIHLGELHAILRRQEDFYPFLKDNREKIEKILTFRIPYYVGPLARGNSRFAWMTRKSEETITPWNFEEVVDKGASAQSFIERMTNFDKNLPNEKVLPKHSLLYEYFTVYNELTKVKYVTEGMRKPAFLSGEQKKAIVDLLFKTNRKVTVKQLKEDYFKKIECFDSVEISGVEDRFNASLGTYHDLLKIIKDKDFLDNEENEDILEDIVLTLTLFEDREMIEERLKTYAHLFDDKVMKQLKRRRYTGWGRLSRKLINGIRDKQSGKTILDFLKSDGFANRNFMQLIHDDSLTFKEDIQKAQVSGQGDSLHEHIANLAGSPAIKKGILQTVKVVDELVKVMGRHKPENIVIEMARENQTTQKGQKNSRERMKRIEEGIKELGSQILKEHPVENTQLQNEKLYLYYLQNGRDMYVDQELDINRLSDYDVDHIVPQSFLKDDSIDNKVLTRSDKARGKSDNVPSEEVVKKMKNYWRQLLNAKLITQRKFDNLTKAERGGLSELDKAGFIKRQLVETRQITKHVAQILDSRMNTKYDENDKLIREVKVITLKSKLVSDFRKDFQFYKVREINNYHHAHDAYLNAVVGTALIKKYPKLESEFVYGDYKVYDVRKMIAKSEQEIGKATAKYFFYSNIMNFFKTEITLANGEIRKRPLIETNGETGEIVWDKGRDFATVRKVLSMPQVNIVKKTEVQTGGFSKESILPKRNSDKLIARKKDWDPKKYGGFDSPTVAYSVLVVAKVEKGKSKKLKSVKELLGITIMERSSFEKNPIDFLEAKGYKEVKKDLIIKLPKYSLFELENGRKRMLASAGELQKGNELALPSKYVNFLYLASHYEKLKGSPEDNEQKQLFVEQHKHYLDEIIEQISEFSKRVILADANLDKVLSAYNKHRDKPIREQAENIIHLFTLTNLGAPAAFKYFDTTIDRKRYTSTKEVLDATLIHQSITGLYETRIDLSQLGGDGGGGSEAAAKGGGLEHLPPPPEVSQFPLNPERLQALTDLVSRALEAKHIEPYQGPGNNPIFPVKKPNGKWRFIHDLRATNSVTRDLASPSPGPPDLTSPPQGLPHLRTIDLTDAFFQIPLPTIFQPYFAFTLPQPNNYGPGTRYSWRVLPQGFKNSPTLFQQQLSHILTPVRKTFPNSLIIQYMDDILLASPAPGELAALTDKVTNALTKEGLPLSPEKTQATPGPIHFLGQVISQDCITYETLPSINVKSTWSLAELQSMLGELQWVSKGTPVLRSSLHQLYLALRGHRDPRDTIKLTSIQVQALRTIQKALTLNCRSRLVNQLPILALIMLRPTGTTAVLFQTKQKWPLVWLHTPHPATSLRPWGQLLANAVIILDKYSLQHYGQVCKSFHHNISNQALTYYLHTSDQSSVAILLQHSHRFHNLGAQPSGPWRSLLQMPQIFQNIDVLRPPFTISPVVINHAPCLFSDGSASKAAFIIWDRQVIHQQVLSLPSTCSAQAGELFGLLAGLQKSQPWVALNIFLDSKFLIGHLRRMAWGAFPGPSTQCELHTQLLPLLQGKTVYVHHVRSHTLLQDPISRLNEATDALMLAPLLPLAGKRTADGSEFEKRTADGSEFESPKKKAKVE

SEQ ID NO: 1517 - protein, 2009 aa, synthetic construct
MPAAKRVKLDGGDKKYSIGLDIGTNSVGWAVITDEYKVPSKKFKVLGNTDRHSIKKNLIGALLFDSGETAEATRLKRTARRRYTRRKNRICYLQEIFSNEMAKVDDSFFHRLEESFLVEEDKKHERHPIFGNIVDEVAYHEKYPTIYHLRKKLVDSTDKADLRLIYLALAHMIKFRGHFLIEGDLNPDNSDVDKLFIQLVQTYNQLFEENPINASGVDAKAILSARLSKSRRLENLIAQLPGEKKNGLFGNLIALSLGLTPNFKSNFDLAEDAKLQLSKDTYDDDLDNLLAQIGDQYADLFLAAKNLSDAILLSDILRVNTEITKAPLSASMIKRYDEHHQDLTLLKALVRQQLPEKYKEIFFDQSKNGYAGYIDGGASQEEFYKFIKPILEKMDGTEELLVKLNREDLLRKQRTFDNGSIPHQIHLGELHAILRRQEDFYPFLKDNREKIEKILTFRIPYYVGPLARGNSRFAWMTRKSEETITPWNFEEVVDKGASAQSFIERMTNFDKNLPNEKVLPKHSLLYEYFTVYNELTKVKYVTEGMRKPAFLSGEQKKAIVDLLFKTNRKVTVKQLKEDYFKKIECFDSVEISGVEDRFNASLGTYHDLLKIIKDKDFLDNEENEDILEDIVLTLTLFEDREMIEERLKTYAHLFDDKVMKQLKRRRYTGWGRLSRKLINGIRDKQSGKTILDFLKSDGFANRNFMQLIHDDSLTFKEDIQKAQVSGQGDSLHEHIANLAGSPAIKKGILQTVKVVDELVKVMGRHKPENIVIEMARENQTTQKGQKNSRERMKRIEEGIKELGSQILKEHPVENTQLQNEKLYLYYLQNGRDMYVDQELDINRLSDYDVDHIVPQSFLKDDSIDNKVLTRSDKARGKSDNVPSEEVVKKMKNYWRQLLNAKLITQRKFDNLTKAERGGLSELDKAGFIKRQLVETRQITKHVAQILDSRMNTKYDENDKLIREVKVITLKSKLVSDFRKDFQFYKVREINNYHHAHDAYLNAVVGTALIKKYPKLESEFVYGDYKVYDVRKMIAKSEQEIGKATAKYFFYSNIMNFFKTEITLANGEIRKRPLIETNGETGEIVWDKGRDFATVRKVLSMPQVNIVKKTEVQTGGFSKESILPKRNSDKLIARKKDWDPKKYGGFDSPTVAYSVLVVAKVEKGKSKKLKSVKELLGITIMERSSFEKNPIDFLEAKGYKEVKKDLIIKLPKYSLFELENGRKRMLASAGELQKGNELALPSKYVNFLYLASHYEKLKGSPEDNEQKQLFVEQHKHYLDEIIEQISEFSKRVILADANLDKVLSAYNKHRDKPIREQAENIIHLFTLTNLGAPAAFKYFDTTIDRKRYTSTKEVLDATLIHQSITGLYETRIDLSQLGGDGGPAPEAAAKGSSGGGLEHLPPPPEVSQFPLNPERLQALTDLVSRALEAKHIEPYQGPGNNPIFPVKKPNGKWRFIHDLRATNSVTRDLASPSPGPPDLTSPPQGLPHLRTIDLTDAFFQIPLPTIFQPYFAFTLPQPNNYGPGTRYSWRVLPQGFKNSPTLFQQQLSHILTPVRKTFPNSLIIQYMDDILLASPAPGELAALTDKVTNALTKEGLPLSPEKTQATPGPIHFLGQVISQDCITYETLPSINVKSTWSLAELQSMLGELQWVSKGTPVLRSSLHQLYLALRGHRDPRDTIKLTSIQVQALRTIQKALTLNCRSRLVNQLPILALIMLRPTGTTAVLFQTKQKWPLVWLHTPHPATSLRPWGQLLANAVIILDKYSLQHYGQVCKSFHHNISNQALTYYLHTSDQSSVAILLQHSHRFHNLGAQPSGPWRSLLQMPQIFQNIDVLRPPFTISPVVINHAPCLFSDGSASKAAFIIWDRQVIHQQVLSLPSTCSAQAGELFGLLAGLQKSQPWVALNIFLDSKFLIGHLRRMAWGAFPGPSTQCELHTQLLPLLQGKTVYVHHVRSHTLLQDPISRLNEATDALMLAPLLPLAGKRTADGSEFEKRTADGSEFESPKKKAKVE

SEQ ID NO: 1518 - protein, 2007 aa, synthetic construct
MPAAKRVKLDGGDKKYSIGLDIGTNSVGWAVITDEYKVPSKKFKVLGNTDRHSIKKNLIGALLFDSGETAEATRLKRTARRRYTRRKNRICYLQEIFSNEMAKVDDSFFHRLEESFLVEEDKKHERHPIFGNIVDEVAYHEKYPTIYHLRKKLVDSTDKADLRLIYLALAHMIKFRGHFLIEGDLNPDNSDVDKLFIQLVQTYNQLFEENPINASGVDAKAILSARLSKSRRLENLIAQLPGEKKNGLFGNLIALSLGLTPNFKSNFDLAEDAKLQLSKDTYDDDLDNLLAQIGDQYADLFLAAKNLSDAILLSDILRVNTEITKAPLSASMIKRYDEHHQDLTLLKALVRQQLPEKYKEIFFDQSKNGYAGYIDGGASQEEFYKFIKPILEKMDGTEELLVKLNREDLLRKQRTFDNGSIPHQIHLGELHAILRRQEDFYPFLKDNREKIEKILTFRIPYYVGPLARGNSRFAWMTRKSEETITPWNFEEVVDKGASAQSFIERMTNFDKNLPNEKVLPKHSLLYEYFTVYNELTKVKYVTEGMRKPAFLSGEQKKAIVDLLFKTNRKVTVKQLKEDYFKKIECFDSVEISGVEDRFNASLGTYHDLLKIIKDKDFLDNEENEDILEDIVLTLTLFEDREMIEERLKTYAHLFDDKVMKQLKRRRYTGWGRLSRKLINGIRDKQSGKTILDFLKSDGFANRNFMQLIHDDSLTFKEDIQKAQVSGQGDSLHEHIANLAGSPAIKKGILQTVKVVDELVKVMGRHKPENIVIEMARENQTTQKGQKNSRERMKRIEEGIKELGSQILKEHPVENTQLQNEKLYLYYLQNGRDMYVDQELDINRLSDYDVDHIVPQSFLKDDSIDNKVLTRSDKARGKSDNVPSEEVVKKMKNYWRQLLNAKLITQRKFDNLTKAERGGLSELDKAGFIKRQLVETRQITKHVAQILDSRMNTKYDENDKLIREVKVITLKSKLVSDFRKDFQFYKVREINNYHHAHDAYLNAVVGTALIKKYPKLESEFVYGDYKVYDVRKMIAKSEQEIGKATAKYFFYSNIMNFFKTEITLANGEIRKRPLIETNGETGEIVWDKGRDFATVRKVLSMPQVNIVKKTEVQTGGFSKESILPKRNSDKLIARKKDWDPKKYGGFDSPTVAYSVLVVAKVEKGKSKKLKSVKELLGITIMERSSFEKNPIDFLEAKGYKEVKKDLIIKLPKYSLFELENGRKRMLASAGELQKGNELALPSKYVNFLYLASHYEKLKGSPEDNEQKQLFVEQHKHYLDEIIEQISEFSKRVILADANLDKVLSAYNKHRDKPIREQAENIIHLFTLTNLGAPAAFKYFDTTIDRKRYTSTKEVLDATLIHQSITGLYETRIDLSQLGGDGGGGGGSSGGSGGGLEHLPPPPEVSQFPLNPERLQALTDLVSRALEAKHIEPYQGPGNNPIFPVKKPNGKWRFIHDLRATNSLTRDLASPSPGPPDLTSLPQDLPHLRTIDLTDAFFQIPLPAVFQPYFAFTLPQPNNHGPGTRYSWRVLPQGFKNSPTLFEQQLSHILAPVRKAFPNSLIIQYMDDILLASPALRELTALTDKVTNALTKEGLPMSLEKTQATPGSIHFLGQVISPDCITYETLPSIHVKSIWSLAELQSMLGELQWVSKGTPVLRSSLHQLYLALRGHRDPRDTIELTSTQVQALKTIQKALALNCRSRLVSQLPILALIILRPTGTTAVLFQTKQKWPLVWLHTPHPATSLRPWGQLLANAIITLDKYSLQHYGQICKSFHHNISNQALTYYLHTSDQSSVAILLQHSHRFHNLGAQPSGPWRSLLQVPQIFQNIDVLRPPFIISPVVIDHAPCLFSDGATSKAAFILWDKQVIHQQVLPLPSTCSAQAGELFGLLAGLQKSKPWPALNIFLDSKFLIGHLRRMALGAFLGPSTQCDLHARLFPLLQGKTVYVHHVRSHTLLQDPISRLNEATDALMLAPLLPLAGKRTADGSEFEKRTADGSEFESPKKKAKVE

SEQ ID NO: 1519 - protein, 2007 aa, synthetic construct
MPAAKRVKLDGGDKKYSIGLDIGTNSVGWAVITDEYKVPSKKFKVLGNTDRHSIKKNLIGALLFDSGETAEATRLKRTARRRYTRRKNRICYLQEIFSNEMAKVDDSFFHRLEESFLVEEDKKHERHPIFGNIVDEVAYHEKYPTIYHLRKKLVDSTDKADLRLIYLALAHMIKFRGHFLIEGDLNPDNSDVDKLFIQLVQTYNQLFEENPINASGVDAKAILSARLSKSRRLENLIAQLPGEKKNGLFGNLIALSLGLTPNFKSNFDLAEDAKLQLSKDTYDDDLDNLLAQIGDQYADLFLAAKNLSDAILLSDILRVNTEITKAPLSASMIKRYDEHHQDLTLLKALVRQQLPEKYKEIFFDQSKNGYAGYIDGGASQEEFYKFIKPILEKMDGTEELLVKLNREDLLRKQRTFDNGSIPHQIHLGELHAILRRQEDFYPFLKDNREKIEKILTFRIPYYVGPLARGNSRFAWMTRKSEETITPWNFEEVVDKGASAQSFIERMTNFDKNLPNEKVLPKHSLLYEYFTVYNELTKVKYVTEGMRKPAFLSGEQKKAIVDLLFKTNRKVTVKQLKEDYFKKIECFDSVEISGVEDRFNASLGTYHDLLKIIKDKDFLDNEENEDILEDIVLTLTLFEDREMIEERLKTYAHLFDDKVMKQLKRRRYTGWGRLSRKLINGIRDKQSGKTILDFLKSDGFANRNFMQLIHDDSLTFKEDIQKAQVSGQGDSLHEHIANLAGSPAIKKGILQTVKVVDELVKVMGRHKPENIVIEMARENQTTQKGQKNSRERMKRIEEGIKELGSQILKEHPVENTQLQNEKLYLYYLQNGRDMYVDQELDINRLSDYDVDHIVPQSFLKDDSIDNKVLTRSDKARGKSDNVPSEEVVKKMKNYWRQLLNAKLITQRKFDNLTKAERGGLSELDKAGFIKRQLVETRQITKHVAQILDSRMNTKYDENDKLIREVKVITLKSKLVSDFRKDFQFYKVREINNYHHAHDAYLNAVVGTALIKKYPKLESEFVYGDYKVYDVRKMIAKSEQEIGKATAKYFFYSNIMNFFKTEITLANGEIRKRPLIETNGETGEIVWDKGRDFATVRKVLSMPQVNIVKKTEVQTGGFSKESILPKRNSDKLIARKKDWDPKKYGGFDSPTVAYSVLVVAKVEKGKSKKLKSVKELLGITIMERSSFEKNPIDFLEAKGYKEVKKDLIIKLPKYSLFELENGRKRMLASAGELQKGNELALPSKYVNFLYLASHYEKLKGSPEDNEQKQLFVEQHKHYLDEIIEQISEFSKRVILADANLDKVLSAYNKHRDKPIREQAENIIHLFTLTNLGAPAAFKYFDTTIDRKRYTSTKEVLDATLIHQSITGLYETRIDLSQLGGDGGGGGGSSPAPGGGLEHLPPPPEVSQFPLNPERLQALTDLVSRALEAKHIEPYQGPGNNPIFPVKKPNGKWRFIHDLRATNSLTRDLASPSPGPPDLTSLPQDLPHLRTIDLTDAFFQIPLPAVFQPYFAFTLPQPNNHGPGTRYSWRVLPQGFKNSPTLFQQQLSHILAPVRKAFPNSLIIQYMDDILLASPALRELTALTDKVTNALTKEGLPMSLEKTQATPGSIHFLGQVISPDCITYETLPSIHVKSIWSLAELQSMLGELQWVSKGTPVLRSSLHQLYLALRGHRDPRDTIELTSTQVQALKTIQKALALNCRSRLVSQLPILALIILRPTGTTAVLFQTKQKWPLVWLHTPHPATSLRPWGQLLANAIITLDKYSLQHYGQICKSFHHNISNQALTYYLHTSDQSSVAILLQHSHRFHNLGAQPSGPWRSLLQVPQIFQNIDVLRPPFIISPVVIDHAPCLFSDGATSKAAFILWDKQVIHQQVLPLPSTCSAQAGELFGLLAGLQKSKPWPALNIFLDSKFLIGHLRRMAWGAFLGPSTQCDLHARLFPLLQGKTVYVHHVRSHTLLQDPISRLNEATDALMLAPLLPLAGKRTADGSEFEKRTADGSEFESPKKKAKVE

SEQ ID NO: 1520 - protein, 2009 aa, synthetic construct
MPAAKRVKLDGGDKKYSIGLDIGTNSVGWAVITDEYKVPSKKFKVLGNTDRHSIKKNLIGALLFDSGETAEATRLKRTARRRYTRRKNRICYLQEIFSNEMAKVDDSFFHRLEESFLVEEDKKHERHPIFGNIVDEVAYHEKYPTIYHLRKKLVDSTDKADLRLIYLALAHMIKFRGHFLIEGDLNPDNSDVDKLFIQLVQTYNQLFEENPINASGVDAKAILSARLSKSRRLENLIAQLPGEKKNGLFGNLIALSLGLTPNFKSNFDLAEDAKLQLSKDTYDDDLDNLLAQIGDQYADLFLAAKNLSDAILLSDILRVNTEITKAPLSASMIKRYDEHHQDLTLLKALVRQQLPEKYKEIFFDQSKNGYAGYIDGGASQEEFYKFIKPILEKMDGTEELLVKLNREDLLRKQRTFDNGSIPHQIHLGELHAILRRQEDFYPFLKDNREKIEKILTFRIPYYVGPLARGNSRFAWMTRKSEETITPWNFEEVVDKGASAQSFIERMTNFDKNLPNEKVLPKHSLLYEYFTVYNELTKVKYVTEGMRKPAFLSGEQKKAIVDLLFKTNRKVTVKQLKEDYFKKIECFDSVEISGVEDRFNASLGTYHDLLKIIKDKDFLDNEENEDILEDIVLTLTLFEDREMIEERLKTYAHLFDDKVMKQLKRRRYTGWGRLSRKLINGIRDKQSGKTILDFLKSDGFANRNFMQLIHDDSLTFKEDIQKAQVSGQGDSLHEHIANLAGSPAIKKGILQTVKVVDELVKVMGRHKPENIVIEMARENQTTQKGQKNSRERMKRIEEGIKELGSQILKEHPVENTQLQNEKLYLYYLQNGRDMYVDQELDINRLSDYDVDHIVPQSFLKDDSIDNKVLTRSDKARGKSDNVPSEEVVKKMKNYWRQLLNAKLITQRKFDNLTKAERGGLSELDKAGFIKRQLVETRQITKHVAQILDSRMNTKYDENDKLIREVKVITLKSKLVSDFRKDFQFYKVREINNYHHAHDAYLNAVVGTALIKKYPKLESEFVYGDYKVYDVRKMIAKSEQEIGKATAKYFFYSNIMNFFKTEITLANGEIRKRPLIETNGETGEIVWDKGRDFATVRKVLSMPQVNIVKKTEVQTGGFSKESILPKRNSDKLIARKKDWDPKKYGGFDSPTVAYSVLVVAKVEKGKSKKLKSVKELLGITIMERSSFEKNPIDFLEAKGYKEVKKDLIIKLPKYSLFELENGRKRMLASAGELQKGNELALPSKYVNFLYLASHYEKLKGSPEDNEQKQLFVEQHKHYLDEIIEQISEFSKRVILADANLDKVLSAYNKHRDKPIREQAENIIHLFTLTNLGAPAAFKYFDTTIDRKRYTSTKEVLDATLIHQSITGLYETRIDLSQLGGDGGPAPEAAAKGGGGGGLEHLPPPPEVSQFPLNPERLQALTDLVSRALEAKHIEPYQGPGNNPIFPVKKPNGKWRFIHDLRATNSLTRDLASPSPGPPDLTSLPQDLPHLRTIDLTDAFFQIPLPAVFQPYFAFTLPQPNNHGPGTRYSWRVLPQGFKNSPTLFQQQLSHILAPVRKAFPNSLIIQYMDDILLASPALRELTALTDKVTNALTKEGLPMSLEKTQATPGSIHFLGQVISPDCITYETLPSIHVKSIWSLAELQSMLGELQWVSKGTPVLRSSLHQLYLALRGHRDPRDTIELTSTQVQALKTIQKALALNCRSRLVSQLPILALIILRPTGTTAVLFQTKQKWPLVWLHTPHPATSLRPWGQLLANAIITLDKYSLQHYGQICKSFHHNISNQALTYYLHTSDQSSVAILLQHSHRFHNLGAQPSGPWRSLLQVPQIFQNIDVLRPPFIISPVVIDHAPCLFSDGATSKAAFILWDKQVIHQQVLPLPSTCSAQAGELFGLLAGLQKSKPWPALNIFLDSKFLIGHLRRMAWGAFLGPSTQCDLHARLFPLLQGKTVYVHHVRSHTLLQDPISRLNEATDALMLAPLLPLAGKRTADGSEFEKRTADGSEFESPKKKAKVE

SEQ ID NO: 1521 - protein, 2023 aa, synthetic construct
MPAAKRVKLDGGDKKYSIGLDIGTNSVGWAVITDEYKVPSKKFKVLGNTDRHSIKKNLIGALLFDSGETAEATRLKRTARRRYTRRKNRICYLQEIFSNEMAKVDDSFFHRLEESFLVEEDKKHERHPIFGNIVDEVAYHEKYPTIYHLRKKLVDSTDKADLRLIYLALAHMIKFRGHFLIEGDLNPDNSDVDKLFIQLVQTYNQLFEENPINASGVDAKAILSARLSKSRRLENLIAQLPGEKKNGLFGNLIALSLGLTPNFKSNFDLAEDAKLQLSKDTYDDDLDNLLAQIGDQYADLFLAAKNLSDAILLSDILRVNTEITKAPLSASMIKRYDEHHQDLTLLKALVRQQLPEKYKEIFFDQSKNGYAGYIDGGASQEEFYKFIKPILEKMDGTEELLVKLNREDLLRKQRTFDNGSIPHQIHLGELHAILRRQEDFYPFLKDNREKIEKILTFRIPYYVGPLARGNSRFAWMTRKSEETITPWNFEEVVDKGASAQSFIERMTNFDKNLPNEKVLPKHSLLYEYFTVYNELTKVKYVTEGMRKPAFLSGEQKKAIVDLLFKTNRKVTVKQLKEDYFKKIECFDSVEISGVEDRFNASLGTYHDLLKIIKDKDFLDNEENEDILEDIVLTLTLFEDREMIEERLKTYAHLFDDKVMKQLKRRRYTGWGRLSRKLINGIRDKQSGKTILDFLKSDGFANRNFMQLIHDDSLTFKEDIQKAQVSGQGDSLHEHIANLAGSPAIKKGILQTVKVVDELVKVMGRHKPENIVIEMARENQTTQKGQKNSRERMKRIEEGIKELGSQILKEHPVENTQLQNEKLYLYYLQNGRDMYVDQELDINRLSDYDVDHIVPQSFLKDDSIDNKVLTRSDKARGKSDNVPSEEVVKKMKNYWRQLLNAKLITQRKFDNLTKAERGGLSELDKAGFIKRQLVETRQITKHVAQILDSRMNTKYDENDKLIREVKVITLKSKLVSDFRKDFQFYKVREINNYHHAHDAYLNAVVGTALIKKYPKLESEFVYGDYKVYDVRKMIAKSEQEIGKATAKYFFYSNIMNFFKTEITLANGEIRKRPLIETNGETGEIVWDKGRDFATVRKVLSMPQVNIVKKTEVQTGGFSKESILPKRNSDKLIARKKDWDPKKYGGFDSPTVAYSVLVVAKVEKGKSKKLKSVKELLGITIMERSSFEKNPIDFLEAKGYKEVKKDLIIKLPKYSLFELENGRKRMLASAGELQKGNELALPSKYVNFLYLASHYEKLKGSPEDNEQKQLFVEQHKHYLDEIIEQISEFSKRVILADANLDKVLSAYNKHRDKPIREQAENIIHLFTLTNLGAPAAFKYFDTTIDRKRYTSTKEVLDATLIHQSITGLYETRIDLSQLGGDGGGGGGSGGGGSGGGGSGGGGSGGGGSGGGLEHLPPPPEVSQFPLNPERLQALTDLVSRALEAKHIEPYQGPGNNPIFPVKKPNGKWRFIHDLRATNSLTRDLASPSPGPPDLTSLPQDLPHLRTIDLTDAFFQIPLPAVFQPYFAFTLPQPNNHGPGTRYSWRVLPQGFKNSPTLFQQQLSHILAPVRKAFPNSLIIQYMDDILLASPALRELTALTDKVTNALTKEGLPMSLEKTQATPGSIHFLGQVISPDCITYETLPSIHVKSIWSLAELQSMLGELQWVSKGTPVLRSSLHQLYLALRGHRDPRDTIELTSTQVQALKTIQKALALNCRSRLVSQLPILALIILRPTGTTAVLFQTKQKWPLVWLHTPHPATSLRPWGQLLANAIITLDKYSLQHYGQICKSFHHNISNQALTYYLHTSDQSSVAILLQHSHRFHNLGAQPSGPWRSLLQVPQIFQNIDVLRPPFIISPVVIDHAPCLFSDGATSKAAFILWDKQVIHQQVLPLPSTCSAQAGELFGLLAGLQKSKPWPALNIFLDSKFLIGHLRRMAWGAFLGPSTQCDLHARLFPLLQGKTVYVHHVRSHTLLQDPISRLNEATDALMLAPLLPLAGKRTADGSEFEKRTADGSEFESPKKKAKVE

SEQ ID NO: 1522 - protein, 2006 aa, synthetic construct
MPAAKRVKLDGGDKKYSIGLDIGTNSVGWAVITDEYKVPSKKFKVLGNTDRHSIKKNLIGALLFDSGETAEATRLKRTARRRYTRRKNRICYLQEIFSNEMAKVDDSFFHRLEESFLVEEDKKHERHPIFGNIVDEVAYHEKYPTIYHLRKKLVDSTDKADLRLIYLALAHMIKFRGHFLIEGDLNPDNSDVDKLFIQLVQTYNQLFEENPINASGVDAKAILSARLSKSRRLENLIAQLPGEKKNGLFGNLIALSLGLTPNFKSNFDLAEDAKLQLSKDTYDDDLDNLLAQIGDQYADLFLAAKNLSDAILLSDILRVNTEITKAPLSASMIKRYDEHHQDLTLLKALVRQQLPEKYKEIFFDQSKNGYAGYIDGGASQEEFYKFIKPILEKMDGTEELLVKLNREDLLRKQRTFDNGSIPHQIHLGELHAILRRQEDFYPFLKDNREKIEKILTFRIPYYVGPLARGNSRFAWMTRKSEETITPWNFEEVVDKGASAQSFIERMTNFDKNLPNEKVLPKHSLLYEYFTVYNELTKVKYVTEGMRKPAFLSGEQKKAIVDLLFKTNRKVTVKQLKEDYFKKIECFDSVEISGVEDRFNASLGTYHDLLKIIKDKDFLDNEENEDILEDIVLTLTLFEDREMIEERLKTYAHLFDDKVMKQLKRRRYTGWGRLSRKLINGIRDKQSGKTILDFLKSDGFANRNFMQLIHDDSLTFKEDIQKAQVSGQGDSLHEHIANLAGSPAIKKGILQTVKVVDELVKVMGRHKPENIVIEMARENQTTQKGQKNSRERMKRIEEGIKELGSQILKEHPVENTQLQNEKLYLYYLQNGRDMYVDQELDINRLSDYDVDHIVPQSFLKDDSIDNKVLTRSDKARGKSDNVPSEEVVKKMKNYWRQLLNAKLITQRKFDNLTKAERGGLSELDKAGFIKRQLVETRQITKHVAQILDSRMNTKYDENDKLIREVKVITLKSKLVSDFRKDFQFYKVREINNYHHAHDAYLNAVVGTALIKKYPKLESEFVYGDYKVYDVRKMIAKSEQEIGKATAKYFFYSNIMNFFKTEITLANGEIRKRPLIETNGETGEIVWDKGRDFATVRKVLSMPQVNIVKKTEVQTGGFSKESILPKRNSDKLIARKKDWDPKKYGGFDSPTVAYSVLVVAKVEKGKSKKLKSVKELLGITIMERSSFEKNPIDFLEAKGYKEVKKDLIIKLPKYSLFELENGRKRMLASAGELQKGNELALPSKYVNFLYLASHYEKLKGSPEDNEQKQLFVEQHKHYLDEIIEQISEFSKRVILADANLDKVLSAYNKHRDKPIREQAENIIHLFTLTNLGAPAAFKYFDTTIDRKRYTSTKEVLDATLIHQSITGLYETRIDLSQLGGDGGEAAAKGGSGGGLEHLPPPPEVSQFPLNPERLQALTDLVSRALEAKHIEPYQGPGNNPIFPVKKPNGKWRFIHDLRATNSLTRDLASPSPGPPDLTSLPQDLPHLRTIDLTDAFFQIPLPAVFQPYFAFTLPQPNNHGPGTRYSWRVLPQGFKNSPTLFQQQLSHILAPVRKAFPNSLIIQYMDDILLASPALRELTALTDKVTNALTKEGLPMSLEKTQATPGSIHFLGQVISPDCITYETLPSIHVKSIWSLAELQSMLGELQWVSKGTPVLRSSLHQLYLALRGHRDPRDTIELTSTQVQALKTIQKALALNCRSRLVSQLPILALIILRPTGTTAVLFQTKQKWPLVWLHTPHPATSLRPWGQLLANAIITLDKYSLQHYGQICKSFHHNISNQALTYYLHTSDQSSVAILLQHSHRFHNLGAQPSGPWRSLLQVPQIFQNIDVLRPPFIISPVVIDHAPCLFSDGATSKAAFILWDKQVIHQQVLPLPSTCSAQAGELFGLLAGLQKSKPWPALNIFLDSKFLIGHLRRMAWGAFLGPSTQCDLHARLFPLLQGKTVYVHHVRSHTLLQDPISRLNEATDALMLAPLLPLAGKRTADGSEFEKRTADGSEFESPKKKAKVE

SEQ ID NO: 1523 - protein, 2007 aa, synthetic construct
MPAAKRVKLDGGDKKYSIGLDIGTNSVGWAVITDEYKVPSKKFKVLGNTDRHSIKKNLIGALLFDSGETAEATRLKRTARRRYTRRKNRICYLQEIFSNEMAKVDDSFFHRLEESFLVEEDKKHERHPIFGNIVDEVAYHEKYPTIYHLRKKLVDSTDKADLRLIYLALAHMIKFRGHFLIEGDLNPDNSDVDKLFIQLVQTYNQLFEENPINASGVDAKAILSARLSKSRRLENLIAQLPGEKKNGLFGNLIALSLGLTPNFKSNFDLAEDAKLQLSKDTYDDDLDNLLAQIGDQYADLFLAAKNLSDAILLSDILRVNTEITKAPLSASMIKRYDEHHQDLTLLKALVRQQLPEKYKEIFFDQSKNGYAGYIDGGASQEEFYKFIKPILEKMDGTEELLVKLNREDLLRKQRTFDNGSIPHQIHLGELHAILRRQEDFYPFLKDNREKIEKILTFRIPYYVGPLARGNSRFAWMTRKSEETITPWNFEEVVDKGASAQSFIERMTNFDKNLPNEKVLPKHSLLYEYFTVYNELTKVKYVTEGMRKPAFLSGEQKKAIVDLLFKTNRKVTVKQLKEDYFKKIECFDSVEISGVEDRFNASLGTYHDLLKIIKDKDFLDNEENEDILEDIVLTLTLFEDREMIEERLKTYAHLFDDKVMKQLKRRRYTGWGRLSRKLINGIRDKQSGKTILDFLKSDGFANRNFMQLIHDDSLTFKEDIQKAQVSGQGDSLHEHIANLAGSPAIKKGILQTVKVVDELVKVMGRHKPENIVIEMARENQTTQKGQKNSRERMKRIEEGIKELGSQILKEHPVENTQLQNEKLYLYYLQNGRDMYVDQELDINRLSDYDVDHIVPQSFLKDDSIDNKVLTRSDKARGKSDNVPSEEVVKKMKNYWRQLLNAKLITQRKFDNLTKAERGGLSELDKAGFIKRQLVETRQITKHVAQILDSRMNTKYDENDKLIREVKVITLKSKLVSDFRKDFQFYKVREINNYHHAHDAYLNAVVGTALIKKYPKLESEFVYGDYKVYDVRKMIAKSEQEIGKATAKYFFYSNIMNFFKTEITLANGEIRKRPLIETNGETGEIVWDKGRDFATVRKVLSMPQVNIVKKTEVQTGGFSKESILPKRNSDKLIARKKDWDPKKYGGFDSPTVAYSVLVVAKVEKGKSKKLKSVKELLGITIMERSSFEKNPIDFLEAKGYKEVKKDLIIKLPKYSLFELENGRKRMLASAGELQKGNELALPSKYVNFLYLASHYEKLKGSPEDNEQKQLFVEQHKHYLDEIIEQISEFSKRVILADANLDKVLSAYNKHRDKPIREQAENIIHLFTLTNLGAPAAFKYFDTTIDRKRYTSTKEVLDATLIHQSITGLYETRIDLSQLGGDGGGGGGSSGGSGGGLEHLPPPPEVSQFPLNPERLQALTDLVSRALEAKHIEPYQGPGNNPIFPVKKPNGKWRFIHDLRATNSLTRDLASPSPGPPDLTSLPQDLPHLRTIDLTDAFFQIPLPAVFQPYFAFTLPQPNNHGPGTRYSWRVLPQGFKNSPTLFQQQLSHILAPVRKAFPNSLIIQYMDDILLASPALRELTALTDKVTNALTKEGLPMSLEKTQATPGSIHFLGQVISPDCITYETLPSIHVKSIWSLAELQSMLGELQWVSKGTPVLRSSLHQLYLALRGHRDPRDTIELTSTQVQALKTIQKALALNCRSRLVSQLPILALIILRPTGTTAVLFQTKQKWPLVWLHTPHPATSLRPWGQLLANAIITLDKYSLQHYGQICKSFHHNISNQALTYYLHTSDQSSVAILLQHSHRFHNLGAQPSGPWRSLLQVPQIFQNIDVLRPPFIISPVVIDHAPCLFSDGATSKAAFILWDKQVIHQQVLPLPSTCSAQAGELFGLLAGLQKSKPWPALNIFLDSKFLIGHLRRMAWGAFLGPSTQCDLHARLFPLLQGKTVYVHHVRSHTLLQDPISRLNEATDALMLAPLLPLAGKRTADGSEFEKRTADGSEFESPKKKAKVE

SEQ ID NO: 1524 - protein, 2009 aa, synthetic construct
MPAAKRVKLDGGDKKYSIGLDIGTNSVGWAVITDEYKVPSKKFKVLGNTDRHSIKKNLIGALLFDSGETAEATRLKRTARRRYTRRKNRICYLQEIFSNEMAKVDDSFFHRLEESFLVEEDKKHERHPIFGNIVDEVAYHEKYPTIYHLRKKLVDSTDKADLRLIYLALAHMIKFRGHFLIEGDLNPDNSDVDKLFIQLVQTYNQLFEENPINASGVDAKAILSARLSKSRRLENLIAQLPGEKKNGLFGNLIALSLGLTPNFKSNFDLAEDAKLQLSKDTYDDDLDNLLAQIGDQYADLFLAAKNLSDAILLSDILRVNTEITKAPLSASMIKRYDEHHQDLTLLKALVRQQLPEKYKEIFFDQSKNGYAGYIDGGASQEEFYKFIKPILEKMDGTEELLVKLNREDLLRKQRTFDNGSIPHQIHLGELHAILRRQEDFYPFLKDNREKIEKILTFRIPYYVGPLARGNSRFAWMTRKSEETITPWNFEEVVDKGASAQSFIERMTNFDKNLPNEKVLPKHSLLYEYFTVYNELTKVKYVTEGMRKPAFLSGEQKKAIVDLLFKTNRKVTVKQLKEDYFKKIECFDSVEISGVEDRFNASLGTYHDLLKIIKDKDFLDNEENEDILEDIVLTLTLFEDREMIEERLKTYAHLFDDKVMKQLKRRRYTGWGRLSRKLINGIRDKQSGKTILDFLKSDGFANRNFMQLIHDDSLTFKEDIQKAQVSGQGDSLHEHIANLAGSPAIKKGILQTVKVVDELVKVMGRHKPENIVIEMARENQTTQKGQKNSRERMKRIEEGIKELGSQILKEHPVENTQLQNEKLYLYYLQNGRDMYVDQELDINRLSDYDVDHIVPQSFLKDDSIDNKVLTRSDKARGKSDNVPSEEVVKKMKNYWRQLLNAKLITQRKFDNLTKAERGGLSELDKAGFIKRQLVETRQITKHVAQILDSRMNTKYDENDKLIREVKVITLKSKLVSDFRKDFQFYKVREINNYHHAHDAYLNAVVGTALIKKYPKLESEFVYGDYKVYDVRKMIAKSEQEIGKATAKYFFYSNIMNFFKTEITLANGEIRKRPLIETNGETGEIVWDKGRDFATVRKVLSMPQVNIVKKTEVQTGGFSKESILPKRNSDKLIARKKDWDPKKYGGFDSPTVAYSVLVVAKVEKGKSKKLKSVKELLGITIMERSSFEKNPIDFLEAKGYKEVKKDLIIKLPKYSLFELENGRKRMLASAGELQKGNELALPSKYVNFLYLASHYEKLKGSPEDNEQKQLFVEQHKHYLDEIIEQISEFSKRVILADANLDKVLSAYNKHRDKPIREQAENIIHLFTLTNLGAPAAFKYFDTTIDRKRYTSTKEVLDATLIHQSITGLYETRIDLSQLGGDGGEAAAKGGSGGGGGGLEHLPPPPEVSQFPLNPERLQALTDLVSRALEAKHIEPYQGPGNNPIFPVKKPNGKWRFIHDLRATNSLTRDLASPSPGPPDLTSLPQDLPHLRTIDLTDAFFQIPLPAVFQPYFAFTLPQPNNHGPGTRYSWRVLPQGFKNSPTLFQQQLSHILAPVRKAFPNSLIIQYMDDILLASPALRELTALTDKVTNALTKEGLPMSLEKTQATPGSIHFLGQVISPDCITYETLPSIHVKSIWSLAELQSMLGELQWVSKGTPVLRSSLHQLYLALRGHRDPRDTIELTSTQVQALKTIQKALALNCRSRLVSQLPILALIILRPTGTTAVLFQTKQKWPLVWLHTPHPATSLRPWGQLLANAIITLDKYSLQHYGQICKSFHHNISNQALTYYLHTSDQSSVAILLQHSHRFHNLGAQPSGPWRSLLQVPQIFQNIDVLRPPFIISPVVIDHAPCLFSDGATSKAAFILWDKQVIHQQVLPLPSTCSAQAGELFGLLAGLQKSKPWPALNIFLDSKFLIGHLRRMAWGAFLGPSTQCDLHARLFPLLQGKTVYVHHVRSHTLLQDPISRLNEATDALMLAPLLPLAGKRTADGSEFEKRTADGSEFESPKKKAKVE

SEQ ID NO: 1525 - protein, 2007 aa, synthetic construct
MPAAKRVKLDGGDKKYSIGLDIGTNSVGWAVITDEYKVPSKKFKVLGNTDRHSIKKNLIGALLFDSGETAEATRLKRTARRRYTRRKNRICYLQEIFSNEMAKVDDSFFHRLEESFLVEEDKKHERHPIFGNIVDEVAYHEKYPTIYHLRKKLVDSTDKADLRLIYLALAHMIKFRGHFLIEGDLNPDNSDVDKLFIQLVQTYNQLFEENPINASGVDAKAILSARLSKSRRLENLIAQLPGEKKNGLFGNLIALSLGLTPNFKSNFDLAEDAKLQLSKDTYDDDLDNLLAQIGDQYADLFLAAKNLSDAILLSDILRVNTEITKAPLSASMIKRYDEHHQDLTLLKALVRQQLPEKYKEIFFDQSKNGYAGYIDGGASQEEFYKFIKPILEKMDGTEELLVKLNREDLLRKQRTFDNGSIPHQIHLGELHAILRRQEDFYPFLKDNREKIEKILTFRIPYYVGPLARGNSRFAWMTRKSEETITPWNFEEVVDKGASAQSFIERMTNFDKNLPNEKVLPKHSLLYEYFTVYNELTKVKYVTEGMRKPAFLSGEQKKAIVDLLFKTNRKVTVKQLKEDYFKKIECFDSVEISGVEDRFNASLGTYHDLLKIIKDKDFLDNEENEDILEDIVLTLTLFEDREMIEERLKTYAHLFDDKVMKQLKRRRYTGWGRLSRKLINGIRDKQSGKTILDFLKSDGFANRNFMQLIHDDSLTFKEDIQKAQVSGQGDSLHEHIANLAGSPAIKKGILQTVKVVDELVKVMGRHKPENIVIEMARENQTTQKGQKNSRERMKRIEEGIKELGSQILKEHPVENTQLQNEKLYLYYLQNGRDMYVDQELDINRLSDYDVDHIVPQSFLKDDSIDNKVLTRSDKARGKSDNVPSEEVVKKMKNYWRQLLNAKLITQRKFDNLTKAERGGLSELDKAGFIKRQLVETRQITKHVAQILDSRMNTKYDENDKLIREVKVITLKSKLVSDFRKDFQFYKVREINNYHHAHDAYLNAVVGTALIKKYPKLESEFVYGDYKVYDVRKMIAKSEQEIGKATAKYFFYSNIMNFFKTEITLANGEIRKRPLIETNGETGEIVWDKGRDFATVRKVLSMPQVNIVKKTEVQTGGFSKESILPKRNSDKLIARKKDWDPKKYGGFDSPTVAYSVLVVAKVEKGKSKKLKSVKELLGITIMERSSFEKNPIDFLEAKGYKEVKKDLIIKLPKYSLFELENGRKRMLASAGELQKGNELALPSKYVNFLYLASHYEKLKGSPEDNEQKQLFVEQHKHYLDEIIEQISEFSKRVILADANLDKVLSAYNKHRDKPIREQAENIIHLFTLTNLGAPAAFKYFDTTIDRKRYTSTKEVLDATLIHQSITGLYETRIDLSQLGGDGGGSSPAPGGGGGGLEHLPPPPEVSQFPLNPERLQALTDLVSRALEAKHIEPYQGPGNNPIFPVKKPNGKWRFIHDLRATNSLTRDLASPSPGPPDLTSLPQDLPHLRTIDLTDAFFQIPLPAVFQPYFAFTLPQPNNHGPGTRYSWRVLPQGFKNSPTLFQQQLSHILAPVRKAFPNSLIIQYMDDILLASPALRELTALTDKVTNALTKEGLPMSLEKTQATPGSIHFLGQVISPDCITYETLPSIHVKSIWSLAELQSMLGELQWVSKGTPVLRSSLHQLYLALRGHRDPRDTIELTSTQVQALKTIQKALALNCRSRLVSQLPILALIILRPTGTTAVLFQTKQKWPLVWLHTPHPATSLRPWGQLLANAIITLDKYSLQHYGQICKSFHHNISNQALTYYLHTSDQSSVAILLQHSHRFHNLGAQPSGPWRSLLQVPQIFQNIDVLRPPFIISPVVIDHAPCLFSDGATSKAAFILWDKQVIHQQVLPLPSTCSAQAGELFGLLAGLQKSKPWPALNIFLDSKFLIGHLRRMAWGAFLGPSTQCDLHARLFPLLQGKTVYVHHVRSHTLLQDPISRLNEATDALMLAPLLPLAGKRTADGSEFEKRTADGSEFESPKKKAKVE

SEQ ID NO: 1526 - protein, 2009 aa, synthetic construct
MPAAKRVKLDGGDKKYSIGLDIGTNSVGWAVITDEYKVPSKKFKVLGNTDRHSIKKNLIGALLFDSGETAEATRLKRTARRRYTRRKNRICYLQEIFSNEMAKVDDSFFHRLEESFLVEEDKKHERHPIFGNIVDEVAYHEKYPTIYHLRKKLVDSTDKADLRLIYLALAHMIKFRGHFLIEGDLNPDNSDVDKLFIQLVQTYNQLFEENPINASGVDAKAILSARLSKSRRLENLIAQLPGEKKNGLFGNLIALSLGLTPNFKSNFDLAEDAKLQLSKDTYDDDLDNLLAQIGDQYADLFLAAKNLSDAILLSDILRVNTEITKAPLSASMIKRYDEHHQDLTLLKALVRQQLPEKYKEIFFDQSKNGYAGYIDGGASQEEFYKFIKPILEKMDGTEELLVKLNREDLLRKQRTFDNGSIPHQIHLGELHAILRRQEDFYPFLKDNREKIEKILTFRIPYYVGPLARGNSRFAWMTRKSEETITPWNFEEVVDKGASAQSFIERMTNFDKNLPNEKVLPKHSLLYEYFTVYNELTKVKYVTEGMRKPAFLSGEQKKAIVDLLFKTNRKVTVKQLKEDYFKKIECFDSVEISGVEDRFNASLGTYHDLLKIIKDKDFLDNEENEDILEDIVLTLTLFEDREMIEERLKTYAHLFDDKVMKQLKRRRYTGWGRLSRKLINGIRDKQSGKTILDFLKSDGFANRNFMQLIHDDSLTFKEDIQKAQVSGQGDSLHEHIANLAGSPAIKKGILQTVKVVDELVKVMGRHKPENIVIEMARENQTTQKGQKNSRERMKRIEEGIKELGSQILKEHPVENTQLQNEKLYLYYLQNGRDMYVDQELDINRLSDYDVDHIVPQSFLKDDSIDNKVLTRSDKARGKSDNVPSEEVVKKMKNYWRQLLNAKLITQRKFDNLTKAERGGLSELDKAGFIKRQLVETRQITKHVAQILDSRMNTKYDENDKLIREVKVITLKSKLVSDFRKDFQFYKVREINNYHHAHDAYLNAVVGTALIKKYPKLESEFVYGDYKVYDVRKMIAKSEQEIGKATAKYFFYSNIMNFFKTEITLANGEIRKRPLIETNGETGEIVWDKGRDFATVRKVLSMPQVNIVKKTEVQTGGFSKESILPKRNSDKLIARKKDWDPKKYGGFDSPTVAYSVLVVAKVEKGKSKKLKSVKELLGITIMERSSFEKNPIDFLEAKGYKEVKKDLIIKLPKYSLFELENGRKRMLASAGELQKGNELALPSKYVNFLYLASHYEKLKGSPEDNEQKQLFVEQHKHYLDEIIEQISEFSKRVILADANLDKVLSAYNKHRDKPIREQAENIIHLFTLTNLGAPAAFKYFDTTIDRKRYTSTKEVLDATLIHQSITGLYETRIDLSQLGGDGGEAAAKGGGGSSGGGLEHLPPPPEVSQFPLNPERLQALTDLVSRALEAKHIEPYQGPGNNPIFPVKKPNGKWRFIHDLRATNSLTRDLASPSPGPPDLTSLPQDLPHLRTIDLTDAFFQIPLPAVFQPYFAFTLPQPNNHGPGTRYSWRVLPQGFKNSPTLFQQQLSHILAPVRKAFPNSLIIQYMDDILLASPALRELTALTDKVTNALTKEGLPMSLEKTQATPGSIHFLGQVISPDCITYETLPSIHVKSIWSLAELQSMLGELQWVSKGTPVLRSSLHQLYLALRGHRDPRDTIELTSTQVQALKTIQKALALNCRSRLVSQLPILALIILRPTGTTAVLFQTKQKWPLVWLHTPHPATSLRPWGQLLANAIITLDKYSLQHYGQICKSFHHNISNQALTYYLHTSDQSSVAILLQHSHRFHNLGAQPSGPWRSLLQVPQIFQNIDVLRPPFIISPVVIDHAPCLFSDGATSKAAFILWDKQVIHQQVLPLPSTCSAQAGELFGLLAGLQKSKPWPALNIFLDSKFLIGHLRRMAWGAFLGPSTQCDLHARLFPLLQGKTVYVHHVRSHTLLQDPISRLNEATDALMLAPLLPLAGKRTADGSEFEKRTADGSEFESPKKKAKVE

SEQ ID NO: 1527 - protein, 2007 aa, synthetic construct
MPAAKRVKLDGGDKKYSIGLDIGTNSVGWAVITDEYKVPSKKFKVLGNTDRHSIKKNLIGALLFDSGETAEATRLKRTARRRYTRRKNRICYLQEIFSNEMAKVDDSFFHRLEESFLVEEDKKHERHPIFGNIVDEVAYHEKYPTIYHLRKKLVDSTDKADLRLIYLALAHMIKFRGHFLIEGDLNPDNSDVDKLFIQLVQTYNQLFEENPINASGVDAKAILSARLSKSRRLENLIAQLPGEKKNGLFGNLIALSLGLTPNFKSNFDLAEDAKLQLSKDTYDDDLDNLLAQIGDQYADLFLAAKNLSDAILLSDILRVNTEITKAPLSASMIKRYDEHHQDLTLLKALVRQQLPEKYKEIFFDQSKNGYAGYIDGGASQEEFYKFIKPILEKMDGTEELLVKLNREDLLRKQRTFDNGSIPHQIHLGELHAILRRQEDFYPFLKDNREKIEKILTFRIPYYVGPLARGNSRFAWMTRKSEETITPWNFEEVVDKGASAQSFIERMTNFDKNLPNEKVLPKHSLLYEYFTVYNELTKVKYVTEGMRKPAFLSGEQKKAIVDLLFKTNRKVTVKQLKEDYFKKIECFDSVEISGVEDRFNASLGTYHDLLKIIKDKDFLDNEENEDILEDIVLTLTLFEDREMIEERLKTYAHLFDDKVMKQLKRRRYTGWGRLSRKLINGIRDKQSGKTILDFLKSDGFANRNFMQLIHDDSLTFKEDIQKAQVSGQGDSLHEHIANLAGSPAIKKGILQTVKVVDELVKVMGRHKPENIVIEMARENQTTQKGQKNSRERMKRIEEGIKELGSQILKEHPVENTQLQNEKLYLYYLQNGRDMYVDQELDINRLSDYDVDHIVPQSFLKDDSIDNKVLTRSDKARGKSDNVPSEEVVKKMKNYWRQLLNAKLITQRKFDNLTKAERGGLSELDKAGFIKRQLVETRQITKHVAQILDSRMNTKYDENDKLIREVKVITLKSKLVSDFRKDFQFYKVREINNYHHAHDAYLNAVVGTALIKKYPKLESEFVYGDYKVYDVRKMIAKSEQEIGKATAKYFFYSNIMNFFKTEITLANGEIRKRPLIETNGETGEIVWDKGRDFATVRKVLSMPQVNIVKKTEVQTGGFSKESILPKRNSDKLIARKKDWDPKKYGGFDSPTVAYSVLVVAKVEKGKSKKLKSVKELLGITIMERSSFEKNPIDFLEAKGYKEVKKDLIIKLPKYSLFELENGRKRMLASAGELQKGNELALPSKYVNFLYLASHYEKLKGSPEDNEQKQLFVEQHKHYLDEIIEQISEFSKRVILADANLDKVLSAYNKHRDKPIREQAENIIHLFTLTNLGAPAAFKYFDTTIDRKRYTSTKEVLDATLIHQSITGLYETRIDLSQLGGDGGPAPGGGGSSGGGLEHLPPPPEVSQFPLNPERLQALTDLVSRALEAKHIEPYQGPGNNPIFPVKKPNGKWRFIHDLRATNSLTRDLASPSPGPPDLTSPPQDLPHLRTIDLTDAFFQIPLPAVFQPYFAFTLPQPNNHGPGTRYSWRVLPQGFKNSPTLFQQQLSHILAPVRKAFPNSLIIQYMDDILLASPALRELTALTDKVTNALTKEGLPMSLEKTQATPGSIHFLGQVISPDCITYETLPSIHVKSIWSLAELQSMLGELQWVSKGTPVLRSSLHQLYLALRGHRDPRDTIELTSTQVQALKTIQKALALNCRSRLVSQLPILALIILRPTGTTAVLFQTKQKWPLVWLHTPHPATSLRPWGQLLANAIITLDKYSLQHYGQICKSFHHNISNQALTYYLHTSDQSSVAILLQHSHRFHNLGAQPSGPWRSLLQVPQIFQNIDVLRPPFIISPVVIDHAPCLFSDGATSKAAFILWDKQVIHQQVLPLPSTCSAQAGELFGLLAGLQKSKPWPALNIFLDSKFLIGHLRRMAWGAFLGPSTQCDLHARLFPLLQGKTVYVHHVRSHTLLQDPISRLNEATDALMLAPLLPLAGKRTADGSEFEKRTADGSEFESPKKKAKVE

SEQ ID NO: 1528 - protein, 2028 aa, synthetic construct
MPAAKRVKLDGGDKKYSIGLDIGTNSVGWAVITDEYKVPSKKFKVLGNTDRHSIKKNLIGALLFDSGETAEATRLKRTARRRYTRRKNRICYLQEIFSNEMAKVDDSFFHRLEESFLVEEDKKHERHPIFGNIVDEVAYHEKYPTIYHLRKKLVDSTDKADLRLIYLALAHMIKFRGHFLIEGDLNPDNSDVDKLFIQLVQTYNQLFEENPINASGVDAKAILSARLSKSRRLENLIAQLPGEKKNGLFGNLIALSLGLTPNFKSNFDLAEDAKLQLSKDTYDDDLDNLLAQIGDQYADLFLAAKNLSDAILLSDILRVNTEITKAPLSASMIKRYDEHHQDLTLLKALVRQQLPEKYKEIFFDQSKNGYAGYIDGGASQEEFYKFIKPILEKMDGTEELLVKLNREDLLRKQRTFDNGSIPHQIHLGELHAILRRQEDFYPFLKDNREKIEKILTFRIPYYVGPLARGNSRFAWMTRKSEETITPWNFEEVVDKGASAQSFIERMTNFDKNLPNEKVLPKHSLLYEYFTVYNELTKVKYVTEGMRKPAFLSGEQKKAIVDLLFKTNRKVTVKQLKEDYFKKIECFDSVEISGVEDRFNASLGTYHDLLKIIKDKDFLDNEENEDILEDIVLTLTLFEDREMIEERLKTYAHLFDDKVMKQLKRRRYTGWGRLSRKLINGIRDKQSGKTILDFLKSDGFANRNFMQLIHDDSLTFKEDIQKAQVSGQGDSLHEHIANLAGSPAIKKGILQTVKVVDELVKVMGRHKPENIVIEMARENQTTQKGQKNSRERMKRIEEGIKELGSQILKEHPVENTQLQNEKLYLYYLQNGRDMYVDQELDINRLSDYDVDHIVPQSFLKDDSIDNKVLTRSDKARGKSDNVPSEEVVKKMKNYWRQLLNAKLITQRKFDNLTKAERGGLSELDKAGFIKRQLVETRQITKHVAQILDSRMNTKYDENDKLIREVKVITLKSKLVSDFRKDFQFYKVREINNYHHAHDAYLNAVVGTALIKKYPKLESEFVYGDYKVYDVRKMIAKSEQEIGKATAKYFFYSNIMNFFKTEITLANGEIRKRPLIETNGETGEIVWDKGRDFATVRKVLSMPQVNIVKKTEVQTGGFSKESILPKRNSDKLIARKKDWDPKKYGGFDSPTVAYSVLVVAKVEKGKSKKLKSVKELLGITIMERSSFEKNPIDFLEAKGYKEVKKDLIIKLPKYSLFELENGRKRMLASAGELQKGNELALPSKYVNFLYLASHYEKLKGSPEDNEQKQLFVEQHKHYLDEIIEQISEFSKRVILADANLDKVLSAYNKHRDKPIREQAENIIHLFTLTNLGAPAAFKYFDTTIDRKRYTSTKEVLDATLIHQSITGLYETRIDLSQLGGDGGGGGGSGGGGSGGGGSGGGGSGGGGSGGGGSGGGLEHLPPPPEVSQFPLNPERLQALTDLVSRALEAKHIEPYQGPGNNPIFPVKKPNGKWRFIHDLRATNSLTRDLASPSPGPPDLTSPPQDLPHLRTIDLTDAFFQIPLPAVFQPYFAFTLPQPNNHGPGTRYSWRVLPQGFKNSPTLFQQQLSHILAPVRKAFPNSLIIQYMDDILLASPALRELTALTDKVTNALTKEGLPMSLEKTQATPGSIHFLGQVISPDCITYETLPSIHVKSIWSLAELQSMLGELQWVSKGTPVLRSSLHQLYLALRGHRDPRDTIELTSTQVQALKTIQKALALNCRSRLVSQLPILALIILRPTGTTAVLFQTKQKWPLVWLHTPHPATSLRPWGQLLANAIITLDKYSLQHYGQICKSFHHNISNQALTYYLHTSDQSSVAILLQHSHRFHNLGAQPSGPWRSLLQVPQIFQNIDVLRPPFIISPVVIDHAPCLFSDGATSKAAFILWDKQVIHQQVLPLPSTCSAQAGELFGLLAGLQKSKPWPALNIFLDSKFLIGHLRRMAWGAFLGPSTQCDLHARLFPLLQGKTVYVHHVRSHTLLQDPISRLNEATDALMLAPLLPLAGKRTADGSEFEKRTADGSEFESPKKKAKVE

SEQ ID NO: 1529 - protein, 2007 aa, synthetic construct
MPAAKRVKLDGGDKKYSIGLDIGTNSVGWAVITDEYKVPSKKFKVLGNTDRHSIKKNLIGALLFDSGETAEATRLKRTARRRYTRRKNRICYLQEIFSNEMAKVDDSFFHRLEESFLVEEDKKHERHPIFGNIVDEVAYHEKYPTIYHLRKKLVDSTDKADLRLIYLALAHMIKFRGHFLIEGDLNPDNSDVDKLFIQLVQTYNQLFEENPINASGVDAKAILSARLSKSRRLENLIAQLPGEKKNGLFGNLIALSLGLTPNFKSNFDLAEDAKLQLSKDTYDDDLDNLLAQIGDQYADLFLAAKNLSDAILLSDILRVNTEITKAPLSASMIKRYDEHHQDLTLLKALVRQQLPEKYKEIFFDQSKNGYAGYIDGGASQEEFYKFIKPILEKMDGTEELLVKLNREDLLRKQRTFDNGSIPHQIHLGELHAILRRQEDFYPFLKDNREKIEKILTFRIPYYVGPLARGNSRFAWMTRKSEETITPWNFEEVVDKGASAQSFIERMTNFDKNLPNEKVLPKHSLLYEYFTVYNELTKVKYVTEGMRKPAFLSGEQKKAIVDLLFKTNRKVTVKQLKEDYFKKIECFDSVEISGVEDRFNASLGTYHDLLKIIKDKDFLDNEENEDILEDIVLTLTLFEDREMIEERLKTYAHLFDDKVMKQLKRRRYTGWGRLSRKLINGIRDKQSGKTILDFLKSDGFANRNFMQLIHDDSLTFKEDIQKAQVSGQGDSLHEHIANLAGSPAIKKGILQTVKVVDELVKVMGRHKPENIVIEMARENQTTQKGQKNSRERMKRIEEGIKELGSQILKEHPVENTQLQNEKLYLYYLQNGRDMYVDQELDINRLSDYDVDHIVPQSFLKDDSIDNKVLTRSDKARGKSDNVPSEEVVKKMKNYWRQLLNAKLITQRKFDNLTKAERGGLSELDKAGFIKRQLVETRQITKHVAQILDSRMNTKYDENDKLIREVKVITLKSKLVSDFRKDFQFYKVREINNYHHAHDAYLNAVVGTALIKKYPKLESEFVYGDYKVYDVRKMIAKSEQEIGKATAKYFFYSNIMNFFKTEITLANGEIRKRPLIETNGETGEIVWDKGRDFATVRKVLSMPQVNIVKKTEVQTGGFSKESILPKRNSDKLIARKKDWDPKKYGGFDSPTVAYSVLVVAKVEKGKSKKLKSVKELLGITIMERSSFEKNPIDFLEAKGYKEVKKDLIIKLPKYSLFELENGRKRMLASAGELQKGNELALPSKYVNFLYLASHYEKLKGSPEDNEQKQLFVEQHKHYLDEIIEQISEFSKRVILADANLDKVLSAYNKHRDKPIREQAENIIHLFTLTNLGAPAAFKYFDTTIDRKRYTSTKEVLDATLIHQSITGLYETRIDLSQLGGDGGGGGGGSPAPGGGLEHLPPPPEVSQFPLNPERLQALTDLVSRALEAKHIEPYQGPGNNPIFPVKKPNGKWRFIHDLRATNSLTRDLASPSPGPPDLTSPPQDLPHLRTIDLTDAFFQIPLPAVFQPYFAFTLPQPNNHGPGTRYSWRVLPQGFKNSPTLFQQQLSHILAPVRKAFPNSLIIQYMDDILLASPALRELTALTDKVTNALTKEGLPMSLEKTQATPGSIHFLGQVISPDCITYETLPSIHVKSIWSLAELQSMLGELQWVSKGTPVLRSSLHQLYLALRGHRDPRDTIELTSTQVQALKTIQKALALNCRSRLVSQLPILALIILRPTGTTAVLFQTKQKWPLVWLHTPHPATSLRPWGQLLANAIITLDKYSLQHYGQICKSFHHNISNQALTYYLHTSDQSSVAILLQHSHRFHNLGAQPSGPWRSLLQVPQIFQNIDVLRPPFIISPVVIDHAPCLFSDGATSKAAFILWDKQVIHQQVLPLPSTCSAQAGELFGLLAGLQKSKPWPALNIFLDSKFLIGHLRRMAWGAFLGPSTQCDLHARLFPLLQGKTVYVHHVRSHTLLQDPISRLNEATDALMLAPLLPLAGKRTADGSEFEKRTADGSEFESPKKKAKVE

SEQ ID NO: 1530 - protein, 2004 aa, synthetic construct
MPAAKRVKLDGGDKKYSIGLDIGTNSVGWAVITDEYKVPSKKFKVLGNTDRHSIKKNLIGALLFDSGETAEATRLKRTARRRYTRRKNRICYLQEIFSNEMAKVDDSFFHRLEESFLVEEDKKHERHPIFGNIVDEVAYHEKYPTIYHLRKKLVDSTDKADLRLIYLALAHMIKFRGHFLIEGDLNPDNSDVDKLFIQLVQTYNQLFEENPINASGVDAKAILSARLSKSRRLENLIAQLPGEKKNGLFGNLIALSLGLTPNFKSNFDLAEDAKLQLSKDTYDDDLDNLLAQIGDQYADLFLAAKNLSDAILLSDILRVNTEITKAPLSASMIKRYDEHHQDLTLLKALVRQQLPEKYKEIFFDQSKNGYAGYIDGGASQEEFYKFIKPILEKMDGTEELLVKLNREDLLRKQRTFDNGSIPHQIHLGELHAILRRQEDFYPFLKDNREKIEKILTFRIPYYVGPLARGNSRFAWMTRKSEETITPWNFEEVVDKGASAQSFIERMTNFDKNLPNEKVLPKHSLLYEYFTVYNELTKVKYVTEGMRKPAFLSGEQKKAIVDLLFKTNRKVTVKQLKEDYFKKIECFDSVEISGVEDRFNASLGTYHDLLKIIKDKDFLDNEENEDILEDIVLTLTLFEDREMIEERLKTYAHLFDDKVMKQLKRRRYTGWGRLSRKLINGIRDKQSGKTILDFLKSDGFANRNFMQLIHDDSLTFKEDIQKAQVSGQGDSLHEHIANLAGSPAIKKGILQTVKVVDELVKVMGRHKPENIVIEMARENQTTQKGQKNSRERMKRIEEGIKELGSQILKEHPVENTQLQNEKLYLYYLQNGRDMYVDQELDINRLSDYDVDHIVPQSFLKDDSIDNKVLTRSDKARGKSDNVPSEEVVKKMKNYWRQLLNAKLITQRKFDNLTKAERGGLSELDKAGFIKRQLVETRQITKHVAQILDSRMNTKYDENDKLIREVKVITLKSKLVSDFRKDFQFYKVREINNYHHAHDAYLNAVVGTALIKKYPKLESEFVYGDYKVYDVRKMIAKSEQEIGKATAKYFFYSNIMNFFKTEITLANGEIRKRPLIETNGETGEIVWDKGRDFATVRKVLSMPQVNIVKKTEVQTGGFSKESILPKRNSDKLIARKKDWDPKKYGGFDSPTVAYSVLVVAKVEKGKSKKLKSVKELLGITIMERSSFEKNPIDFLEAKGYKEVKKDLIIKLPKYSLFELENGRKRMLASAGELQKGNELALPSKYVNFLYLASHYEKLKGSPEDNEQKQLFVEQHKHYLDEIIEQISEFSKRVILADANLDKVLSAYNKHRDKPIREQAENIIHLFTLTNLGAPAAFKYFDTTIDRKRYTSTKEVLDATLIHQSITGLYETRIDLSQLGGDGGGGGPAPGGHLPPPPQVDQFPLNLPERLQALNDLVSKALEAGHIEPYSGPGNNPVFPVKKPNGKWRFIHDLRATNAITTTLTSPSPGPPDLTSLPTALPHLQTIDLTDAFFQIPLPKQYQPYFAFTIPQPCNYGPGTRYAWTVLPQGFKNSPTLFQQQLAAVLNPMRKMFPTSTIVQYMDDILLASPTNEELQQLSQLTLQALTTHGLPISQEKTQQTPGQIRFLGQVISPNHITYESTPTIPIKSQWTLTELQVILGEIQWVSKGTPILRKHLQSLYSALHPYRDPRACITLTPQQLHALHAIQQALQHNCRGRLNPALPLLGLISLSTSGTTSVIFQPKQNWPLAWLHTPHPPTSLCPWGHLLACTILTLDKYTLQHYGQLCQSFHHNMSKQALCDFLRNSPHPSVGILIHHMGRFHNLGSQPSGPWKTLLHLPTLLQEPRLLRPIFTLSPVVLDTAPCLFSDGSPQKAAYVLWDQTILQQDITPLPSHETHSAQKGELLALICGLRAAKPWPSLNIFLDSKYLIKYLHSLAIGAFLGTSAHQTLQAALPPLLQGKTIYLHHVRSHTNLPDPISTFNEYTDSLILAPLVPLAGKRTADGSEFEKRTADGSEFESPKKKAKVE

SEQ ID NO: 1531 - protein, 2009 aa, synthetic construct
MPAAKRVKLDGGDKKYSIGLDIGTNSVGWAVITDEYKVPSKKFKVLGNTDRHSIKKNLIGALLFDSGETAEATRLKRTARRRYTRRKNRICYLQEIFSNEMAKVDDSFFHRLEESFLVEEDKKHERHPIFGNIVDEVAYHEKYPTIYHLRKKLVDSTDKADLRLIYLALAHMIKFRGHFLIEGDLNPDNSDVDKLFIQLVQTYNQLFEENPINASGVDAKAILSARLSKSRRLENLIAQLPGEKKNGLFGNLIALSLGLTPNFKSNFDLAEDAKLQLSKDTYDDDLDNLLAQIGDQYADLFLAAKNLSDAILLSDILRVNTEITKAPLSASMIKRYDEHHQDLTLLKALVRQQLPEKYKEIFFDQSKNGYAGYIDGGASQEEFYKFIKPILEKMDGTEELLVKLNREDLLRKQRTFDNGSIPHQIHLGELHAILRRQEDFYPFLKDNREKIEKILTFRIPYYVGPLARGNSRFAWMTRKSEETITPWNFEEVVDKGASAQSFIERMTNFDKNLPNEKVLPKHSLLYEYFTVYNELTKVKYVTEGMRKPAFLSGEQKKAIVDLLFKTNRKVTVKQLKEDYFKKIECFDSVEISGVEDRFNASLGTYHDLLKIIKDKDFLDNEENEDILEDIVLTLTLFEDREMIEERLKTYAHLFDDKVMKQLKRRRYTGWGRLSRKLINGIRDKQSGKTILDFLKSDGFANRNFMQLIHDDSLTFKEDIQKAQVSGQGDSLHEHIANLAGSPAIKKGILQTVKVVDELVKVMGRHKPENIVIEMARENQTTQKGQKNSRERMKRIEEGIKELGSQILKEHPVENTQLQNEKLYLYYLQNGRDMYVDQELDINRLSDYDVDHIVPQSFLKDDSIDNKVLTRSDKARGKSDNVPSEEVVKKMKNYWRQLLNAKLITQRKFDNLTKAERGGLSELDKAGFIKRQLVETRQITKHVAQILDSRMNTKYDENDKLIREVKVITLKSKLVSDFRKDFQFYKVREINNYHHAHDAYLNAVVGTALIKKYPKLESEFVYGDYKVYDVRKMIAKSEQEIGKATAKYFFYSNIMNFFKTEITLANGEIRKRPLIETNGETGEIVWDKGRDFATVRKVLSMPQVNIVKKTEVQTGGFSKESILPKRNSDKLIARKKDWDPKKYGGFDSPTVAYSVLVVAKVEKGKSKKLKSVKELLGITIMERSSFEKNPIDFLEAKGYKEVKKDLIIKLPKYSLFELENGRKRMLASAGELQKGNELALPSKYVNFLYLASHYEKLKGSPEDNEQKQLFVEQHKHYLDEIIEQISEFSKRVILADANLDKVLSAYNKHRDKPIREQAENIIHLFTLTNLGAPAAFKYFDTTIDRKRYTSTKEVLDATLIHQSITGLYETRIDLSQLGGDGGEAAAKGSSGGGGGHLPPPPQVDQFPLNLPERLQALNDLVSKALEAGHIEPYSGPGNNPVFPVKKPNGKWRFIHDLRATNAITTTLTSPSPGPPDLTSLPTALPHLQTIDLTDAFFQIPLPKQYQPYFAFTIPQPCNYGPGTRYAWTVLPQGFKNSPTLFQQQLAAVLNPMRKMFPTSTIVQYMDDILLASPTNEELQQLSQLTLQALTTHGLPISQEKTQQTPGQIRFLGQVISPNHITYESTPTIPIKSQWTLTELQVILGEIQWVSKGTPILRKHLQSLYSALHPYRDPRACITLTPQQLHALHAIQQALQHNCRGRLNPALPLLGLISLSTSGTTSVIFQPKQNWPLAWLHTPHPPTSLCPWGHLLACTILTLDKYTLQHYGQLCQSFHHNMSKQALCDFLRNSPHPSVGILIHHMGRFHNLGSQPSGPWKTLLHLPTLLQEPRLLRPIFTLSPVVLDTAPCLFSDGSPQKAAYVLWDQTILQQDITPLPSHETHSAQKGELLALICGLRAAKPWPSLNIFLDSKYLIKYLHSLAIGAFLGTSAHQTLQAALPPLLQGKTIYLHHVRSHTNLPDPISTFNEYTDSLILAPLVPLAGKRTADGSEFEKRTADGSEFESPKKKAKVE

SEQ ID NO: 1532 - protein, 2009 aa, synthetic construct
MPAAKRVKLDGGDKKYSIGLDIGTNSVGWAVITDEYKVPSKKFKVLGNTDRHSIKKNLIGALLFDSGETAEATRLKRTARRRYTRRKNRICYLQEIFSNEMAKVDDSFFHRLEESFLVEEDKKHERHPIFGNIVDEVAYHEKYPTIYHLRKKLVDSTDKADLRLIYLALAHMIKFRGHFLIEGDLNPDNSDVDKLFIQLVQTYNQLFEENPINASGVDAKAILSARLSKSRRLENLIAQLPGEKKNGLFGNLIALSLGLTPNFKSNFDLAEDAKLQLSKDTYDDDLDNLLAQIGDQYADLFLAAKNLSDAILLSDILRVNTEITKAPLSASMIKRYDEHHQDLTLLKALVRQQLPEKYKEIFFDQSKNGYAGYIDGGASQEEFYKFIKPILEKMDGTEELLVKLNREDLLRKQRTFDNGSIPHQIHLGELHAILRRQEDFYPFLKDNREKIEKILTFRIPYYVGPLARGNSRFAWMTRKSEETITPWNFEEVVDKGASAQSFIERMTNFDKNLPNEKVLPKHSLLYEYFTVYNELTKVKYVTEGMRKPAFLSGEQKKAIVDLLFKTNRKVTVKQLKEDYFKKIECFDSVEISGVEDRFNASLGTYHDLLKIIKDKDFLDNEENEDILEDIVLTLTLFEDREMIEERLKTYAHLFDDKVMKQLKRRRYTGWGRLSRKLINGIRDKQSGKTILDFLKSDGFANRNFMQLIHDDSLTFKEDIQKAQVSGQGDSLHEHIANLAGSPAIKKGILQTVKVVDELVKVMGRHKPENIVIEMARENQTTQKGQKNSRERMKRIEEGIKELGSQILKEHPVENTQLQNEKLYLYYLQNGRDMYVDQELDINRLSDYDVDHIVPQSFLKDDSIDNKVLTRSDKARGKSDNVPSEEVVKKMKNYWRQLLNAKLITQRKFDNLTKAERGGLSELDKAGFIKRQLVETRQITKHVAQILDSRMNTKYDENDKLIREVKVITLKSKLVSDFRKDFQFYKVREINNYHHAHDAYLNAVVGTALIKKYPKLESEFVYGDYKVYDVRKMIAKSEQEIGKATAKYFFYSNIMNFFKTEITLANGEIRKRPLIETNGETGEIVWDKGRDFATVRKVLSMPQVNIVKKTEVQTGGFSKESILPKRNSDKLIARKKDWDPKKYGGFDSPTVAYSVLVVAKVEKGKSKKLKSVKELLGITIMERSSFEKNPIDFLEAKGYKEVKKDLIIKLPKYSLFELENGRKRMLASAGELQKGNELALPSKYVNFLYLASHYEKLKGSPEDNEQKQLFVEQHKHYLDEIIEQISEFSKRVILADANLDKVLSAYNKHRDKPIREQAENIIHLFTLTNLGAPAAFKYFDTTIDRKRYTSTKEVLDATLIHQSITGLYETRIDLSQLGGDGGEAAAKGGSPAPGGHLPPPPQVDQFPLNLPERLQALNDLVSKALEAGHIEPYSGPGNNPVFPVKKPNGKWRFIHDLRATNAITTTLTSPSPGPPDLTSLPTALPHLQTIDLTDAFFQIPLPKQYQPYFAFTIPQPCNYGPGTRYAWTVLPQGFKNSPTLFQQQLAAVLNPMRKMFPTSTIVQYMDDILLASPTNEELQQLSQLTLQALTTHGLPISQEKTQQTPGQIRFLGQVISPNHITYESTPTIPIKSQWTLTELQVILGEIQWVSKGTPILRKHLQSLYSALHPYRDPRACITLTPQQLHALHAIQQALQHNCRGRLNPALPLLGLISLSTSGTTSVIFQPKQNWPLAWLHTPHPPTSLCPWGHLLACTILTLDKYTLQHYGQLCQSFHHNMSKQALCDFLRNSPHPSVGILIHHMGRFHNLGSQPSGPWKTLLHLPTLLQEPRLLRPIFTLSPVVLDTAPCLFSDGSPQKAAYVLWDQTILQQDITPLPSHETHSAQKGELLALICGLRAAKPWPSLNIFLDSKYLIKYLHSLAIGAFLGTSAHQTLQAALPPLLQGKTIYLHHVRSHTNLPDPISTFNEYTDSLILAPLVPLAGKRTADGSEFEKRTADGSEFESPKKKAKVE

SEQ ID NO: 1533 - protein, 2031 aa, synthetic construct
MPAAKRVKLDGGDKKYSIGLDIGTNSVGWAVITDEYKVPSKKFKVLGNTDRHSIKKNLIGALLFDSGETAEATRLKRTARRRYTRRKNRICYLQEIFSNEMAKVDDSFFHRLEESFLVEEDKKHERHPIFGNIVDEVAYHEKYPTIYHLRKKLVDSTDKADLRLIYLALAHMIKFRGHFLIEGDLNPDNSDVDKLFIQLVQTYNQLFEENPINASGVDAKAILSARLSKSRRLENLIAQLPGEKKNGLFGNLIALSLGLTPNFKSNFDLAEDAKLQLSKDTYDDDLDNLLAQIGDQYADLFLAAKNLSDAILLSDILRVNTEITKAPLSASMIKRYDEHHQDLTLLKALVRQQLPEKYKEIFFDQSKNGYAGYIDGGASQEEFYKFIKPILEKMDGTEELLVKLNREDLLRKQRTFDNGSIPHQIHLGELHAILRRQEDFYPFLKDNREKIEKILTFRIPYYVGPLARGNSRFAWMTRKSEETITPWNFEEVVDKGASAQSFIERMTNFDKNLPNEKVLPKHSLLYEYFTVYNELTKVKYVTEGMRKPAFLSGEQKKAIVDLLFKTNRKVTVKQLKEDYFKKIECFDSVEISGVEDRFNASLGTYHDLLKIIKDKDFLDNEENEDILEDIVLTLTLFEDREMIEERLKTYAHLFDDKVMKQLKRRRYTGWGRLSRKLINGIRDKQSGKTILDFLKSDGFANRNFMQLIHDDSLTFKEDIQKAQVSGQGDSLHEHIANLAGSPAIKKGILQTVKVVDELVKVMGRHKPENIVIEMARENQTTQKGQKNSRERMKRIEEGIKELGSQILKEHPVENTQLQNEKLYLYYLQNGRDMYVDQELDINRLSDYDVDHIVPQSFLKDDSIDNKVLTRSDKARGKSDNVPSEEVVKKMKNYWRQLLNAKLITQRKFDNLTKAERGGLSELDKAGFIKRQLVETRQITKHVAQILDSRMNTKYDENDKLIREVKVITLKSKLVSDFRKDFQFYKVREINNYHHAHDAYLNAVVGTALIKKYPKLESEFVYGDYKVYDVRKMIAKSEQEIGKATAKYFFYSNIMNFFKTEITLANGEIRKRPLIETNGETGEIVWDKGRDFATVRKVLSMPQVNIVKKTEVQTGGFSKESILPKRNSDKLIARKKDWDPKKYGGFDSPTVAYSVLVVAKVEKGKSKKLKSVKELLGITIMERSSFEKNPIDFLEAKGYKEVKKDLIIKLPKYSLFELENGRKRMLASAGELQKGNELALPSKYVNFLYLASHYEKLKGSPEDNEQKQLFVEQHKHYLDEIIEQISEFSKRVILADANLDKVLSAYNKHRDKPIREQAENIIHLFTLTNLGAPAAFKYFDTTIDRKRYTSTKEVLDATLIHQSITGLYETRIDLSQLGGDGGSGGSSGGSSGSETPGTSESATPESSGGSSGGSSGGHLPPPPQVDQFPLNLPERLQALNDLVSKALEAGHIEPYSGPGNNPVFPVKKPNGKWRFIHDLRATNAITTTLTSPSPGPPDLTSLPTALPHLQTIDLTDAFFQIPLPKQYQPYFAFTIPQPCNYGPGTRYAWTVLPQGFKNSPTLFQQQLAAVLNPMRKMFPTSTIVQYMDDILLASPTNEELQQLSQLTLQALTTHGLPISQEKTQQTPGQIRFLGQVISPNHITYESTPTIPIKSQWTLTELQVILGEIQWVSKGTPILRKHLQSLYSALHPYRDPRACITLTPQQLHALHAIQQALQHNCRGRLNPALPLLGLISLSTSGTTSVIFQPKQNWPLAWLHTPHPPTSLCPWGHLLACTILTLDKYTLQHYGQLCQSFHHNMSKQALCDFLRNSPHPSVGILIHHMGRFHNLGSQPSGPWKTLLHLPTLLQEPRLLRPIFTLSPVVLDTAPCLFSDGSPQKAAYVLWDQTILQQDITPLPSHETHSAQKGELLALICGLRAAKPWPSLNIFLDSKYLIKYLHSLAIGAFLGTSAHQTLQAALPPLLQGKTIYLHHVRSHTNLPDPISTFNEYTDSLILAPLVPLAGKRTADGSEFEKRTADGSEFESPKKKAKVE

SEQ ID NO: 1534 - protein, 2006 aa, synthetic construct
MPAAKRVKLDGGDKKYSIGLDIGTNSVGWAVITDEYKVPSKKFKVLGNTDRHSIKKNLIGALLFDSGETAEATRLKRTARRRYTRRKNRICYLQEIFSNEMAKVDDSFFHRLEESFLVEEDKKHERHPIFGNIVDEVAYHEKYPTIYHLRKKLVDSTDKADLRLIYLALAHMIKFRGHFLIEGDLNPDNSDVDKLFIQLVQTYNQLFEENPINASGVDAKAILSARLSKSRRLENLIAQLPGEKKNGLFGNLIALSLGLTPNFKSNFDLAEDAKLQLSKDTYDDDLDNLLAQIGDQYADLFLAAKNLSDAILLSDILRVNTEITKAPLSASMIKRYDEHHQDLTLLKALVRQQLPEKYKEIFFDQSKNGYAGYIDGGASQEEFYKFIKPILEKMDGTEELLVKLNREDLLRKQRTFDNGSIPHQIHLGELHAILRRQEDFYPFLKDNREKIEKILTFRIPYYVGPLARGNSRFAWMTRKSEETITPWNFEEVVDKGASAQSFIERMTNFDKNLPNEKVLPKHSLLYEYFTVYNELTKVKYVTEGMRKPAFLSGEQKKAIVDLLFKTNRKVTVKQLKEDYFKKIECFDSVEISGVEDRFNASLGTYHDLLKIIKDKDFLDNEENEDILEDIVLTLTLFEDREMIEERLKTYAHLFDDKVMKQLKRRRYTGWGRLSRKLINGIRDKQSGKTILDFLKSDGFANRNFMQLIHDDSLTFKEDIQKAQVSGQGDSLHEHIANLAGSPAIKKGILQTVKVVDELVKVMGRHKPENIVIEMARENQTTQKGQKNSRERMKRIEEGIKELGSQILKEHPVENTQLQNEKLYLYYLQNGRDMYVDQELDINRLSDYDVDHIVPQSFLKDDSIDNKVLTRSDKARGKSDNVPSEEVVKKMKNYWRQLLNAKLITQRKFDNLTKAERGGLSELDKAGFIKRQLVETRQITKHVAQILDSRMNTKYDENDKLIREVKVITLKSKLVSDFRKDFQFYKVREINNYHHAHDAYLNAVVGTALIKKYPKLESEFVYGDYKVYDVRKMIAKSEQEIGKATAKYFFYSNIMNFFKTEITLANGEIRKRPLIETNGETGEIVWDKGRDFATVRKVLSMPQVNIVKKTEVQTGGFSKESILPKRNSDKLIARKKDWDPKKYGGFDSPTVAYSVLVVAKVEKGKSKKLKSVKELLGITIMERSSFEKNPIDFLEAKGYKEVKKDLIIKLPKYSLFELENGRKRMLASAGELQKGNELALPSKYVNFLYLASHYEKLKGSPEDNEQKQLFVEQHKHYLDEIIEQISEFSKRVILADANLDKVLSAYNKHRDKPIREQAENIIHLFTLTNLGAPAAFKYFDTTIDRKRYTSTKEVLDATLIHQSITGLYETRIDLSQLGGDGGPAPEAAAKGGHLPPPPQVDQFPLNLPERLQALNDLVSKALEAGHIEPYSGPGNNPVFPVKKPNGKWRFIHDLRATNAITTTLTSPSPGPPDLTSLPTALPHLQTIDLTDAFFQIPLPKQYQPYFAFTIPQPCNYGPGTRYAWTVLPQGFKNSPTLFQQQLAAVLNPMRKMFPTSTIVQYMDDILLASPTNEELQQLSQLTLQALTTHGLPISQEKTQQTPGQIRFLGQVISPNHITYESTPTIPIKSQWTLTELQVILGEIQWVSKGTPILRKHLQSLYSALHPYRDPRACITLTPQQLHALHAIQQALQHNCRGRLNPALPLLGLISLSTSGTTSVIFQPKQNWPLAWLHTPHPPTSLCPWGHLLACTILTLDKYTLQHYGQLCQSFHHNMSKQALCDFLRNSPHPSVGILIHHMGRFHNLGSQPSGPWKTLLHLPTLLQEPRLLRPIFTLSPVVLDTAPCLFSDGSPQKAAYVLWDQTILQQDITPLPSHETHSAQKGELLALICGLRAAKPWPSLNIFLDSKYLIKYLHSLAIGAFLGTSAHQTLQAALPPLLQGKTIYLHHVRSHTNLPDPISTFNEYTDSLILAPLVPLAGKRTADGSEFEKRTADGSEFESPKKKAKVE

SEQ ID NO: 1535 - protein, 2007 aa, synthetic construct
MPAAKRVKLDGGDKKYSIGLDIGTNSVGWAVITDEYKVPSKKFKVLGNTDRHSIKKNLIGALLFDSGETAEATRLKRTARRRYTRRKNRICYLQEIFSNEMAKVDDSFFHRLEESFLVEEDKKHERHPIFGNIVDEVAYHEKYPTIYHLRKKLVDSTDKADLRLIYLALAHMIKFRGHFLIEGDLNPDNSDVDKLFIQLVQTYNQLFEENPINASGVDAKAILSARLSKSRRLENLIAQLPGEKKNGLFGNLIALSLGLTPNFKSNFDLAEDAKLQLSKDTYDDDLDNLLAQIGDQYADLFLAAKNLSDAILLSDILRVNTEITKAPLSASMIKRYDEHHQDLTLLKALVRQQLPEKYKEIFFDQSKNGYAGYIDGGASQEEFYKFIKPILEKMDGTEELLVKLNREDLLRKQRTFDNGSIPHQIHLGELHAILRRQEDFYPFLKDNREKIEKILTFRIPYYVGPLARGNSRFAWMTRKSEETITPWNFEEVVDKGASAQSFIERMTNFDKNLPNEKVLPKHSLLYEYFTVYNELTKVKYVTEGMRKPAFLSGEQKKAIVDLLFKTNRKVTVKQLKEDYFKKIECFDSVEISGVEDRFNASLGTYHDLLKIIKDKDFLDNEENEDILEDIVLTLTLFEDREMIEERLKTYAHLFDDKVMKQLKRRRYTGWGRLSRKLINGIRDKQSGKTILDFLKSDGFANRNFMQLIHDDSLTFKEDIQKAQVSGQGDSLHEHIANLAGSPAIKKGILQTVKVVDELVKVMGRHKPENIVIEMARENQTTQKGQKNSRERMKRIEEGIKELGSQILKEHPVENTQLQNEKLYLYYLQNGRDMYVDQELDINRLSDYDVDHIVPQSFLKDDSIDNKVLTRSDKARGKSDNVPSEEVVKKMKNYWRQLLNAKLITQRKFDNLTKAERGGLSELDKAGFIKRQLVETRQITKHVAQILDSRMNTKYDENDKLIREVKVITLKSKLVSDFRKDFQFYKVREINNYHHAHDAYLNAVVGTALIKKYPKLESEFVYGDYKVYDVRKMIAKSEQEIGKATAKYFFYSNIMNFFKTEITLANGEIRKRPLIETNGETGEIVWDKGRDFATVRKVLSMPQVNIVKKTEVQTGGFSKESILPKRNSDKLIARKKDWDPKKYGGFDSPTVAYSVLVVAKVEKGKSKKLKSVKELLGITIMERSSFEKNPIDFLEAKGYKEVKKDLIIKLPKYSLFELENGRKRMLASAGELQKGNELALPSKYVNFLYLASHYEKLKGSPEDNEQKQLFVEQHKHYLDEIIEQISEFSKRVILADANLDKVLSAYNKHRDKPIREQAENIIHLFTLTNLGAPAAFKYFDTTIDRKRYTSTKEVLDATLIHQSITGLYETRIDLSQLGGDGGGSSGGSGGGGGHLPPPPQVDQFPLNLPERLQALNDLVSKALEAGHIEPYSGPGNNPVFPVKKPNGKWRFIHDLRATNAITTTLTSPSPGPPDLTSLPTALPHLQTIDLTDAFFQIPLPKQYQPYFAFTIPQPCNYGPGTRYAWTVLPQGFKNSPTLFQQQLAAVLNPMRKMFPTSTIVQYMDDILLASPTNEELQQLSQLTLQALTTHGLPISQEKTQQTPGQIRFLGQVISPNHITYESTPTIPIKSQWTLTELQVILGEIQWVSKGTPILRKHLQSLYSALHPYRDPRACITLTPQQLHALHAIQQALQHNCRGRLNPALPLLGLISLSTSGTTSVIFQPKQNWPLAWLHTPHPPTSLCPWGHLLACTILTLDKYTLQHYGQLCQSFHHNMSKQALCDFLRNSPHPSVGILIHHMGRFHNLGSQPSGPWKTLLHLPTLLQEPRLLRPIFTLSPVVLDTAPCLFSDGSPQKAAYVLWDQTILQQDITPLPSHETHSAQKGELLALICGLRAAKPWPSLNIFLDSKYLIKYLHSLAIGAFLGTSAHQTLQAALPPLLQGKTIYLHHVRSHTNLPDPISTFNEYTDSLILAPLVPLAGKRTADGSEFEKRTADGSEFESPKKKAKVE

SEQ ID NO: 1536 - protein, 2007 aa, synthetic construct
MPAAKRVKLDGGDKKYSIGLDIGTNSVGWAVITDEYKVPSKKFKVLGNTDRHSIKKNLIGALLFDSGETAEATRLKRTARRRYTRRKNRICYLQEIFSNEMAKVDDSFFHRLEESFLVEEDKKHERHPIFGNIVDEVAYHEKYPTIYHLRKKLVDSTDKADLRLIYLALAHMIKFRGHFLIEGDLNPDNSDVDKLFIQLVQTYNQLFEENPINASGVDAKAILSARLSKSRRLENLIAQLPGEKKNGLFGNLIALSLGLTPNFKSNFDLAEDAKLQLSKDTYDDDLDNLLAQIGDQYADLFLAAKNLSDAILLSDILRVNTEITKAPLSASMIKRYDEHHQDLTLLKALVRQQLPEKYKEIFFDQSKNGYAGYIDGGASQEEFYKFIKPILEKMDGTEELLVKLNREDLLRKQRTFDNGSIPHQIHLGELHAILRRQEDFYPFLKDNREKIEKILTFRIPYYVGPLARGNSRFAWMTRKSEETITPWNFEEVVDKGASAQSFIERMTNFDKNLPNEKVLPKHSLLYEYFTVYNELTKVKYVTEGMRKPAFLSGEQKKAIVDLLFKTNRKVTVKQLKEDYFKKIECFDSVEISGVEDRFNASLGTYHDLLKIIKDKDFLDNEENEDILEDIVLTLTLFEDREMIEERLKTYAHLFDDKVMKQLKRRRYTGWGRLSRKLINGIRDKQSGKTILDFLKSDGFANRNFMQLIHDDSLTFKEDIQKAQVSGQGDSLHEHIANLAGSPAIKKGILQTVKVVDELVKVMGRHKPENIVIEMARENQTTQKGQKNSRERMKRIEEGIKELGSQILKEHPVENTQLQNEKLYLYYLQNGRDMYVDQELDINRLSDYDVDHIVPQSFLKDDSIDNKVLTRSDKARGKSDNVPSEEVVKKMKNYWRQLLNAKLITQRKFDNLTKAERGGLSELDKAGFIKRQLVETRQITKHVAQILDSRMNTKYDENDKLIREVKVITLKSKLVSDFRKDFQFYKVREINNYHHAHDAYLNAVVGTALIKKYPKLESEFVYGDYKVYDVRKMIAKSEQEIGKATAKYFFYSNIMNFFKTEITLANGEIRKRPLIETNGETGEIVWDKGRDFATVRKVLSMPQVNIVKKTEVQTGGFSKESILPKRNSDKLIARKKDWDPKKYGGFDSPTVAYSVLVVAKVEKGKSKKLKSVKELLGITIMERSSFEKNPIDFLEAKGYKEVKKDLIIKLPKYSLFELENGRKRMLASAGELQKGNELALPSKYVNFLYLASHYEKLKGSPEDNEQKQLFVEQHKHYLDEIIEQISEFSKRVILADANLDKVLSAYNKHRDKPIREQAENIIHLFTLTNLGAPAAFKYFDTTIDRKRYTSTKEVLDATLIHQSITGLYETRIDLSQLGGDGGPAPAPAPAPGGHLPPPPQVDQFPLNLPERLQALNDLVSKALEAGHIEPYSGPGNNPVFPVKKPNGKWRFIHDLRATNAITTTLTSPSPGPPDLTSLPTALPHLQTIDLTDAFFQIPLPKQYQPYFAFTIPQPCNYGPGTRYAWTVLPQGFKNSPTLFQQQLAAVLNPMRKMFPTSTIVQYMDDILLASPTNEELQQLSQLTLQALTTHGLPISQEKTQQTPGQIRFLGQVISPNHITYESTPTIPIKSQWTLTELQVILGEIQWVSKGTPILRKHLQSLYSALHPYRDPRACITLTPQQLHALHAIQQALQHNCRGRLNPALPLLGLISLSTSGTTSVIFQPKQNWPLAWLHTPHPPTSLCPWGHLLACTILTLDKYTLQHYGQLCQSFHHNMSKQALCDFLRNSPHPSVGILIHHMGRFHNLGSQPSGPWKTLLHLPTLLQEPRLLRPIFTLSPVVLDTAPCLFSDGSPQKAAYVLWDQTILQQDITPLPSHETHSAQKGELLALICGLRAAKPWPSLNIFLDSKYLIKYLHSLAIGAFLGTSAHQTLQAALPPLLQGKTIYLHHVRSHTNLPDPISTFNEYTDSLILAPLVPLAGKRTADGSEFEKRTADGSEFESPKKKAKVE

SEQ ID NO: 1537 - protein, 2010 aa, synthetic construct
MPAAKRVKLDGGDKKYSIGLDIGTNSVGWAVITDEYKVPSKKFKVLGNTDRHSIKKNLIGALLFDSGETAEATRLKRTARRRYTRRKNRICYLQEIFSNEMAKVDDSFFHRLEESFLVEEDKKHERHPIFGNIVDEVAYHEKYPTIYHLRKKLVDSTDKADLRLIYLALAHMIKFRGHFLIEGDLNPDNSDVDKLFIQLVQTYNQLFEENPINASGVDAKAILSARLSKSRRLENLIAQLPGEKKNGLFGNLIALSLGLTPNFKSNFDLAEDAKLQLSKDTYDDDLDNLLAQIGDQYADLFLAAKNLSDAILLSDILRVNTEITKAPLSASMIKRYDEHHQDLTLLKALVRQQLPEKYKEIFFDQSKNGYAGYIDGGASQEEFYKFIKPILEKMDGTEELLVKLNREDLLRKQRTFDNGSIPHQIHLGELHAILRRQEDFYPFLKDNREKIEKILTFRIPYYVGPLARGNSRFAWMTRKSEETITPWNFEEVVDKGASAQSFIERMTNFDKNLPNEKVLPKHSLLYEYFTVYNELTKVKYVTEGMRKPAFLSGEQKKAIVDLLFKTNRKVTVKQLKEDYFKKIECFDSVEISGVEDRFNASLGTYHDLLKIIKDKDFLDNEENEDILEDIVLTLTLFEDREMIEERLKTYAHLFDDKVMKQLKRRRYTGWGRLSRKLINGIRDKQSGKTILDFLKSDGFANRNFMQLIHDDSLTFKEDIQKAQVSGQGDSLHEHIANLAGSPAIKKGILQTVKVVDELVKVMGRHKPENIVIEMARENQTTQKGQKNSRERMKRIEEGIKELGSQILKEHPVENTQLQNEKLYLYYLQNGRDMYVDQELDINRLSDYDVDHIVPQSFLKDDSIDNKVLTRSDKARGKSDNVPSEEVVKKMKNYWRQLLNAKLITQRKFDNLTKAERGGLSELDKAGFIKRQLVETRQITKHVAQILDSRMNTKYDENDKLIREVKVITLKSKLVSDFRKDFQFYKVREINNYHHAHDAYLNAVVGTALIKKYPKLESEFVYGDYKVYDVRKMIAKSEQEIGKATAKYFFYSNIMNFFKTEITLANGEIRKRPLIETNGETGEIVWDKGRDFATVRKVLSMPQVNIVKKTEVQTGGFSKESILPKRNSDKLIARKKDWDPKKYGGFDSPTVAYSVLVVAKVEKGKSKKLKSVKELLGITIMERSSFEKNPIDFLEAKGYKEVKKDLIIKLPKYSLFELENGRKRMLASAGELQKGNELALPSKYVNFLYLASHYEKLKGSPEDNEQKQLFVEQHKHYLDEIIEQISEFSKRVILADANLDKVLSAYNKHRDKPIREQAENIIHLFTLTNLGAPAAFKYFDTTIDRKRYTSTKEVLDATLIHQSITGLYETRIDLSQLGGDGGEAAAKEAAAKEAAAKGGPLGTSDSPVTHADPIDWKSEEPVWVDQWPLTQEKLSAAQQLVQEQLRLGHIEPSTSAWNSPIFVIKKKSGKWRLLQDLRKVNETMMHMGALQPGLPTPSAIPDKSYIIVIDLKDCFYTIPLAPQDCKRFAFSLPSVNFKEPMQRYQWRVLPQGMTNSPTLCQKFVATAIAPVRQRFPQLYLVHYMDDILLAHTDEHLLYQAFSILKQHLSLNGLVIADEKIQTHFPYNYLGFSLYPRVYNTQLVKLQTDHLKTLNDFQKLLGDINWIRPYLKLPTYTLQPLFDILKGDSDPASPRTLSLEGRTALQSIEEAIRQQQITYCDYQRSWGLYILPTPRAPTGVLYQDKPLRWIYLSATPTKHLLPYYELVAKIIAKGRHEAIQYFGMEPPFICVPYALEQQDWLFQFSDNWSIAFANYPGQITHHYPSDKLLQFASSHAFIFPKIVRRQPIPEATLIFTDGSSNGTAALIINHQTYYAQTSFSSAQVVELFAVHQALLTVPTSFNLFTDSSYVVGALQMIETVPIIGTTSPEVLNLFTLIQQVLHCRQHPCFFGHIRAHSTLPGALVQGNHTADVLTKQVFFQSAGKRTADGSEFEKRTADGSEFESPKKKAKVE

SEQ ID NO: 1538 - protein, 2001 aa, synthetic construct
MPAAKRVKLDGGDKKYSIGLDIGTNSVGWAVITDEYKVPSKKFKVLGNTDRHSIKKNLIGALLFDSGETAEATRLKRTARRRYTRRKNRICYLQEIFSNEMAKVDDSFFHRLEESFLVEEDKKHERHPIFGNIVDEVAYHEKYPTIYHLRKKLVDSTDKADLRLIYLALAHMIKFRGHFLIEGDLNPDNSDVDKLFIQLVQTYNQLFEENPINASGVDAKAILSARLSKSRRLENLIAQLPGEKKNGLFGNLIALSLGLTPNFKSNFDLAEDAKLQLSKDTYDDDLDNLLAQIGDQYADLFLAAKNLSDAILLSDILRVNTEITKAPLSASMIKRYDEHHQDLTLLKALVRQQLPEKYKEIFFDQSKNGYAGYIDGGASQEEFYKFIKPILEKMDGTEELLVKLNREDLLRKQRTFDNGSIPHQIHLGELHAILRRQEDFYPFLKDNREKIEKILTFRIPYYVGPLARGNSRFAWMTRKSEETITPWNFEEVVDKGASAQSFIERMTNFDKNLPNEKVLPKHSLLYEYFTVYNELTKVKYVTEGMRKPAFLSGEQKKAIVDLLFKTNRKVTVKQLKEDYFKKIECFDSVEISGVEDRFNASLGTYHDLLKIIKDKDFLDNEENEDILEDIVLTLTLFEDREMIEERLKTYAHLFDDKVMKQLKRRRYTGWGRLSRKLINGIRDKQSGKTILDFLKSDGFANRNFMQLIHDDSLTFKEDIQKAQVSGQGDSLHEHIANLAGSPAIKKGILQTVKVVDELVKVMGRHKPENIVIEMARENQTTQKGQKNSRERMKRIEEGIKELGSQILKEHPVENTQLQNEKLYLYYLQNGRDMYVDQELDINRLSDYDVDHIVPQSFLKDDSIDNKVLTRSDKARGKSDNVPSEEVVKKMKNYWRQLLNAKLITQRKFDNLTKAERGGLSELDKAGFIKRQLVETRQITKHVAQILDSRMNTKYDENDKLIREVKVITLKSKLVSDFRKDFQFYKVREINNYHHAHDAYLNAVVGTALIKKYPKLESEFVYGDYKVYDVRKMIAKSEQEIGKATAKYFFYSNIMNFFKTEITLANGEIRKRPLIETNGETGEIVWDKGRDFATVRKVLSMPQVNIVKKTEVQTGGFSKESILPKRNSDKLIARKKDWDPKKYGGFDSPTVAYSVLVVAKVEKGKSKKLKSVKELLGITIMERSSFEKNPIDFLEAKGYKEVKKDLIIKLPKYSLFELENGRKRMLASAGELQKGNELALPSKYVNFLYLASHYEKLKGSPEDNEQKQLFVEQHKHYLDEIIEQISEFSKRVILADANLDKVLSAYNKHRDKPIREQAENIIHLFTLTNLGAPAAFKYFDTTIDRKRYTSTKEVLDATLIHQSITGLYETRIDLSQLGGDGGGSSGGGGGPLGTSDSPVTHADPIDWKSEEPVWVDQWPLTQEKLSAAQQLVQEQLRLGHIEPSTSAWNSPIFVIKKKSGKWRLLQDLRKVNETMMHMGALQPGLPTPSAIPDKSYIIVIDLKDCFYTIPLAPQDCKRFAFSLPSVNFKEPMQRYQWRVLPQGMTNSPTLCQKFVATAIAPVRQRFPQLYLVHYMDDILLAHTDEHLLYQAFSILKQHLSLNGLVIADEKIQTHFPYNYLGFSLYPRVYNTQLVKLQTDHLKTLNDFQKLLGDINWIRPYLKLPTYTLQPLFDILKGDSDPASPRTLSLEGRTALQSIEEAIRQQQITYCDYQRSWGLYILPTPRAPTGVLYQDKPLRWIYLSATPTKHLLPYYELVAKIIAKGRHEAIQYFGMEPPFICVPYALEQQDWLFQFSDNWSIAFANYPGQITHHYPSDKLLQFASSHAFIFPKIVRRQPIPEATLIFTDGSSNGTAALIINHQTYYAQTSFSSAQVVELFAVHQALLTVPTSFNLFTDSSYVVGALQMIETVPIIGTTSPEVLNLFTLIQQVLHCRQHPCFFGHIRAHSTLPGALVQGNHTADVLTKQVFFQSAGKRTADGSEFEKRTADGSEFESPKKKAKVE

SEQ ID NO: 1539 - protein, 2106 aa, synthetic construct
MPAAKRVKLDGGDKKYSIGLDIGTNSVGWAVITDEYKVPSKKFKVLGNTDRHSIKKNLIGALLFDSGETAEATRLKRTARRRYTRRKNRICYLQEIFSNEMAKVDDSFFHRLEESFLVEEDKKHERHPIFGNIVDEVAYHEKYPTIYHLRKKLVDSTDKADLRLIYLALAHMIKFRGHFLIEGDLNPDNSDVDKLFIQLVQTYNQLFEENPINASGVDAKAILSARLSKSRRLENLIAQLPGEKKNGLFGNLIALSLGLTPNFKSNFDLAEDAKLQLSKDTYDDDLDNLLAQIGDQYADLFLAAKNLSDAILLSDILRVNTEITKAPLSASMIKRYDEHHQDLTLLKALVRQQLPEKYKEIFFDQSKNGYAGYIDGGASQEEFYKFIKPILEKMDGTEELLVKLNREDLLRKQRTFDNGSIPHQIHLGELHAILRRQEDFYPFLKDNREKIEKILTFRIPYYVGPLARGNSRFAWMTRKSEETITPWNFEEVVDKGASAQSFIERMTNFDKNLPNEKVLPKHSLLYEYFTVYNELTKVKYVTEGMRKPAFLSGEQKKAIVDLLFKTNRKVTVKQLKEDYFKKIECFDSVEISGVEDRFNASLGTYHDLLKIIKDKDFLDNEENEDILEDIVLTLTLFEDREMIEERLKTYAHLFDDKVMKQLKRRRYTGWGRLSRKLINGIRDKQSGKTILDFLKSDGFANRNFMQLIHDDSLTFKEDIQKAQVSGQGDSLHEHIANLAGSPAIKKGILQTVKVVDELVKVMGRHKPENIVIEMARENQTTQKGQKNSRERMKRIEEGIKELGSQILKEHPVENTQLQNEKLYLYYLQNGRDMYVDQELDINRLSDYDVDHIVPQSFLKDDSIDNKVLTRSDKARGKSDNVPSEEVVKKMKNYWRQLLNAKLITQRKFDNLTKAERGGLSELDKAGFIKRQLVETRQITKHVAQILDSRMNTKYDENDKLIREVKVITLKSKLVSDFRKDFQFYKVREINNYHHAHDAYLNAVVGTALIKKYPKLESEFVYGDYKVYDVRKMIAKSEQEIGKATAKYFFYSNIMNFFKTEITLANGEIRKRPLIETNGETGEIVWDKGRDFATVRKVLSMPQVNIVKKTEVQTGGFSKESILPKRNSDKLIARKKDWDPKKYGGFDSPTVAYSVLVVAKVEKGKSKKLKSVKELLGITIMERSSFEKNPIDFLEAKGYKEVKKDLIIKLPKYSLFELENGRKRMLASAGELQKGNELALPSKYVNFLYLASHYEKLKGSPEDNEQKQLFVEQHKHYLDEIIEQISEFSKRVILADANLDKVLSAYNKHRDKPIREQAENIIHLFTLTNLGAPAAFKYFDTTIDRKRYTSTKEVLDATLIHQSITGLYETRIDLSQLGGDGGEAAAKGGGGSEAAAKGGTVSLQDEHRLFDIPVTTSLPDVWLQDFPQAWAETGGLGRAKCQAPIIIDLKPTAVPVSIKQYPMSLEAHMGIRQHIIKFLELGVLRPCRSPWNTPLLPVKKPGTQDYRPVQDLREINKRTVDIHPTVPNPYNLLSTLKPDYSWYTVLDLKDAFFCLPLAPQSQELFAFEWKDPERGISGQLTWTRLPQGFKNSPTLFNEALHRDLTDFRTQHPEVTLLQYVDDLLLAAPTKKACTQGTRHLLQELGEKGYRASAKKAQICQTKVTYLGYILSEGKRWLTPGRIETVARIPPPRNPREVREFLGTAGFCRLWIPGFAELAAPLYALTKPSTPFTWQTEHQLAFEALKKALLSAPALGLPDTSKPFTLFLDERQGIAKGVLTQKLGPWKRPVAYLSKKLDPVAAGWPPCLRIMAATAMLVKDSAKLTLGQPLTVITPHTLEAIVRQPPDRWITNARLTHYQALLLDTDRVQFGPPVTLNPATLLPVPENQPSPHDCRQVLAETHGTREDLKDQELPDADHTWYTDGSSYLDSGTRRAGAAVVDGHNTIWAQSLPPGTSAQKAELIALTKALELSKGKKANIYTDSRYAFATAHTHGSIYERRGWLTSEGKEIKNKAEIIALLKALFLPQEVAIIHCPGHQKGQDPVAVGNRQADRVARQAAMAEVLTLATEPDNTSHITAGKRTADGSEFEKRTADGSEFESPKKKAKVE

SEQ ID NO: 1540 - protein, 2102 aa, synthetic construct
MPAAKRVKLDGGDKKYSIGLDIGTNSVGWAVITDEYKVPSKKFKVLGNTDRHSIKKNLIGALLFDSGETAEATRLKRTARRRYTRRKNRICYLQEIFSNEMAKVDDSFFHRLEESFLVEEDKKHERHPIFGNIVDEVAYHEKYPTIYHLRKKLVDSTDKADLRLIYLALAHMIKFRGHFLIEGDLNPDNSDVDKLFIQLVQTYNQLFEENPINASGVDAKAILSARLSKSRRLENLIAQLPGEKKNGLFGNLIALSLGLTPNFKSNFDLAEDAKLQLSKDTYDDDLDNLLAQIGDQYADLFLAAKNLSDAILLSDILRVNTEITKAPLSASMIKRYDEHHQDLTLLKALVRQQLPEKYKEIFFDQSKNGYAGYIDGGASQEEFYKFIKPILEKMDGTEELLVKLNREDLLRKQRTFDNGSIPHQIHLGELHAILRRQEDFYPFLKDNREKIEKILTFRIPYYVGPLARGNSRFAWMTRKSEETITPWNFEEVVDKGASAQSFIERMTNFDKNLPNEKVLPKHSLLYEYFTVYNELTKVKYVTEGMRKPAFLSGEQKKAIVDLLFKTNRKVTVKQLKEDYFKKIECFDSVEISGVEDRFNASLGTYHDLLKIIKDKDFLDNEENEDILEDIVLTLTLFEDREMIEERLKTYAHLFDDKVMKQLKRRRYTGWGRLSRKLINGIRDKQSGKTILDFLKSDGFANRNFMQLIHDDSLTFKEDIQKAQVSGQGDSLHEHIANLAGSPAIKKGILQTVKVVDELVKVMGRHKPENIVIEMARENQTTQKGQKNSRERMKRIEEGIKELGSQILKEHPVENTQLQNEKLYLYYLQNGRDMYVDQELDINRLSDYDVDHIVPQSFLKDDSIDNKVLTRSDKARGKSDNVPSEEVVKKMKNYWRQLLNAKLITQRKFDNLTKAERGGLSELDKAGFIKRQLVETRQITKHVAQILDSRMNTKYDENDKLIREVKVITLKSKLVSDFRKDFQFYKVREINNYHHAHDAYLNAVVGTALIKKYPKLESEFVYGDYKVYDVRKMIAKSEQEIGKATAKYFFYSNIMNFFKTEITLANGEIRKRPLIETNGETGEIVWDKGRDFATVRKVLSMPQVNIVKKTEVQTGGFSKESILPKRNSDKLIARKKDWDPKKYGGFDSPTVAYSVLVVAKVEKGKSKKLKSVKELLGITIMERSSFEKNPIDFLEAKGYKEVKKDLIIKLPKYSLFELENGRKRMLASAGELQKGNELALPSKYVNFLYLASHYEKLKGSPEDNEQKQLFVEQHKHYLDEIIEQISEFSKRVILADANLDKVLSAYNKHRDKPIREQAENIIHLFTLTNLGAPAAFKYFDTTIDRKRYTSTKEVLDATLIHQSITGLYETRIDLSQLGGDGGGGGGSSEAAAKGGTVSLQDEHRLFDIPVTTSLPDVWLQDFPQAWAETGGLGRAKCQAPIIIDLKPTAVPVSIKQYPMSLEAHMGIRQHIIKFLELGVLRPCRSPWNTPLLPVKKPGTQDYRPVQDLREINKRTVDIHPTVPNPYNLLSTLKPDYSWYTVLDLKDAFFCLPLAPQSQELFAFEWKDPERGISGQLTWTRLPQGFKNSPTLFNEALHRDLTDFRTQHPEVTLLQYVDDLLLAAPTKKACTQGTRHLLQELGEKGYRASAKKAQICQTKVTYLGYILSEGKRWLTPGRIETVARIPPPRNPREVREFLGTAGFCRLWIPGFAELAAPLYALTKPSTPFTWQTEHQLAFEALKKALLSAPALGLPDTSKPFTLFLDERQGIAKGVLTQKLGPWKRPVAYLSKKLDPVAAGWPPCLRIMAATAMLVKDSAKLTLGQPLTVITPHTLEAIVRQPPDRWITNARLTHYQALLLDTDRVQFGPPVTLNPATLLPVPENQPSPHDCRQVLAETHGTREDLKDQELPDADHTWYTDGSSYLDSGTRRAGAAVVDGHNTIWAQSLPPGTSAQKAELIALTKALELSKGKKANIYTDSRYAFATAHTHGSIYERRGWLTSEGKEIKNKAEIIALLKALFLPQEVAIIHCPGHQKGQDPVAVGNRQADRVARQAAMAEVLTLATEPDNTSHITAGKRTADGSEFEKRTADGSEFESPKKKAKVE

SEQ ID NO: 1541 - protein, 2094 aa, synthetic construct
MPAAKRVKLDGGDKKYSIGLDIGTNSVGWAVITDEYKVPSKKFKVLGNTDRHSIKKNLIGALLFDSGETAEATRLKRTARRRYTRRKNRICYLQEIFSNEMAKVDDSFFHRLEESFLVEEDKKHERHPIFGNIVDEVAYHEKYPTIYHLRKKLVDSTDKADLRLIYLALAHMIKFRGHFLIEGDLNPDNSDVDKLFIQLVQTYNQLFEENPINASGVDAKAILSARLSKSRRLENLIAQLPGEKKNGLFGNLIALSLGLTPNFKSNFDLAEDAKLQLSKDTYDDDLDNLLAQIGDQYADLFLAAKNLSDAILLSDILRVNTEITKAPLSASMIKRYDEHHQDLTLLKALVRQQLPEKYKEIFFDQSKNGYAGYIDGGASQEEFYKFIKPILEKMDGTEELLVKLNREDLLRKQRTFDNGSIPHQIHLGELHAILRRQEDFYPFLKDNREKIEKILTFRIPYYVGPLARGNSRFAWMTRKSEETITPWNFEEVVDKGASAQSFIERMTNFDKNLPNEKVLPKHSLLYEYFTVYNELTKVKYVTEGMRKPAFLSGEQKKAIVDLLFKTNRKVTVKQLKEDYFKKIECFDSVEISGVEDRFNASLGTYHDLLKIIKDKDFLDNEENEDILEDIVLTLTLFEDREMIEERLKTYAHLFDDKVMKQLKRRRYTGWGRLSRKLINGIRDKQSGKTILDFLKSDGFANRNFMQLIHDDSLTFKEDIQKAQVSGQGDSLHEHIANLAGSPAIKKGILQTVKVVDELVKVMGRHKPENIVIEMARENQTTQKGQKNSRERMKRIEEGIKELGSQILKEHPVENTQLQNEKLYLYYLQNGRDMYVDQELDINRLSDYDVDHIVPQSFLKDDSIDNKVLTRSDKARGKSDNVPSEEVVKKMKNYWRQLLNAKLITQRKFDNLTKAERGGLSELDKAGFIKRQLVETRQITKHVAQILDSRMNTKYDENDKLIREVKVITLKSKLVSDFRKDFQFYKVREINNYHHAHDAYLNAVVGTALIKKYPKLESEFVYGDYKVYDVRKMIAKSEQEIGKATAKYFFYSNIMNFFKTEITLANGEIRKRPLIETNGETGEIVWDKGRDFATVRKVLSMPQVNIVKKTEVQTGGFSKESILPKRNSDKLIARKKDWDPKKYGGFDSPTVAYSVLVVAKVEKGKSKKLKSVKELLGITIMERSSFEKNPIDFLEAKGYKEVKKDLIIKLPKYSLFELENGRKRMLASAGELQKGNELALPSKYVNFLYLASHYEKLKGSPEDNEQKQLFVEQHKHYLDEIIEQISEFSKRVILADANLDKVLSAYNKHRDKPIREQAENIIHLFTLTNLGAPAAFKYFDTTIDRKRYTSTKEVLDATLIHQSITGLYETRIDLSQLGGDGGGGSGGTVSLQDEHRLFDIPVTTSLPDVWLQDFPQAWAETGGLGRAKCQAPIIIDLKPTAVPVSIKQYPMSLEAHMGIRQHIIKFLELGVLRPCRSPWNTPLLPVKKPGTQDYRPVQDLREINKRTVDIHPTVPNPYNLLSTLKPDYSWYTVLDLKDAFFCLPLAPQSQELFAFEWKDPERGISGQLTWTRLPQGFKNSPTLFNEALHRDLTDFRTQHPEVTLLQYVDDLLLAAPTKKACTQGTRHLLQELGEKGYRASAKKAQICQTKVTYLGYILSEGKRWLTPGRIETVARIPPPRNPREVREFLGTAGFCRLWIPGFAELAAPLYALTKPSTPFTWQTEHQLAFEALKKALLSAPALGLPDTSKPFTLFLDERQGIAKGVLTQKLGPWKRPVAYLSKKLDPVAAGWPPCLRIMAATAMLVKDSAKLTLGQPLTVITPHTLEAIVRQPPDRWITNARLTHYQALLLDTDRVQFGPPVTLNPATLLPVPENQPSPHDCRQVLAETHGTREDLKDQELPDADHTWYTDGSSYLDSGTRRAGAAVVDGHNTIWAQSLPPGTSAQKAELIALTKALELSKGKKANIYTDSRYAFATAHTHGSIYERRGWLTSEGKEIKNKAEIIALLKALFLPQEVAIIHCPGHQKGQDPVAVGNRQADRVARQAAMAEVLTLATEPDNTSHITAGKRTADGSEFEKRTADGSEFESPKKKAKVE

SEQ ID NO: 1542 - protein, 2137 aa, synthetic construct
MPAAKRVKLDGGDKKYSIGLDIGTNSVGWAVITDEYKVPSKKFKVLGNTDRHSIKKNLIGALLFDSGETAEATRLKRTARRRYTRRKNRICYLQEIFSNEMAKVDDSFFHRLEESFLVEEDKKHERHPIFGNIVDEVAYHEKYPTIYHLRKKLVDSTDKADLRLIYLALAHMIKFRGHFLIEGDLNPDNSDVDKLFIQLVQTYNQLFEENPINASGVDAKAILSARLSKSRRLENLIAQLPGEKKNGLFGNLIALSLGLTPNFKSNFDLAEDAKLQLSKDTYDDDLDNLLAQIGDQYADLFLAAKNLSDAILLSDILRVNTEITKAPLSASMIKRYDEHHQDLTLLKALVRQQLPEKYKEIFFDQSKNGYAGYIDGGASQEEFYKFIKPILEKMDGTEELLVKLNREDLLRKQRTFDNGSIPHQIHLGELHAILRRQEDFYPFLKDNREKIEKILTFRIPYYVGPLARGNSRFAWMTRKSEETITPWNFEEVVDKGASAQSFIERMTNFDKNLPNEKVLPKHSLLYEYFTVYNELTKVKYVTEGMRKPAFLSGEQKKAIVDLLFKTNRKVTVKQLKEDYFKKIECFDSVEISGVEDRFNASLGTYHDLLKIIKDKDFLDNEENEDILEDIVLTLTLFEDREMIEERLKTYAHLFDDKVMKQLKRRRYTGWGRLSRKLINGIRDKQSGKTILDFLKSDGFANRNFMQLIHDDSLTFKEDIQKAQVSGQGDSLHEHIANLAGSPAIKKGILQTVKVVDELVKVMGRHKPENIVIEMARENQTTQKGQKNSRERMKRIEEGIKELGSQILKEHPVENTQLQNEKLYLYYLQNGRDMYVDQELDINRLSDYDVDHIVPQSFLKDDSIDNKVLTRSDKARGKSDNVPSEEVVKKMKNYWRQLLNAKLITQRKFDNLTKAERGGLSELDKAGFIKRQLVETRQITKHVAQILDSRMNTKYDENDKLIREVKVITLKSKLVSDFRKDFQFYKVREINNYHHAHDAYLNAVVGTALIKKYPKLESEFVYGDYKVYDVRKMIAKSEQEIGKATAKYFFYSNIMNFFKTEITLANGEIRKRPLIETNGETGEIVWDKGRDFATVRKVLSMPQVNIVKKTEVQTGGFSKESILPKRNSDKLIARKKDWDPKKYGGFDSPTVAYSVLVVAKVEKGKSKKLKSVKELLGITIMERSSFEKNPIDFLEAKGYKEVKKDLIIKLPKYSLFELENGRKRMLASAGELQKGNELALPSKYVNFLYLASHYEKLKGSPEDNEQKQLFVEQHKHYLDEIIEQISEFSKRVILADANLDKVLSAYNKHRDKPIREQAENIIHLFTLTNLGAPAAFKYFDTTIDRKRYTSTKEVLDATLIHQSITGLYETRIDLSQLGGDGGAEAAAKEAAAKEAAAKEAAAKALEAEAAAKEAAAKEAAAKEAAAKAGGTVSLQDEHRLFDIPVTTSLPDVWLQDFPQAWAETGGLGRAKCQAPIIIDLKPTAVPVSIKQYPMSLEAHMGIRQHIIKFLELGVLRPCRSPWNTPLLPVKKPGTQDYRPVQDLREINKRTVDIHPTVPNPYNLLSTLKPDYSWYTVLDLKDAFFCLPLAPQSQELFAFEWKDPERGISGQLTWTRLPQGFKNSPTLFNEALHRDLTDFRTQHPEVTLLQYVDDLLLAAPTKKACTQGTRHLLQELGEKGYRASAKKAQICQTKVTYLGYILSEGKRWLTPGRIETVARIPPPRNPREVREFLGTAGFCRLWIPGFAELAAPLYALTKPSTPFTWQTEHQLAFEALKKALLSAPALGLPDTSKPFTLFLDERQGIAKGVLTQKLGPWKRPVAYLSKKLDPVAAGWPPCLRIMAATAMLVKDSAKLTLGQPLTVITPHTLEAIVRQPPDRWITNARLTHYQALLLDTDRVQFGPPVTLNPATLLPVPENQPSPHDCRQVLAETHGTREDLKDQELPDADHTWYTDGSSYLDSGTRRAGAAVVDGHNTIWAQSLPPGTSAQKAELIALTKALELSKGKKANIYTDSRYAFATAHTHGSIYERRGWLTSEGKEIKNKAEIIALLKALFLPQEVAIIHCPGHQKGQDPVAVGNRQADRVARQAAMAEVLTLATEPDNTSHITAGKRTADGSEFEKRTADGSEFESPKKKAKVE

SEQ ID NO: 1543 - protein, 2116 aa, synthetic construct
MPAAKRVKLDGGDKKYSIGLDIGTNSVGWAVITDEYKVPSKKFKVLGNTDRHSIKKNLIGALLFDSGETAEATRLKRTARRRYTRRKNRICYLQEIFSNEMAKVDDSFFHRLEESFLVEEDKKHERHPIFGNIVDEVAYHEKYPTIYHLRKKLVDSTDKADLRLIYLALAHMIKFRGHFLIEGDLNPDNSDVDKLFIQLVQTYNQLFEENPINASGVDAKAILSARLSKSRRLENLIAQLPGEKKNGLFGNLIALSLGLTPNFKSNFDLAEDAKLQLSKDTYDDDLDNLLAQIGDQYADLFLAAKNLSDAILLSDILRVNTEITKAPLSASMIKRYDEHHQDLTLLKALVRQQLPEKYKEIFFDQSKNGYAGYIDGGASQEEFYKFIKPILEKMDGTEELLVKLNREDLLRKQRTFDNGSIPHQIHLGELHAILRRQEDFYPFLKDNREKIEKILTFRIPYYVGPLARGNSRFAWMTRKSEETITPWNFEEVVDKGASAQSFIERMTNFDKNLPNEKVLPKHSLLYEYFTVYNELTKVKYVTEGMRKPAFLSGEQKKAIVDLLFKTNRKVTVKQLKEDYFKKIECFDSVEISGVEDRFNASLGTYHDLLKIIKDKDFLDNEENEDILEDIVLTLTLFEDREMIEERLKTYAHLFDDKVMKQLKRRRYTGWGRLSRKLINGIRDKQSGKTILDFLKSDGFANRNFMQLIHDDSLTFKEDIQKAQVSGQGDSLHEHIANLAGSPAIKKGILQTVKVVDELVKVMGRHKPENIVIEMARENQTTQKGQKNSRERMKRIEEGIKELGSQILKEHPVENTQLQNEKLYLYYLQNGRDMYVDQELDINRLSDYDVDHIVPQSFLKDDSIDNKVLTRSDKARGKSDNVPSEEVVKKMKNYWRQLLNAKLITQRKFDNLTKAERGGLSELDKAGFIKRQLVETRQITKHVAQILDSRMNTKYDENDKLIREVKVITLKSKLVSDFRKDFQFYKVREINNYHHAHDAYLNAVVGTALIKKYPKLESEFVYGDYKVYDVRKMIAKSEQEIGKATAKYFFYSNIMNFFKTEITLANGEIRKRPLIETNGETGEIVWDKGRDFATVRKVLSMPQVNIVKKTEVQTGGFSKESILPKRNSDKLIARKKDWDPKKYGGFDSPTVAYSVLVVAKVEKGKSKKLKSVKELLGITIMERSSFEKNPIDFLEAKGYKEVKKDLIIKLPKYSLFELENGRKRMLASAGELQKGNELALPSKYVNFLYLASHYEKLKGSPEDNEQKQLFVEQHKHYLDEIIEQISEFSKRVILADANLDKVLSAYNKHRDKPIREQAENIIHLFTLTNLGAPAAFKYFDTTIDRKRYTSTKEVLDATLIHQSITGLYETRIDLSQLGGDGGGGGGSGGGGSGGGGSGGGGSGGGGSGGTVSLQDEHRLFDIPVTTSLPDVWLQDFPQAWAETGGLGRAKCQAPIIIDLKPTAVPVSIKQYPMSLEAHMGIRQHIIKFLELGVLRPCRSPWNTPLLPVKKPGTQDYRPVQDLREINKRTVDIHPTVPNPYNLLSTLKPDYSWYTVLDLKDAFFCLPLAPQSQELFAFEWKDPERGISGQLTWTRLPQGFKNSPTLFNEALHRDLTDFRTQHPEVTLLQYVDDLLLAAPTKKACTQGTRHLLQELGEKGYRASAKKAQICQTKVTYLGYILSEGKRWLTPGRIETVARIPPPRNPREVREFLGTAGFCRLWIPGFAELAAPLYALTKPSTPFTWQTEHQLAFEALKKALLSAPALGLPDTSKPFTLFLDERQGIAKGVLTQKLGPWKRPVAYLSKKLDPVAAGWPPCLRIMAATAMLVKDSAKLTLGQPLTVITPHTLEAIVRQPPDRWITNARLTHYQALLLDTDRVQFGPPVTLNPATLLPVPENQPSPHDCRQVLAETHGTREDLKDQELPDADHTWYTDGSSYLDSGTRRAGAAVVDGHNTIWAQSLPPGTSAQKAELIALTKALELSKGKKANIYTDSRYAFATAHTHGSIYERRGWLTSEGKEIKNKAEIIALLKALFLPQEVAIIHCPGHQKGQDPVAVGNRQADRVARQAAMAEVLTLATEPDNTSHITAGKRTADGSEFEKRTADGSEFESPKKKAKVE

SEQ ID NO: 1544 - protein, 2099 aa, synthetic construct
MPAAKRVKLDGGDKKYSIGLDIGTNSVGWAVITDEYKVPSKKFKVLGNTDRHSIKKNLIGALLFDSGETAEATRLKRTARRRYTRRKNRICYLQEIFSNEMAKVDDSFFHRLEESFLVEEDKKHERHPIFGNIVDEVAYHEKYPTIYHLRKKLVDSTDKADLRLIYLALAHMIKFRGHFLIEGDLNPDNSDVDKLFIQLVQTYNQLFEENPINASGVDAKAILSARLSKSRRLENLIAQLPGEKKNGLFGNLIALSLGLTPNFKSNFDLAEDAKLQLSKDTYDDDLDNLLAQIGDQYADLFLAAKNLSDAILLSDILRVNTEITKAPLSASMIKRYDEHHQDLTLLKALVRQQLPEKYKEIFFDQSKNGYAGYIDGGASQEEFYKFIKPILEKMDGTEELLVKLNREDLLRKQRTFDNGSIPHQIHLGELHAILRRQEDFYPFLKDNREKIEKILTFRIPYYVGPLARGNSRFAWMTRKSEETITPWNFEEVVDKGASAQSFIERMTNFDKNLPNEKVLPKHSLLYEYFTVYNELTKVKYVTEGMRKPAFLSGEQKKAIVDLLFKTNRKVTVKQLKEDYFKKIECFDSVEISGVEDRFNASLGTYHDLLKIIKDKDFLDNEENEDILEDIVLTLTLFEDREMIEERLKTYAHLFDDKVMKQLKRRRYTGWGRLSRKLINGIRDKQSGKTILDFLKSDGFANRNFMQLIHDDSLTFKEDIQKAQVSGQGDSLHEHIANLAGSPAIKKGILQTVKVVDELVKVMGRHKPENIVIEMARENQTTQKGQKNSRERMKRIEEGIKELGSQILKEHPVENTQLQNEKLYLYYLQNGRDMYVDQELDINRLSDYDVDHIVPQSFLKDDSIDNKVLTRSDKARGKSDNVPSEEVVKKMKNYWRQLLNAKLITQRKFDNLTKAERGGLSELDKAGFIKRQLVETRQITKHVAQILDSRMNTKYDENDKLIREVKVITLKSKLVSDFRKDFQFYKVREINNYHHAHDAYLNAVVGTALIKKYPKLESEFVYGDYKVYDVRKMIAKSEQEIGKATAKYFFYSNIMNFFKTEITLANGEIRKRPLIETNGETGEIVWDKGRDFATVRKVLSMPQVNIVKKTEVQTGGFSKESILPKRNSDKLIARKKDWDPKKYGGFDSPTVAYSVLVVAKVEKGKSKKLKSVKELLGITIMERSSFEKNPIDFLEAKGYKEVKKDLIIKLPKYSLFELENGRKRMLASAGELQKGNELALPSKYVNFLYLASHYEKLKGSPEDNEQKQLFVEQHKHYLDEIIEQISEFSKRVILADANLDKVLSAYNKHRDKPIREQAENIIHLFTLTNLGAPAAFKYFDTTIDRKRYTSTKEVLDATLIHQSITGLYETRIDLSQLGGDGGEAAAKPAPGGTVSLQDEHRLFDIPVTTSLPDVWLQDFPQAWAETGGLGRAKCQAPIIIDLKPTAVPVSIKQYPMSLEAHMGIRQHIIKFLELGVLRPCRSPWNTPLLPVKKPGTQDYRPVQDLREINKRTVDIHPTVPNPYNLLSTLKPDYSWYTVLDLKDAFFCLPLAPQSQELFAFEWKDPERGISGQLTWTRLPQGFKNSPTLFNEALHRDLTDFRTQHPEVTLLQYVDDLLLAAPTKKACTQGTRHLLQELGEKGYRASAKKAQICQTKVTYLGYILSEGKRWLTPGRIETVARIPPPRNPREVREFLGTAGFCRLWIPGFAELAAPLYALTKPSTPFTWQTEHQLAFEALKKALLSAPALGLPDTSKPFTLFLDERQGIAKGVLTQKLGPWKRPVAYLSKKLDPVAAGWPPCLRIMAATAMLVKDSAKLTLGQPLTVITPHTLEAIVRQPPDRWITNARLTHYQALLLDTDRVQFGPPVTLNPATLLPVPENQPSPHDCRQVLAETHGTREDLKDQELPDADHTWYTDGSSYLDSGTRRAGAAVVDGHNTIWAQSLPPGTSAQKAELIALTKALELSKGKKANIYTDSRYAFATAHTHGSIYERRGWLTSEGKEIKNKAEIIALLKALFLPQEVAIIHCPGHQKGQDPVAVGNRQADRVARQAAMAEVLTLATEPDNTSHITAGKRTADGSEFEKRTADGSEFESPKKKAKVE

SEQ ID NO: 1545 - protein, 2094 aa, synthetic construct
MPAAKRVKLDGGDKKYSIGLDIGTNSVGWAVITDEYKVPSKKFKVLGNTDRHSIKKNLIGALLFDSGETAEATRLKRTARRRYTRRKNRICYLQEIFSNEMAKVDDSFFHRLEESFLVEEDKKHERHPIFGNIVDEVAYHEKYPTIYHLRKKLVDSTDKADLRLIYLALAHMIKFRGHFLIEGDLNPDNSDVDKLFIQLVQTYNQLFEENPINASGVDAKAILSARLSKSRRLENLIAQLPGEKKNGLFGNLIALSLGLTPNFKSNFDLAEDAKLQLSKDTYDDDLDNLLAQIGDQYADLFLAAKNLSDAILLSDILRVNTEITKAPLSASMIKRYDEHHQDLTLLKALVRQQLPEKYKEIFFDQSKNGYAGYIDGGASQEEFYKFIKPILEKMDGTEELLVKLNREDLLRKQRTFDNGSIPHQIHLGELHAILRRQEDFYPFLKDNREKIEKILTFRIPYYVGPLARGNSRFAWMTRKSEETITPWNFEEVVDKGASAQSFIERMTNFDKNLPNEKVLPKHSLLYEYFTVYNELTKVKYVTEGMRKPAFLSGEQKKAIVDLLFKTNRKVTVKQLKEDYFKKIECFDSVEISGVEDRFNASLGTYHDLLKIIKDKDFLDNEENEDILEDIVLTLTLFEDREMIEERLKTYAHLFDDKVMKQLKRRRYTGWGRLSRKLINGIRDKQSGKTILDFLKSDGFANRNFMQLIHDDSLTFKEDIQKAQVSGQGDSLHEHIANLAGSPAIKKGILQTVKVVDELVKVMGRHKPENIVIEMARENQTTQKGQKNSRERMKRIEEGIKELGSQILKEHPVENTQLQNEKLYLYYLQNGRDMYVDQELDINRLSDYDVDHIVPQSFLKDDSIDNKVLTRSDKARGKSDNVPSEEVVKKMKNYWRQLLNAKLITQRKFDNLTKAERGGLSELDKAGFIKRQLVETRQITKHVAQILDSRMNTKYDENDKLIREVKVITLKSKLVSDFRKDFQFYKVREINNYHHAHDAYLNAVVGTALIKKYPKLESEFVYGDYKVYDVRKMIAKSEQEIGKATAKYFFYSNIMNFFKTEITLANGEIRKRPLIETNGETGEIVWDKGRDFATVRKVLSMPQVNIVKKTEVQTGGFSKESILPKRNSDKLIARKKDWDPKKYGGFDSPTVAYSVLVVAKVEKGKSKKLKSVKELLGITIMERSSFEKNPIDFLEAKGYKEVKKDLIIKLPKYSLFELENGRKRMLASAGELQKGNELALPSKYVNFLYLASHYEKLKGSPEDNEQKQLFVEQHKHYLDEIIEQISEFSKRVILADANLDKVLSAYNKHRDKPIREQAENIIHLFTLTNLGAPAAFKYFDTTIDRKRYTSTKEVLDATLIHQSITGLYETRIDLSQLGGDGGGSSGGTVSLQDEHRLFDIPVTTSLPDVWLQDFPQAWAETGGLGRAKCQAPIIIDLKPTAVPVSIKQYPMSLEAHMGIRQHIIKFLELGVLRPCRSPWNTPLLPVKKPGTQDYRPVQDLREINKRTVDIHPTVPNPYNLLSTLKPDYSWYTVLDLKDAFFCLPLAPQSQELFAFEWKDPERGISGQLTWTRLPQGFKNSPTLFNEALHRDLTDFRTQHPEVTLLQYVDDLLLAAPTKKACTQGTRHLLQELGEKGYRASAKKAQICQTKVTYLGYILSEGKRWLTPGRIETVARIPPPRNPREVREFLGTAGFCRLWIPGFAELAAPLYALTKPSTPFTWQTEHQLAFEALKKALLSAPALGLPDTSKPFTLFLDERQGIAKGVLTQKLGPWKRPVAYLSKKLDPVAAGWPPCLRIMAATAMLVKDSAKLTLGQPLTVITPHTLEAIVRQPPDRWITNARLTHYQALLLDTDRVQFGPPVTLNPATLLPVPENQPSPHDCRQVLAETHGTREDLKDQELPDADHTWYTDGSSYLDSGTRRAGAAVVDGHNTIWAQSLPPGTSAQKAELIALTKALELSKGKKANIYTDSRYAFATAHTHGSIYERRGWLTSEGKEIKNKAEIIALLKALFLPQEVAIIHCPGHQKGQDPVAVGNRQADRVARQAAMAEVLTLATEPDNTSHITAGKRTADGSEFEKRTADGSEFESPKKKAKVE

SEQ ID NO: 1546 - protein, 2116 aa, synthetic construct
MPAAKRVKLDGGDKKYSIGLDIGTNSVGWAVITDEYKVPSKKFKVLGNTDRHSIKKNLIGALLFDSGETAEATRLKRTARRRYTRRKNRICYLQEIFSNEMAKVDDSFFHRLEESFLVEEDKKHERHPIFGNIVDEVAYHEKYPTIYHLRKKLVDSTDKADLRLIYLALAHMIKFRGHFLIEGDLNPDNSDVDKLFIQLVQTYNQLFEENPINASGVDAKAILSARLSKSRRLENLIAQLPGEKKNGLFGNLIALSLGLTPNFKSNFDLAEDAKLQLSKDTYDDDLDNLLAQIGDQYADLFLAAKNLSDAILLSDILRVNTEITKAPLSASMIKRYDEHHQDLTLLKALVRQQLPEKYKEIFFDQSKNGYAGYIDGGASQEEFYKFIKPILEKMDGTEELLVKLNREDLLRKQRTFDNGSIPHQIHLGELHAILRRQEDFYPFLKDNREKIEKILTFRIPYYVGPLARGNSRFAWMTRKSEETITPWNFEEVVDKGASAQSFIERMTNFDKNLPNEKVLPKHSLLYEYFTVYNELTKVKYVTEGMRKPAFLSGEQKKAIVDLLFKTNRKVTVKQLKEDYFKKIECFDSVEISGVEDRFNASLGTYHDLLKIIKDKDFLDNEENEDILEDIVLTLTLFEDREMIEERLKTYAHLFDDKVMKQLKRRRYTGWGRLSRKLINGIRDKQSGKTILDFLKSDGFANRNFMQLIHDDSLTFKEDIQKAQVSGQGDSLHEHIANLAGSPAIKKGILQTVKVVDELVKVMGRHKPENIVIEMARENQTTQKGQKNSRERMKRIEEGIKELGSQILKEHPVENTQLQNEKLYLYYLQNGRDMYVDQELDINRLSDYDVDHIVPQSFLKDDSIDNKVLTRSDKARGKSDNVPSEEVVKKMKNYWRQLLNAKLITQRKFDNLTKAERGGLSELDKAGFIKRQLVETRQITKHVAQILDSRMNTKYDENDKLIREVKVITLKSKLVSDFRKDFQFYKVREINNYHHAHDAYLNAVVGTALIKKYPKLESEFVYGDYKVYDVRKMIAKSEQEIGKATAKYFFYSNIMNFFKTEITLANGEIRKRPLIETNGETGEIVWDKGRDFATVRKVLSMPQVNIVKKTEVQTGGFSKESILPKRNSDKLIARKKDWDPKKYGGFDSPTVAYSVLVVAKVEKGKSKKLKSVKELLGITIMERSSFEKNPIDFLEAKGYKEVKKDLIIKLPKYSLFELENGRKRMLASAGELQKGNELALPSKYVNFLYLASHYEKLKGSPEDNEQKQLFVEQHKHYLDEIIEQISEFSKRVILADANLDKVLSAYNKHRDKPIREQAENIIHLFTLTNLGAPAAFKYFDTTIDRKRYTSTKEVLDATLIHQSITGLYETRIDLSQLGGDGGEAAAKEAAAKEAAAKEAAAKEAAAKGGTVSLQDEHRLFDIPVTTSLPDVWLQDFPQAWAETGGLGRAKCQAPIIIDLKPTAVPVSIKQYPMSLEAHMGIRQHIIKFLELGVLRPCRSPWNTPLLPVKKPGTQDYRPVQDLREINKRTVDIHPTVPNPYNLLSTLKPDYSWYTVLDLKDAFFCLPLAPQSQELFAFEWKDPERGISGQLTWTRLPQGFKNSPTLFNEALHRDLTDFRTQHPEVTLLQYVDDLLLAAPTKKACTQGTRHLLQELGEKGYRASAKKAQICQTKVTYLGYILSEGKRWLTPGRIETVARIPPPRNPREVREFLGTAGFCRLWIPGFAELAAPLYALTKPSTPFTWQTEHQLAFEALKKALLSAPALGLPDTSKPFTLFLDERQGIAKGVLTQKLGPWKRPVAYLSKKLDPVAAGWPPCLRIMAATAMLVKDSAKLTLGQPLTVITPHTLEAIVRQPPDRWITNARLTHYQALLLDTDRVQFGPPVTLNPATLLPVPENQPSPHDCRQVLAETHGTREDLKDQELPDADHTWYTDGSSYLDSGTRRAGAAVVDGHNTIWAQSLPPGTSAQKAELIALTKALELSKGKKANIYTDSRYAFATAHTHGSIYERRGWLTSEGKEIKNKAEIIALLKALFLPQEVAIIHCPGHQKGQDPVAVGNRQADRVARQAAMAEVLTLATEPDNTSHITAGKRTADGSEFEKRTADGSEFESPKKKAKVE

SEQ ID NO: 1547 - protein, 2099 aa, synthetic construct
MPAAKRVKLDGGDKKYSIGLDIGTNSVGWAVITDEYKVPSKKFKVLGNTDRHSIKKNLIGALLFDSGETAEATRLKRTARRRYTRRKNRICYLQEIFSNEMAKVDDSFFHRLEESFLVEEDKKHERHPIFGNIVDEVAYHEKYPTIYHLRKKLVDSTDKADLRLIYLALAHMIKFRGHFLIEGDLNPDNSDVDKLFIQLVQTYNQLFEENPINASGVDAKAILSARLSKSRRLENLIAQLPGEKKNGLFGNLIALSLGLTPNFKSNFDLAEDAKLQLSKDTYDDDLDNLLAQIGDQYADLFLAAKNLSDAILLSDILRVNTEITKAPLSASMIKRYDEHHQDLTLLKALVRQQLPEKYKEIFFDQSKNGYAGYIDGGASQEEFYKFIKPILEKMDGTEELLVKLNREDLLRKQRTFDNGSIPHQIHLGELHAILRRQEDFYPFLKDNREKIEKILTFRIPYYVGPLARGNSRFAWMTRKSEETITPWNFEEVVDKGASAQSFIERMTNFDKNLPNEKVLPKHSLLYEYFTVYNELTKVKYVTEGMRKPAFLSGEQKKAIVDLLFKTNRKVTVKQLKEDYFKKIECFDSVEISGVEDRFNASLGTYHDLLKIIKDKDFLDNEENEDILEDIVLTLTLFEDREMIEERLKTYAHLFDDKVMKQLKRRRYTGWGRLSRKLINGIRDKQSGKTILDFLKSDGFANRNFMQLIHDDSLTFKEDIQKAQVSGQGDSLHEHIANLAGSPAIKKGILQTVKVVDELVKVMGRHKPENIVIEMARENQTTQKGQKNSRERMKRIEEGIKELGSQILKEHPVENTQLQNEKLYLYYLQNGRDMYVDQELDINRLSDYDVDHIVPQSFLKDDSIDNKVLTRSDKARGKSDNVPSEEVVKKMKNYWRQLLNAKLITQRKFDNLTKAERGGLSELDKAGFIKRQLVETRQITKHVAQILDSRMNTKYDENDKLIREVKVITLKSKLVSDFRKDFQFYKVREINNYHHAHDAYLNAVVGTALIKKYPKLESEFVYGDYKVYDVRKMIAKSEQEIGKATAKYFFYSNIMNFFKTEITLANGEIRKRPLIETNGETGEIVWDKGRDFATVRKVLSMPQVNIVKKTEVQTGGFSKESILPKRNSDKLIARKKDWDPKKYGGFDSPTVAYSVLVVAKVEKGKSKKLKSVKELLGITIMERSSFEKNPIDFLEAKGYKEVKKDLIIKLPKYSLFELENGRKRMLASAGELQKGNELALPSKYVNFLYLASHYEKLKGSPEDNEQKQLFVEQHKHYLDEIIEQISEFSKRVILADANLDKVLSAYNKHRDKPIREQAENIIHLFTLTNLGAPAAFKYFDTTIDRKRYTSTKEVLDATLIHQSITGLYETRIDLSQLGGDGGEAAAKGGGGGTVSLQDEHRLFDIPVTTSLPDVWLQDFPQAWAETGGLGRAKCQAPIIIDLKPTAVPVSIKQYPMSLEAHMGIRQHIIKFLELGVLRPCRSPWNTPLLPVKKPGTQDYRPVQDLREINKRTVDIHPTVPNPYNLLSTLKPDYSWYTVLDLKDAFFCLPLAPQSQELFAFEWKDPERGISGQLTWTRLPQGFKNSPTLFNEALHRDLTDFRTQHPEVTLLQYVDDLLLAAPTKKACTQGTRHLLQELGEKGYRASAKKAQICQTKVTYLGYILSEGKRWLTPGRIETVARIPPPRNPREVREFLGTAGFCRLWIPGFAELAAPLYALTKPSTPFTWQTEHQLAFEALKKALLSAPALGLPDTSKPFTLFLDERQGIAKGVLTQKLGPWKRPVAYLSKKLDPVAAGWPPCLRIMAATAMLVKDSAKLTLGQPLTVITPHTLEAIVRQPPDRWITNARLTHYQALLLDTDRVQFGPPVTLNPATLLPVPENQPSPHDCRQVLAETHGTREDLKDQELPDADHTWYTDGSSYLDSGTRRAGAAVVDGHNTIWAQSLPPGTSAQKAELIALTKALELSKGKKANIYTDSRYAFATAHTHGSIYERRGWLTSEGKEIKNKAEIIALLKALFLPQEVAIIHCPGHQKGQDPVAVGNRQADRVARQAAMAEVLTLATEPDNTSHITAGKRTADGSEFEKRTADGSEFESPKKKAKVE

SEQ ID NO: 1548 - protein, 2097 aa, synthetic construct
MPAAKRVKLDGGDKKYSIGLDIGTNSVGWAVITDEYKVPSKKFKVLGNTDRHSIKKNLIGALLFDSGETAEATRLKRTARRRYTRRKNRICYLQEIFSNEMAKVDDSFFHRLEESFLVEEDKKHERHPIFGNIVDEVAYHEKYPTIYHLRKKLVDSTDKADLRLIYLALAHMIKFRGHFLIEGDLNPDNSDVDKLFIQLVQTYNQLFEENPINASGVDAKAILSARLSKSRRLENLIAQLPGEKKNGLFGNLIALSLGLTPNFKSNFDLAEDAKLQLSKDTYDDDLDNLLAQIGDQYADLFLAAKNLSDAILLSDILRVNTEITKAPLSASMIKRYDEHHQDLTLLKALVRQQLPEKYKEIFFDQSKNGYAGYIDGGASQEEFYKFIKPILEKMDGTEELLVKLNREDLLRKQRTFDNGSIPHQIHLGELHAILRRQEDFYPFLKDNREKIEKILTFRIPYYVGPLARGNSRFAWMTRKSEETITPWNFEEVVDKGASAQSFIERMTNFDKNLPNEKVLPKHSLLYEYFTVYNELTKVKYVTEGMRKPAFLSGEQKKAIVDLLFKTNRKVTVKQLKEDYFKKIECFDSVEISGVEDRFNASLGTYHDLLKIIKDKDFLDNEENEDILEDIVLTLTLFEDREMIEERLKTYAHLFDDKVMKQLKRRRYTGWGRLSRKLINGIRDKQSGKTILDFLKSDGFANRNFMQLIHDDSLTFKEDIQKAQVSGQGDSLHEHIANLAGSPAIKKGILQTVKVVDELVKVMGRHKPENIVIEMARENQTTQKGQKNSRERMKRIEEGIKELGSQILKEHPVENTQLQNEKLYLYYLQNGRDMYVDQELDINRLSDYDVDHIVPQSFLKDDSIDNKVLTRSDKARGKSDNVPSEEVVKKMKNYWRQLLNAKLITQRKFDNLTKAERGGLSELDKAGFIKRQLVETRQITKHVAQILDSRMNTKYDENDKLIREVKVITLKSKLVSDFRKDFQFYKVREINNYHHAHDAYLNAVVGTALIKKYPKLESEFVYGDYKVYDVRKMIAKSEQEIGKATAKYFFYSNIMNFFKTEITLANGEIRKRPLIETNGETGEIVWDKGRDFATVRKVLSMPQVNIVKKTEVQTGGFSKESILPKRNSDKLIARKKDWDPKKYGGFDSPTVAYSVLVVAKVEKGKSKKLKSVKELLGITIMERSSFEKNPIDFLEAKGYKEVKKDLIIKLPKYSLFELENGRKRMLASAGELQKGNELALPSKYVNFLYLASHYEKLKGSPEDNEQKQLFVEQHKHYLDEIIEQISEFSKRVILADANLDKVLSAYNKHRDKPIREQAENIIHLFTLTNLGAPAAFKYFDTTIDRKRYTSTKEVLDATLIHQSITGLYETRIDLSQLGGDGGGSSGGGGGTVSLQDEHRLFDIPVTTSLPDVWLQDFPQAWAETGGLGRAKCQAPIIIDLKPTAVPVSIKQYPMSLEAHMGIRQHIIKFLELGVLRPCRSPWNTPLLPVKKPGTQDYRPVQDLREINKRTVDIHPTVPNPYNLLSTLKPDYSWYTVLDLKDAFFCLPLAPQSQELFAFEWKDPERGISGQLTWTRLPQGFKNSPTLFNEALHRDLTDFRTQHPEVTLLQYVDDLLLAAPTKKACTQGTRHLLQELGEKGYRASAKKAQICQTKVTYLGYILSEGKRWLTPGRIETVARIPPPRNPREVREFLGTAGFCRLWIPGFAELAAPLYALTKPSTPFTWQTEHQLAFEALKKALLSAPALGLPDTSKPFTLFLDERQGIAKGVLTQKLGPWKRPVAYLSKKLDPVAAGWPPCLRIMAATAMLVKDSAKLTLGQPLTVITPHTLEAIVRQPPDRWITNARLTHYQALLLDTDRVQFGPPVTLNPATLLPVPENQPSPHDCRQVLAETHGTREDLKDQELPDADHTWYTDGSSYLDSGTRRAGAAVVDGHNTIWAQSLPPGTSAQKAELIALTKALELSKGKKANIYTDSRYAFATAHTHGSIYERRGWLTSEGKEIKNKAEIIALLKALFLPQEVAIIHCPGHQKGQDPVAVGNRQADRVARQAAMAEVLTLATEPDNTSHITAGKRTADGSEFEKRTADGSEFESPKKKAKVE

SEQ ID NO: 1549 - protein, 2102 aa, synthetic construct
MPAAKRVKLDGGDKKYSIGLDIGTNSVGWAVITDEYKVPSKKFKVLGNTDRHSIKKNLIGALLFDSGETAEATRLKRTARRRYTRRKNRICYLQEIFSNEMAKVDDSFFHRLEESFLVEEDKKHERHPIFGNIVDEVAYHEKYPTIYHLRKKLVDSTDKADLRLIYLALAHMIKFRGHFLIEGDLNPDNSDVDKLFIQLVQTYNQLFEENPINASGVDAKAILSARLSKSRRLENLIAQLPGEKKNGLFGNLIALSLGLTPNFKSNFDLAEDAKLQLSKDTYDDDLDNLLAQIGDQYADLFLAAKNLSDAILLSDILRVNTEITKAPLSASMIKRYDEHHQDLTLLKALVRQQLPEKYKEIFFDQSKNGYAGYIDGGASQEEFYKFIKPILEKMDGTEELLVKLNREDLLRKQRTFDNGSIPHQIHLGELHAILRRQEDFYPFLKDNREKIEKILTFRIPYYVGPLARGNSRFAWMTRKSEETITPWNFEEVVDKGASAQSFIERMTNFDKNLPNEKVLPKHSLLYEYFTVYNELTKVKYVTEGMRKPAFLSGEQKKAIVDLLFKTNRKVTVKQLKEDYFKKIECFDSVEISGVEDRFNASLGTYHDLLKIIKDKDFLDNEENEDILEDIVLTLTLFEDREMIEERLKTYAHLFDDKVMKQLKRRRYTGWGRLSRKLINGIRDKQSGKTILDFLKSDGFANRNFMQLIHDDSLTFKEDIQKAQVSGQGDSLHEHIANLAGSPAIKKGILQTVKVVDELVKVMGRHKPENIVIEMARENQTTQKGQKNSRERMKRIEEGIKELGSQILKEHPVENTQLQNEKLYLYYLQNGRDMYVDQELDINRLSDYDVDHIVPQSFLKDDSIDNKVLTRSDKARGKSDNVPSEEVVKKMKNYWRQLLNAKLITQRKFDNLTKAERGGLSELDKAGFIKRQLVETRQITKHVAQILDSRMNTKYDENDKLIREVKVITLKSKLVSDFRKDFQFYKVREINNYHHAHDAYLNAVVGTALIKKYPKLESEFVYGDYKVYDVRKMIAKSEQEIGKATAKYFFYSNIMNFFKTEITLANGEIRKRPLIETNGETGEIVWDKGRDFATVRKVLSMPQVNIVKKTEVQTGGFSKESILPKRNSDKLIARKKDWDPKKYGGFDSPTVAYSVLVVAKVEKGKSKKLKSVKELLGITIMERSSFEKNPIDFLEAKGYKEVKKDLIIKLPKYSLFELENGRKRMLASAGELQKGNELALPSKYVNFLYLASHYEKLKGSPEDNEQKQLFVEQHKHYLDEIIEQISEFSKRVILADANLDKVLSAYNKHRDKPIREQAENIIHLFTLTNLGAPAAFKYFDTTIDRKRYTSTKEVLDATLIHQSITGLYETRIDLSQLGGDGGGGSGSSEAAAKGGTVSLQDEHRLFDIPVTTSLPDVWLQDFPQAWAETGGLGRAKCQAPIIIDLKPTAVPVSIKQYPMSLEAHMGIRQHIIKFLELGVLRPCRSPWNTPLLPVKKPGTQDYRPVQDLREINKRTVDIHPTVPNPYNLLSTLKPDYSWYTVLDLKDAFFCLPLAPQSQELFAFEWKDPERGISGQLTWTRLPQGFKNSPTLFNEALHRDLTDFRTQHPEVTLLQYVDDLLLAAPTKKACTQGTRHLLQELGEKGYRASAKKAQICQTKVTYLGYILSEGKRWLTPGRIETVARIPPPRNPREVREFLGTAGFCRLWIPGFAELAAPLYALTKPSTPFTWQTEHQLAFEALKKALLSAPALGLPDTSKPFTLFLDERQGIAKGVLTQKLGPWKRPVAYLSKKLDPVAAGWPPCLRIMAATAMLVKDSAKLTLGQPLTVITPHTLEAIVRQPPDRWITNARLTHYQALLLDTDRVQFGPPVTLNPATLLPVPENQPSPHDCRQVLAETHGTREDLKDQELPDADHTWYTDGSSYLDSGTRRAGAAVVDGHNTIWAQSLPPGTSAQKAELIALTKALELSKGKKANIYTDSRYAFATAHTHGSIYERRGWLTSEGKEIKNKAEIIALLKALFLPQEVAIIHCPGHQKGQDPVAVGNRQADRVARQAAMAEVLTLATEPDNTSHITAGKRTADGSEFEKRTADGSEFESPKKKAKVE

SEQ ID NO: 1550 - protein, 2100 aa, synthetic construct
MPAAKRVKLDGGDKKYSIGLDIGTNSVGWAVITDEYKVPSKKFKVLGNTDRHSIKKNLIGALLFDSGETAEATRLKRTARRRYTRRKNRICYLQEIFSNEMAKVDDSFFHRLEESFLVEEDKKHERHPIFGNIVDEVAYHEKYPTIYHLRKKLVDSTDKADLRLIYLALAHMIKFRGHFLIEGDLNPDNSDVDKLFIQLVQTYNQLFEENPINASGVDAKAILSARLSKSRRLENLIAQLPGEKKNGLFGNLIALSLGLTPNFKSNFDLAEDAKLQLSKDTYDDDLDNLLAQIGDQYADLFLAAKNLSDAILLSDILRVNTEITKAPLSASMIKRYDEHHQDLTLLKALVRQQLPEKYKEIFFDQSKNGYAGYIDGGASQEEFYKFIKPILEKMDGTEELLVKLNREDLLRKQRTFDNGSIPHQIHLGELHAILRRQEDFYPFLKDNREKIEKILTFRIPYYVGPLARGNSRFAWMTRKSEETITPWNFEEVVDKGASAQSFIERMTNFDKNLPNEKVLPKHSLLYEYFTVYNELTKVKYVTEGMRKPAFLSGEQKKAIVDLLFKTNRKVTVKQLKEDYFKKIECFDSVEISGVEDRFNASLGTYHDLLKIIKDKDFLDNEENEDILEDIVLTLTLFEDREMIEERLKTYAHLFDDKVMKQLKRRRYTGWGRLSRKLINGIRDKQSGKTILDFLKSDGFANRNFMQLIHDDSLTFKEDIQKAQVSGQGDSLHEHIANLAGSPAIKKGILQTVKVVDELVKVMGRHKPENIVIEMARENQTTQKGQKNSRERMKRIEEGIKELGSQILKEHPVENTQLQNEKLYLYYLQNGRDMYVDQELDINRLSDYDVDHIVPQSFLKDDSIDNKVLTRSDKARGKSDNVPSEEVVKKMKNYWRQLLNAKLITQRKFDNLTKAERGGLSELDKAGFIKRQLVETRQITKHVAQILDSRMNTKYDENDKLIREVKVITLKSKLVSDFRKDFQFYKVREINNYHHAHDAYLNAVVGTALIKKYPKLESEFVYGDYKVYDVRKMIAKSEQEIGKATAKYFFYSNIMNFFKTEITLANGEIRKRPLIETNGETGEIVWDKGRDFATVRKVLSMPQVNIVKKTEVQTGGFSKESILPKRNSDKLIARKKDWDPKKYGGFDSPTVAYSVLVVAKVEKGKSKKLKSVKELLGITIMERSSFEKNPIDFLEAKGYKEVKKDLIIKLPKYSLFELENGRKRMLASAGELQKGNELALPSKYVNFLYLASHYEKLKGSPEDNEQKQLFVEQHKHYLDEIIEQISEFSKRVILADANLDKVLSAYNKHRDKPIREQAENIIHLFTLTNLGAPAAFKYFDTTIDRKRYTSTKEVLDATLIHQSITGLYETRIDLSQLGGDGGGGSGSSGGGGGTVSLQDEHRLFDIPVTTSLPDVWLQDFPQAWAETGGLGRAKCQAPIIIDLKPTAVPVSIKQYPMSLEAHMGIRQHIIKFLELGVLRPCRSPWNTPLLPVKKPGTQDYRPVQDLREINKRTVDIHPTVPNPYNLLSTLKPDYSWYTVLDLKDAFFCLPLAPQSQELFAFEWKDPERGISGQLTWTRLPQGFKNSPTLFNEALHRDLTDFRTQHPEVTLLQYVDDLLLAAPTKKACTQGTRHLLQELGEKGYRASAKKAQICQTKVTYLGYILSEGKRWLTPGRIETVARIPPPRNPREVREFLGTAGFCRLWIPGFAELAAPLYALTKPSTPFTWQTEHQLAFEALKKALLSAPALGLPDTSKPFTLFLDERQGIAKGVLTQKLGPWKRPVAYLSKKLDPVAAGWPPCLRIMAATAMLVKDSAKLTLGQPLTVITPHTLEAIVRQPPDRWITNARLTHYQALLLDTDRVQFGPPVTLNPATLLPVPENQPSPHDCRQVLAETHGTREDLKDQELPDADHTWYTDGSSYLDSGTRRAGAAVVDGHNTIWAQSLPPGTSAQKAELIALTKALELSKGKKANIYTDSRYAFATAHTHGSIYERRGWLTSEGKEIKNKAEIIALLKALFLPQEVAIIHCPGHQKGQDPVAVGNRQADRVARQAAMAEVLTLATEPDNTSHITAGKRTADGSEFEKRTADGSEFESPKKKAKVE

SEQ ID NO: 1551 - protein, 2100 aa, synthetic construct
MPAAKRVKLDGGDKKYSIGLDIGTNSVGWAVITDEYKVPSKKFKVLGNTDRHSIKKNLIGALLFDSGETAEATRLKRTARRRYTRRKNRICYLQEIFSNEMAKVDDSFFHRLEESFLVEEDKKHERHPIFGNIVDEVAYHEKYPTIYHLRKKLVDSTDKADLRLIYLALAHMIKFRGHFLIEGDLNPDNSDVDKLFIQLVQTYNQLFEENPINASGVDAKAILSARLSKSRRLENLIAQLPGEKKNGLFGNLIALSLGLTPNFKSNFDLAEDAKLQLSKDTYDDDLDNLLAQIGDQYADLFLAAKNLSDAILLSDILRVNTEITKAPLSASMIKRYDEHHQDLTLLKALVRQQLPEKYKEIFFDQSKNGYAGYIDGGASQEEFYKFIKPILEKMDGTEELLVKLNREDLLRKQRTFDNGSIPHQIHLGELHAILRRQEDFYPFLKDNREKIEKILTFRIPYYVGPLARGNSRFAWMTRKSEETITPWNFEEVVDKGASAQSFIERMTNFDKNLPNEKVLPKHSLLYEYFTVYNELTKVKYVTEGMRKPAFLSGEQKKAIVDLLFKTNRKVTVKQLKEDYFKKIECFDSVEISGVEDRFNASLGTYHDLLKIIKDKDFLDNEENEDILEDIVLTLTLFEDREMIEERLKTYAHLFDDKVMKQLKRRRYTGWGRLSRKLINGIRDKQSGKTILDFLKSDGFANRNFMQLIHDDSLTFKEDIQKAQVSGQGDSLHEHIANLAGSPAIKKGILQTVKVVDELVKVMGRHKPENIVIEMARENQTTQKGQKNSRERMKRIEEGIKELGSQILKEHPVENTQLQNEKLYLYYLQNGRDMYVDQELDINRLSDYDVDHIVPQSFLKDDSIDNKVLTRSDKARGKSDNVPSEEVVKKMKNYWRQLLNAKLITQRKFDNLTKAERGGLSELDKAGFIKRQLVETRQITKHVAQILDSRMNTKYDENDKLIREVKVITLKSKLVSDFRKDFQFYKVREINNYHHAHDAYLNAVVGTALIKKYPKLESEFVYGDYKVYDVRKMIAKSEQEIGKATAKYFFYSNIMNFFKTEITLANGEIRKRPLIETNGETGEIVWDKGRDFATVRKVLSMPQVNIVKKTEVQTGGFSKESILPKRNSDKLIARKKDWDPKKYGGFDSPTVAYSVLVVAKVEKGKSKKLKSVKELLGITIMERSSFEKNPIDFLEAKGYKEVKKDLIIKLPKYSLFELENGRKRMLASAGELQKGNELALPSKYVNFLYLASHYEKLKGSPEDNEQKQLFVEQHKHYLDEIIEQISEFSKRVILADANLDKVLSAYNKHRDKPIREQAENIIHLFTLTNLGAPAAFKYFDTTIDRKRYTSTKEVLDATLIHQSITGLYETRIDLSQLGGDGGGGSGSSPAPGGTVSLQDEHRLFDIPVTTSLPDVWLQDFPQAWAETGGLGRAKCQAPIIIDLKPTAVPVSIKQYPMSLEAHMGIRQHIIKFLELGVLRPCRSPWNTPLLPVKKPGTQDYRPVQDLREINKRTVDIHPTVPNPYNLLSTLKPDYSWYTVLDLKDAFFCLPLAPQSQELFAFEWKDPERGISGQLTWTRLPQGFKNSPTLFNEALHRDLTDFRTQHPEVTLLQYVDDLLLAAPTKKACTQGTRHLLQELGEKGYRASAKKAQICQTKVTYLGYILSEGKRWLTPGRIETVARIPPPRNPREVREFLGTAGFCRLWIPGFAELAAPLYALTKPSTPFTWQTEHQLAFEALKKALLSAPALGLPDTSKPFTLFLDERQGIAKGVLTQKLGPWKRPVAYLSKKLDPVAAGWPPCLRIMAATAMLVKDSAKLTLGQPLTVITPHTLEAIVRQPPDRWITNARLTHYQALLLDTDRVQFGPPVTLNPATLLPVPENQPSPHDCRQVLAETHGTREDLKDQELPDADHTWYTDGSSYLDSGTRRAGAAVVDGHNTIWAQSLPPGTSAQKAELIALTKALELSKGKKANIYTDSRYAFATAHTHGSIYERRGWLTSEGKEIKNKAEIIALLKALFLPQEVAIIHCPGHQKGQDPVAVGNRQADRVARQAAMAEVLTLATEPDNTSHITAGKRTADGSEFEKRTADGSEFESPKKKAKVE

SEQ ID NO: 1552 - protein, 2111 aa, synthetic construct
MPAAKRVKLDGGDKKYSIGLDIGTNSVGWAVITDEYKVPSKKFKVLGNTDRHSIKKNLIGALLFDSGETAEATRLKRTARRRYTRRKNRICYLQEIFSNEMAKVDDSFFHRLEESFLVEEDKKHERHPIFGNIVDEVAYHEKYPTIYHLRKKLVDSTDKADLRLIYLALAHMIKFRGHFLIEGDLNPDNSDVDKLFIQLVQTYNQLFEENPINASGVDAKAILSARLSKSRRLENLIAQLPGEKKNGLFGNLIALSLGLTPNFKSNFDLAEDAKLQLSKDTYDDDLDNLLAQIGDQYADLFLAAKNLSDAILLSDILRVNTEITKAPLSASMIKRYDEHHQDLTLLKALVRQQLPEKYKEIFFDQSKNGYAGYIDGGASQEEFYKFIKPILEKMDGTEELLVKLNREDLLRKQRTFDNGSIPHQIHLGELHAILRRQEDFYPFLKDNREKIEKILTFRIPYYVGPLARGNSRFAWMTRKSEETITPWNFEEVVDKGASAQSFIERMTNFDKNLPNEKVLPKHSLLYEYFTVYNELTKVKYVTEGMRKPAFLSGEQKKAIVDLLFKTNRKVTVKQLKEDYFKKIECFDSVEISGVEDRFNASLGTYHDLLKIIKDKDFLDNEENEDILEDIVLTLTLFEDREMIEERLKTYAHLFDDKVMKQLKRRRYTGWGRLSRKLINGIRDKQSGKTILDFLKSDGFANRNFMQLIHDDSLTFKEDIQKAQVSGQGDSLHEHIANLAGSPAIKKGILQTVKVVDELVKVMGRHKPENIVIEMARENQTTQKGQKNSRERMKRIEEGIKELGSQILKEHPVENTQLQNEKLYLYYLQNGRDMYVDQELDINRLSDYDVDHIVPQSFLKDDSIDNKVLTRSDKARGKSDNVPSEEVVKKMKNYWRQLLNAKLITQRKFDNLTKAERGGLSELDKAGFIKRQLVETRQITKHVAQILDSRMNTKYDENDKLIREVKVITLKSKLVSDFRKDFQFYKVREINNYHHAHDAYLNAVVGTALIKKYPKLESEFVYGDYKVYDVRKMIAKSEQEIGKATAKYFFYSNIMNFFKTEITLANGEIRKRPLIETNGETGEIVWDKGRDFATVRKVLSMPQVNIVKKTEVQTGGFSKESILPKRNSDKLIARKKDWDPKKYGGFDSPTVAYSVLVVAKVEKGKSKKLKSVKELLGITIMERSSFEKNPIDFLEAKGYKEVKKDLIIKLPKYSLFELENGRKRMLASAGELQKGNELALPSKYVNFLYLASHYEKLKGSPEDNEQKQLFVEQHKHYLDEIIEQISEFSKRVILADANLDKVLSAYNKHRDKPIREQAENIIHLFTLTNLGAPAAFKYFDTTIDRKRYTSTKEVLDATLIHQSITGLYETRIDLSQLGGDGGGGGGSGGGGSGGGGSGGGGSGGTVSLQDEHRLFDIPVTTSLPDVWLQDFPQAWAETGGLGRAKCQAPIIIDLKPTAVPVSIKQYPMSLEAHMGIRQHIIKFLELGVLRPCRSPWNTPLLPVKKPGTQDYRPVQDLREINKRTVDIHPTVPNPYNLLSTLKPDYSWYTVLDLKDAFFCLPLAPQSQELFAFEWKDPERGISGQLTWTRLPQGFKNSPTLFNEALHRDLTDFRTQHPEVTLLQYVDDLLLAAPTKKACTQGTRHLLQELGEKGYRASAKKAQICQTKVTYLGYILSEGKRWLTPGRIETVARIPPPRNPREVREFLGTAGFCRLWIPGFAELAAPLYALTKPSTPFTWQTEHQLAFEALKKALLSAPALGLPDTSKPFTLFLDERQGIAKGVLTQKLGPWKRPVAYLSKKLDPVAAGWPPCLRIMAATAMLVKDSAKLTLGQPLTVITPHTLEAIVRQPPDRWITNARLTHYQALLLDTDRVQFGPPVTLNPATLLPVPENQPSPHDCRQVLAETHGTREDLKDQELPDADHTWYTDGSSYLDSGTRRAGAAVVDGHNTIWAQSLPPGTSAQKAELIALTKALELSKGKKANIYTDSRYAFATAHTHGSIYERRGWLTSEGKEIKNKAEIIALLKALFLPQEVAIIHCPGHQKGQDPVAVGNRQADRVARQAAMAEVLTLATEPDNTSHITAGKRTADGSEFEKRTADGSEFESPKKKAKVE

SEQ ID NO: 1553 - protein, 2106 aa, synthetic construct
MPAAKRVKLDGGDKKYSIGLDIGTNSVGWAVITDEYKVPSKKFKVLGNTDRHSIKKNLIGALLFDSGETAEATRLKRTARRRYTRRKNRICYLQEIFSNEMAKVDDSFFHRLEESFLVEEDKKHERHPIFGNIVDEVAYHEKYPTIYHLRKKLVDSTDKADLRLIYLALAHMIKFRGHFLIEGDLNPDNSDVDKLFIQLVQTYNQLFEENPINASGVDAKAILSARLSKSRRLENLIAQLPGEKKNGLFGNLIALSLGLTPNFKSNFDLAEDAKLQLSKDTYDDDLDNLLAQIGDQYADLFLAAKNLSDAILLSDILRVNTEITKAPLSASMIKRYDEHHQDLTLLKALVRQQLPEKYKEIFFDQSKNGYAGYIDGGASQEEFYKFIKPILEKMDGTEELLVKLNREDLLRKQRTFDNGSIPHQIHLGELHAILRRQEDFYPFLKDNREKIEKILTFRIPYYVGPLARGNSRFAWMTRKSEETITPWNFEEVVDKGASAQSFIERMTNFDKNLPNEKVLPKHSLLYEYFTVYNELTKVKYVTEGMRKPAFLSGEQKKAIVDLLFKTNRKVTVKQLKEDYFKKIECFDSVEISGVEDRFNASLGTYHDLLKIIKDKDFLDNEENEDILEDIVLTLTLFEDREMIEERLKTYAHLFDDKVMKQLKRRRYTGWGRLSRKLINGIRDKQSGKTILDFLKSDGFANRNFMQLIHDDSLTFKEDIQKAQVSGQGDSLHEHIANLAGSPAIKKGILQTVKVVDELVKVMGRHKPENIVIEMARENQTTQKGQKNSRERMKRIEEGIKELGSQILKEHPVENTQLQNEKLYLYYLQNGRDMYVDQELDINRLSDYDVDHIVPQSFLKDDSIDNKVLTRSDKARGKSDNVPSEEVVKKMKNYWRQLLNAKLITQRKFDNLTKAERGGLSELDKAGFIKRQLVETRQITKHVAQILDSRMNTKYDENDKLIREVKVITLKSKLVSDFRKDFQFYKVREINNYHHAHDAYLNAVVGTALIKKYPKLESEFVYGDYKVYDVRKMIAKSEQEIGKATAKYFFYSNIMNFFKTEITLANGEIRKRPLIETNGETGEIVWDKGRDFATVRKVLSMPQVNIVKKTEVQTGGFSKESILPKRNSDKLIARKKDWDPKKYGGFDSPTVAYSVLVVAKVEKGKSKKLKSVKELLGITIMERSSFEKNPIDFLEAKGYKEVKKDLIIKLPKYSLFELENGRKRMLASAGELQKGNELALPSKYVNFLYLASHYEKLKGSPEDNEQKQLFVEQHKHYLDEIIEQISEFSKRVILADANLDKVLSAYNKHRDKPIREQAENIIHLFTLTNLGAPAAFKYFDTTIDRKRYTSTKEVLDATLIHQSITGLYETRIDLSQLGGDGGGSSGSSGSSGSSGSSGGTVSLQDEHRLFDIPVTTSLPDVWLQDFPQAWAETGGLGRAKCQAPIIIDLKPTAVPVSIKQYPMSLEAHMGIRQHIIKFLELGVLRPCRSPWNTPLLPVKKPGTQDYRPVQDLREINKRTVDIHPTVPNPYNLLSTLKPDYSWYTVLDLKDAFFCLPLAPQSQELFAFEWKDPERGISGQLTWTRLPQGFKNSPTLFNEALHRDLTDFRTQHPEVTLLQYVDDLLLAAPTKKACTQGTRHLLQELGEKGYRASAKKAQICQTKVTYLGYILSEGKRWLTPGRIETVARIPPPRNPREVREFLGTAGFCRLWIPGFAELAAPLYALTKPSTPFTWQTEHQLAFEALKKALLSAPALGLPDTSKPFTLFLDERQGIAKGVLTQKLGPWKRPVAYLSKKLDPVAAGWPPCLRIMAATAMLVKDSAKLTLGQPLTVITPHTLEAIVRQPPDRWITNARLTHYQALLLDTDRVQFGPPVTLNPATLLPVPENQPSPHDCRQVLAETHGTREDLKDQELPDADHTWYTDGSSYLDSGTRRAGAAVVDGHNTIWAQSLPPGTSAQKAELIALTKALELSKGKKANIYTDSRYAFATAHTHGSIYERRGWLTSEGKEIKNKAEIIALLKALFLPQEVAIIHCPGHQKGQDPVAVGNRQADRVARQAAMAEVLTLATEPDNTSHITAGKRTADGSEFEKRTADGSEFESPKKKAKVE

SEQ ID NO: 1554 - protein, 2097 aa, synthetic construct
MPAAKRVKLDGGDKKYSIGLDIGTNSVGWAVITDEYKVPSKKFKVLGNTDRHSIKKNLIGALLFDSGETAEATRLKRTARRRYTRRKNRICYLQEIFSNEMAKVDDSFFHRLEESFLVEEDKKHERHPIFGNIVDEVAYHEKYPTIYHLRKKLVDSTDKADLRLIYLALAHMIKFRGHFLIEGDLNPDNSDVDKLFIQLVQTYNQLFEENPINASGVDAKAILSARLSKSRRLENLIAQLPGEKKNGLFGNLIALSLGLTPNFKSNFDLAEDAKLQLSKDTYDDDLDNLLAQIGDQYADLFLAAKNLSDAILLSDILRVNTEITKAPLSASMIKRYDEHHQDLTLLKALVRQQLPEKYKEIFFDQSKNGYAGYIDGGASQEEFYKFIKPILEKMDGTEELLVKLNREDLLRKQRTFDNGSIPHQIHLGELHAILRRQEDFYPFLKDNREKIEKILTFRIPYYVGPLARGNSRFAWMTRKSEETITPWNFEEVVDKGASAQSFIERMTNFDKNLPNEKVLPKHSLLYEYFTVYNELTKVKYVTEGMRKPAFLSGEQKKAIVDLLFKTNRKVTVKQLKEDYFKKIECFDSVEISGVEDRFNASLGTYHDLLKIIKDKDFLDNEENEDILEDIVLTLTLFEDREMIEERLKTYAHLFDDKVMKQLKRRRYTGWGRLSRKLINGIRDKQSGKTILDFLKSDGFANRNFMQLIHDDSLTFKEDIQKAQVSGQGDSLHEHIANLAGSPAIKKGILQTVKVVDELVKVMGRHKPENIVIEMARENQTTQKGQKNSRERMKRIEEGIKELGSQILKEHPVENTQLQNEKLYLYYLQNGRDMYVDQELDINRLSDYDVDHIVPQSFLKDDSIDNKVLTRSDKARGKSDNVPSEEVVKKMKNYWRQLLNAKLITQRKFDNLTKAERGGLSELDKAGFIKRQLVETRQITKHVAQILDSRMNTKYDENDKLIREVKVITLKSKLVSDFRKDFQFYKVREINNYHHAHDAYLNAVVGTALIKKYPKLESEFVYGDYKVYDVRKMIAKSEQEIGKATAKYFFYSNIMNFFKTEITLANGEIRKRPLIETNGETGEIVWDKGRDFATVRKVLSMPQVNIVKKTEVQTGGFSKESILPKRNSDKLIARKKDWDPKKYGGFDSPTVAYSVLVVAKVEKGKSKKLKSVKELLGITIMERSSFEKNPIDFLEAKGYKEVKKDLIIKLPKYSLFELENGRKRMLASAGELQKGNELALPSKYVNFLYLASHYEKLKGSPEDNEQKQLFVEQHKHYLDEIIEQISEFSKRVILADANLDKVLSAYNKHRDKPIREQAENIIHLFTLTNLGAPAAFKYFDTTIDRKRYTSTKEVLDATLIHQSITGLYETRIDLSQLGGDGGPAPGGSGGTVSLQDEHRLFDIPVTTSLPDVWLQDFPQAWAETGGLGRAKCQAPIIIDLKPTAVPVSIKQYPMSLEAHMGIRQHIIKFLELGVLRPCRSPWNTPLLPVKKPGTQDYRPVQDLREINKRTVDIHPTVPNPYNLLSTLKPDYSWYTVLDLKDAFFCLPLAPQSQELFAFEWKDPERGISGQLTWTRLPQGFKNSPTLFNEALHRDLTDFRTQHPEVTLLQYVDDLLLAAPTKKACTQGTRHLLQELGEKGYRASAKKAQICQTKVTYLGYILSEGKRWLTPGRIETVARIPPPRNPREVREFLGTAGFCRLWIPGFAELAAPLYALTKPSTPFTWQTEHQLAFEALKKALLSAPALGLPDTSKPFTLFLDERQGIAKGVLTQKLGPWKRPVAYLSKKLDPVAAGWPPCLRIMAATAMLVKDSAKLTLGQPLTVITPHTLEAIVRQPPDRWITNARLTHYQALLLDTDRVQFGPPVTLNPATLLPVPENQPSPHDCRQVLAETHGTREDLKDQELPDADHTWYTDGSSYLDSGTRRAGAAVVDGHNTIWAQSLPPGTSAQKAELIALTKALELSKGKKANIYTDSRYAFATAHTHGSIYERRGWLTSEGKEIKNKAEIIALLKALFLPQEVAIIHCPGHQKGQDPVAVGNRQADRVARQAAMAEVLTLATEPDNTSHITAGKRTADGSEFEKRTADGSEFESPKKKAKVE

SEQ ID NO: 1555 - protein, 2102 aa, synthetic construct
MPAAKRVKLDGGDKKYSIGLDIGTNSVGWAVITDEYKVPSKKFKVLGNTDRHSIKKNLIGALLFDSGETAEATRLKRTARRRYTRRKNRICYLQEIFSNEMAKVDDSFFHRLEESFLVEEDKKHERHPIFGNIVDEVAYHEKYPTIYHLRKKLVDSTDKADLRLIYLALAHMIKFRGHFLIEGDLNPDNSDVDKLFIQLVQTYNQLFEENPINASGVDAKAILSARLSKSRRLENLIAQLPGEKKNGLFGNLIALSLGLTPNFKSNFDLAEDAKLQLSKDTYDDDLDNLLAQIGDQYADLFLAAKNLSDAILLSDILRVNTEITKAPLSASMIKRYDEHHQDLTLLKALVRQQLPEKYKEIFFDQSKNGYAGYIDGGASQEEFYKFIKPILEKMDGTEELLVKLNREDLLRKQRTFDNGSIPHQIHLGELHAILRRQEDFYPFLKDNREKIEKILTFRIPYYVGPLARGNSRFAWMTRKSEETITPWNFEEVVDKGASAQSFIERMTNFDKNLPNEKVLPKHSLLYEYFTVYNELTKVKYVTEGMRKPAFLSGEQKKAIVDLLFKTNRKVTVKQLKEDYFKKIECFDSVEISGVEDRFNASLGTYHDLLKIIKDKDFLDNEENEDILEDIVLTLTLFEDREMIEERLKTYAHLFDDKVMKQLKRRRYTGWGRLSRKLINGIRDKQSGKTILDFLKSDGFANRNFMQLIHDDSLTFKEDIQKAQVSGQGDSLHEHIANLAGSPAIKKGILQTVKVVDELVKVMGRHKPENIVIEMARENQTTQKGQKNSRERMKRIEEGIKELGSQILKEHPVENTQLQNEKLYLYYLQNGRDMYVDQELDINRLSDYDVDHIVPQSFLKDDSIDNKVLTRSDKARGKSDNVPSEEVVKKMKNYWRQLLNAKLITQRKFDNLTKAERGGLSELDKAGFIKRQLVETRQITKHVAQILDSRMNTKYDENDKLIREVKVITLKSKLVSDFRKDFQFYKVREINNYHHAHDAYLNAVVGTALIKKYPKLESEFVYGDYKVYDVRKMIAKSEQEIGKATAKYFFYSNIMNFFKTEITLANGEIRKRPLIETNGETGEIVWDKGRDFATVRKVLSMPQVNIVKKTEVQTGGFSKESILPKRNSDKLIARKKDWDPKKYGGFDSPTVAYSVLVVAKVEKGKSKKLKSVKELLGITIMERSSFEKNPIDFLEAKGYKEVKKDLIIKLPKYSLFELENGRKRMLASAGELQKGNELALPSKYVNFLYLASHYEKLKGSPEDNEQKQLFVEQHKHYLDEIIEQISEFSKRVILADANLDKVLSAYNKHRDKPIREQAENIIHLFTLTNLGAPAAFKYFDTTIDRKRYTSTKEVLDATLIHQSITGLYETRIDLSQLGGDGGPAPGGSEAAAKGGTVSLQDEHRLFDIPVTTSLPDVWLQDFPQAWAETGGLGRAKCQAPIIIDLKPTAVPVSIKQYPMSLEAHMGIRQHIIKFLELGVLRPCRSPWNTPLLPVKKPGTQDYRPVQDLREINKRTVDIHPTVPNPYNLLSTLKPDYSWYTVLDLKDAFFCLPLAPQSQELFAFEWKDPERGISGQLTWTRLPQGFKNSPTLFNEALHRDLTDFRTQHPEVTLLQYVDDLLLAAPTKKACTQGTRHLLQELGEKGYRASAKKAQICQTKVTYLGYILSEGKRWLTPGRIETVARIPPPRNPREVREFLGTAGFCRLWIPGFAELAAPLYALTKPSTPFTWQTEHQLAFEALKKALLSAPALGLPDTSKPFTLFLDERQGIAKGVLTQKLGPWKRPVAYLSKKLDPVAAGWPPCLRIMAATAMLVKDSAKLTLGQPLTVITPHTLEAIVRQPPDRWITNARLTHYQALLLDTDRVQFGPPVTLNPATLLPVPENQPSPHDCRQVLAETHGTREDLKDQELPDADHTWYTDGSSYLDSGTRRAGAAVVDGHNTIWAQSLPPGTSAQKAELIALTKALELSKGKKANIYTDSRYAFATAHTHGSIYERRGWLTSEGKEIKNKAEIIALLKALFLPQEVAIIHCPGHQKGQDPVAVGNRQADRVARQAAMAEVLTLATEPDNTSHITAGKRTADGSEFEKRTADGSEFESPKKKAKVE

SEQ ID NO: 1556 - protein, 2097 aa, synthetic construct
MPAAKRVKLDGGDKKYSIGLDIGTNSVGWAVITDEYKVPSKKFKVLGNTDRHSIKKNLIGALLFDSGETAEATRLKRTARRRYTRRKNRICYLQEIFSNEMAKVDDSFFHRLEESFLVEEDKKHERHPIFGNIVDEVAYHEKYPTIYHLRKKLVDSTDKADLRLIYLALAHMIKFRGHFLIEGDLNPDNSDVDKLFIQLVQTYNQLFEENPINASGVDAKAILSARLSKSRRLENLIAQLPGEKKNGLFGNLIALSLGLTPNFKSNFDLAEDAKLQLSKDTYDDDLDNLLAQIGDQYADLFLAAKNLSDAILLSDILRVNTEITKAPLSASMIKRYDEHHQDLTLLKALVRQQLPEKYKEIFFDQSKNGYAGYIDGGASQEEFYKFIKPILEKMDGTEELLVKLNREDLLRKQRTFDNGSIPHQIHLGELHAILRRQEDFYPFLKDNREKIEKILTFRIPYYVGPLARGNSRFAWMTRKSEETITPWNFEEVVDKGASAQSFIERMTNFDKNLPNEKVLPKHSLLYEYFTVYNELTKVKYVTEGMRKPAFLSGEQKKAIVDLLFKTNRKVTVKQLKEDYFKKIECFDSVEISGVEDRFNASLGTYHDLLKIIKDKDFLDNEENEDILEDIVLTLTLFEDREMIEERLKTYAHLFDDKVMKQLKRRRYTGWGRLSRKLINGIRDKQSGKTILDFLKSDGFANRNFMQLIHDDSLTFKEDIQKAQVSGQGDSLHEHIANLAGSPAIKKGILQTVKVVDELVKVMGRHKPENIVIEMARENQTTQKGQKNSRERMKRIEEGIKELGSQILKEHPVENTQLQNEKLYLYYLQNGRDMYVDQELDINRLSDYDVDHIVPQSFLKDDSIDNKVLTRSDKARGKSDNVPSEEVVKKMKNYWRQLLNAKLITQRKFDNLTKAERGGLSELDKAGFIKRQLVETRQITKHVAQILDSRMNTKYDENDKLIREVKVITLKSKLVSDFRKDFQFYKVREINNYHHAHDAYLNAVVGTALIKKYPKLESEFVYGDYKVYDVRKMIAKSEQEIGKATAKYFFYSNIMNFFKTEITLANGEIRKRPLIETNGETGEIVWDKGRDFATVRKVLSMPQVNIVKKTEVQTGGFSKESILPKRNSDKLIARKKDWDPKKYGGFDSPTVAYSVLVVAKVEKGKSKKLKSVKELLGITIMERSSFEKNPIDFLEAKGYKEVKKDLIIKLPKYSLFELENGRKRMLASAGELQKGNELALPSKYVNFLYLASHYEKLKGSPEDNEQKQLFVEQHKHYLDEIIEQISEFSKRVILADANLDKVLSAYNKHRDKPIREQAENIIHLFTLTNLGAPAAFKYFDTTIDRKRYTSTKEVLDATLIHQSITGLYETRIDLSQLGGDGGGGSGGSGGTVSLQDEHRLFDIPVTTSLPDVWLQDFPQAWAETGGLGRAKCQAPIIIDLKPTAVPVSIKQYPMSLEAHMGIRQHIIKFLELGVLRPCRSPWNTPLLPVKKPGTQDYRPVQDLREINKRTVDIHPTVPNPYNLLSTLKPDYSWYTVLDLKDAFFCLPLAPQSQELFAFEWKDPERGISGQLTWTRLPQGFKNSPTLFNEALHRDLTDFRTQHPEVTLLQYVDDLLLAAPTKKACTQGTRHLLQELGEKGYRASAKKAQICQTKVTYLGYILSEGKRWLTPGRIETVARIPPPRNPREVREFLGTAGFCRLWIPGFAELAAPLYALTKPSTPFTWQTEHQLAFEALKKALLSAPALGLPDTSKPFTLFLDERQGIAKGVLTQKLGPWKRPVAYLSKKLDPVAAGWPPCLRIMAATAMLVKDSAKLTLGQPLTVITPHTLEAIVRQPPDRWITNARLTHYQALLLDTDRVQFGPPVTLNPATLLPVPENQPSPHDCRQVLAETHGTREDLKDQELPDADHTWYTDGSSYLDSGTRRAGAAVVDGHNTIWAQSLPPGTSAQKAELIALTKALELSKGKKANIYTDSRYAFATAHTHGSIYERRGWLTSEGKEIKNKAEIIALLKALFLPQEVAIIHCPGHQKGQDPVAVGNRQADRVARQAAMAEVLTLATEPDNTSHITAGKRTADGSEFEKRTADGSEFESPKKKAKVE

SEQ ID NO: 1557 - protein, 2099 aa, synthetic construct
MPAAKRVKLDGGDKKYSIGLDIGTNSVGWAVITDEYKVPSKKFKVLGNTDRHSIKKNLIGALLFDSGETAEATRLKRTARRRYTRRKNRICYLQEIFSNEMAKVDDSFFHRLEESFLVEEDKKHERHPIFGNIVDEVAYHEKYPTIYHLRKKLVDSTDKADLRLIYLALAHMIKFRGHFLIEGDLNPDNSDVDKLFIQLVQTYNQLFEENPINASGVDAKAILSARLSKSRRLENLIAQLPGEKKNGLFGNLIALSLGLTPNFKSNFDLAEDAKLQLSKDTYDDDLDNLLAQIGDQYADLFLAAKNLSDAILLSDILRVNTEITKAPLSASMIKRYDEHHQDLTLLKALVRQQLPEKYKEIFFDQSKNGYAGYIDGGASQEEFYKFIKPILEKMDGTEELLVKLNREDLLRKQRTFDNGSIPHQIHLGELHAILRRQEDFYPFLKDNREKIEKILTFRIPYYVGPLARGNSRFAWMTRKSEETITPWNFEEVVDKGASAQSFIERMTNFDKNLPNEKVLPKHSLLYEYFTVYNELTKVKYVTEGMRKPAFLSGEQKKAIVDLLFKTNRKVTVKQLKEDYFKKIECFDSVEISGVEDRFNASLGTYHDLLKIIKDKDFLDNEENEDILEDIVLTLTLFEDREMIEERLKTYAHLFDDKVMKQLKRRRYTGWGRLSRKLINGIRDKQSGKTILDFLKSDGFANRNFMQLIHDDSLTFKEDIQKAQVSGQGDSLHEHIANLAGSPAIKKGILQTVKVVDELVKVMGRHKPENIVIEMARENQTTQKGQKNSRERMKRIEEGIKELGSQILKEHPVENTQLQNEKLYLYYLQNGRDMYVDQELDINRLSDYDVDHIVPQSFLKDDSIDNKVLTRSDKARGKSDNVPSEEVVKKMKNYWRQLLNAKLITQRKFDNLTKAERGGLSELDKAGFIKRQLVETRQITKHVAQILDSRMNTKYDENDKLIREVKVITLKSKLVSDFRKDFQFYKVREINNYHHAHDAYLNAVVGTALIKKYPKLESEFVYGDYKVYDVRKMIAKSEQEIGKATAKYFFYSNIMNFFKTEITLANGEIRKRPLIETNGETGEIVWDKGRDFATVRKVLSMPQVNIVKKTEVQTGGFSKESILPKRNSDKLIARKKDWDPKKYGGFDSPTVAYSVLVVAKVEKGKSKKLKSVKELLGITIMERSSFEKNPIDFLEAKGYKEVKKDLIIKLPKYSLFELENGRKRMLASAGELQKGNELALPSKYVNFLYLASHYEKLKGSPEDNEQKQLFVEQHKHYLDEIIEQISEFSKRVILADANLDKVLSAYNKHRDKPIREQAENIIHLFTLTNLGAPAAFKYFDTTIDRKRYTSTKEVLDATLIHQSITGLYETRIDLSQLGGDGGEAAAKGGSGGTVSLQDEHRLFDIPVTTSLPDVWLQDFPQAWAETGGLGRAKCQAPIIIDLKPTAVPVSIKQYPMSLEAHMGIRQHIIKFLELGVLRPCRSPWNTPLLPVKKPGTQDYRPVQDLREINKRTVDIHPTVPNPYNLLSTLKPDYSWYTVLDLKDAFFCLPLAPQSQELFAFEWKDPERGISGQLTWTRLPQGFKNSPTLFNEALHRDLTDFRTQHPEVTLLQYVDDLLLAAPTKKACTQGTRHLLQELGEKGYRASAKKAQICQTKVTYLGYILSEGKRWLTPGRIETVARIPPPRNPREVREFLGTAGFCRLWIPGFAELAAPLYALTKPSTPFTWQTEHQLAFEALKKALLSAPALGLPDTSKPFTLFLDERQGIAKGVLTQKLGPWKRPVAYLSKKLDPVAAGWPPCLRIMAATAMLVKDSAKLTLGQPLTVITPHTLEAIVRQPPDRWITNARLTHYQALLLDTDRVQFGPPVTLNPATLLPVPENQPSPHDCRQVLAETHGTREDLKDQELPDADHTWYTDGSSYLDSGTRRAGAAVVDGHNTIWAQSLPPGTSAQKAELIALTKALELSKGKKANIYTDSRYAFATAHTHGSIYERRGWLTSEGKEIKNKAEIIALLKALFLPQEVAIIHCPGHQKGQDPVAVGNRQADRVARQAAMAEVLTLATEPDNTSHITAGKRTADGSEFEKRTADGSEFESPKKKAKVE

SEQ ID NO: 1558 - protein, 2097 aa, synthetic construct
MPAAKRVKLDGGDKKYSIGLDIGTNSVGWAVITDEYKVPSKKFKVLGNTDRHSIKKNLIGALLFDSGETAEATRLKRTARRRYTRRKNRICYLQEIFSNEMAKVDDSFFHRLEESFLVEEDKKHERHPIFGNIVDEVAYHEKYPTIYHLRKKLVDSTDKADLRLIYLALAHMIKFRGHFLIEGDLNPDNSDVDKLFIQLVQTYNQLFEENPINASGVDAKAILSARLSKSRRLENLIAQLPGEKKNGLFGNLIALSLGLTPNFKSNFDLAEDAKLQLSKDTYDDDLDNLLAQIGDQYADLFLAAKNLSDAILLSDILRVNTEITKAPLSASMIKRYDEHHQDLTLLKALVRQQLPEKYKEIFFDQSKNGYAGYIDGGASQEEFYKFIKPILEKMDGTEELLVKLNREDLLRKQRTFDNGSIPHQIHLGELHAILRRQEDFYPFLKDNREKIEKILTFRIPYYVGPLARGNSRFAWMTRKSEETITPWNFEEVVDKGASAQSFIERMTNFDKNLPNEKVLPKHSLLYEYFTVYNELTKVKYVTEGMRKPAFLSGEQKKAIVDLLFKTNRKVTVKQLKEDYFKKIECFDSVEISGVEDRFNASLGTYHDLLKIIKDKDFLDNEENEDILEDIVLTLTLFEDREMIEERLKTYAHLFDDKVMKQLKRRRYTGWGRLSRKLINGIRDKQSGKTILDFLKSDGFANRNFMQLIHDDSLTFKEDIQKAQVSGQGDSLHEHIANLAGSPAIKKGILQTVKVVDELVKVMGRHKPENIVIEMARENQTTQKGQKNSRERMKRIEEGIKELGSQILKEHPVENTQLQNEKLYLYYLQNGRDMYVDQELDINRLSDYDVDHIVPQSFLKDDSIDNKVLTRSDKARGKSDNVPSEEVVKKMKNYWRQLLNAKLITQRKFDNLTKAERGGLSELDKAGFIKRQLVETRQITKHVAQILDSRMNTKYDENDKLIREVKVITLKSKLVSDFRKDFQFYKVREINNYHHAHDAYLNAVVGTALIKKYPKLESEFVYGDYKVYDVRKMIAKSEQEIGKATAKYFFYSNIMNFFKTEITLANGEIRKRPLIETNGETGEIVWDKGRDFATVRKVLSMPQVNIVKKTEVQTGGFSKESILPKRNSDKLIARKKDWDPKKYGGFDSPTVAYSVLVVAKVEKGKSKKLKSVKELLGITIMERSSFEKNPIDFLEAKGYKEVKKDLIIKLPKYSLFELENGRKRMLASAGELQKGNELALPSKYVNFLYLASHYEKLKGSPEDNEQKQLFVEQHKHYLDEIIEQISEFSKRVILADANLDKVLSAYNKHRDKPIREQAENIIHLFTLTNLGAPAAFKYFDTTIDRKRYTSTKEVLDATLIHQSITGLYETRIDLSQLGGDGGPAPGSSGGTVSLQDEHRLFDIPVTTSLPDVWLQDFPQAWAETGGLGRAKCQAPIIIDLKPTAVPVSIKQYPMSLEAHMGIRQHIIKFLELGVLRPCRSPWNTPLLPVKKPGTQDYRPVQDLREINKRTVDIHPTVPNPYNLLSTLKPDYSWYTVLDLKDAFFCLPLAPQSQELFAFEWKDPERGISGQLTWTRLPQGFKNSPTLFNEALHRDLTDFRTQHPEVTLLQYVDDLLLAAPTKKACTQGTRHLLQELGEKGYRASAKKAQICQTKVTYLGYILSEGKRWLTPGRIETVARIPPPRNPREVREFLGTAGFCRLWIPGFAELAAPLYALTKPSTPFTWQTEHQLAFEALKKALLSAPALGLPDTSKPFTLFLDERQGIAKGVLTQKLGPWKRPVAYLSKKLDPVAAGWPPCLRIMAATAMLVKDSAKLTLGQPLTVITPHTLEAIVRQPPDRWITNARLTHYQALLLDTDRVQFGPPVTLNPATLLPVPENQPSPHDCRQVLAETHGTREDLKDQELPDADHTWYTDGSSYLDSGTRRAGAAVVDGHNTIWAQSLPPGTSAQKAELIALTKALELSKGKKANIYTDSRYAFATAHTHGSIYERRGWLTSEGKEIKNKAEIIALLKALFLPQEVAIIHCPGHQKGQDPVAVGNRQADRVARQAAMAEVLTLATEPDNTSHITAGKRTADGSEFEKRTADGSEFESPKKKAKVE

SEQ ID NO: 1559 - protein, 2096 aa, synthetic construct
MPAAKRVKLDGGDKKYSIGLDIGTNSVGWAVITDEYKVPSKKFKVLGNTDRHSIKKNLIGALLFDSGETAEATRLKRTARRRYTRRKNRICYLQEIFSNEMAKVDDSFFHRLEESFLVEEDKKHERHPIFGNIVDEVAYHEKYPTIYHLRKKLVDSTDKADLRLIYLALAHMIKFRGHFLIEGDLNPDNSDVDKLFIQLVQTYNQLFEENPINASGVDAKAILSARLSKSRRLENLIAQLPGEKKNGLFGNLIALSLGLTPNFKSNFDLAEDAKLQLSKDTYDDDLDNLLAQIGDQYADLFLAAKNLSDAILLSDILRVNTEITKAPLSASMIKRYDEHHQDLTLLKALVRQQLPEKYKEIFFDQSKNGYAGYIDGGASQEEFYKFIKPILEKMDGTEELLVKLNREDLLRKQRTFDNGSIPHQIHLGELHAILRRQEDFYPFLKDNREKIEKILTFRIPYYVGPLARGNSRFAWMTRKSEETITPWNFEEVVDKGASAQSFIERMTNFDKNLPNEKVLPKHSLLYEYFTVYNELTKVKYVTEGMRKPAFLSGEQKKAIVDLLFKTNRKVTVKQLKEDYFKKIECFDSVEISGVEDRFNASLGTYHDLLKIIKDKDFLDNEENEDILEDIVLTLTLFEDREMIEERLKTYAHLFDDKVMKQLKRRRYTGWGRLSRKLINGIRDKQSGKTILDFLKSDGFANRNFMQLIHDDSLTFKEDIQKAQVSGQGDSLHEHIANLAGSPAIKKGILQTVKVVDELVKVMGRHKPENIVIEMARENQTTQKGQKNSRERMKRIEEGIKELGSQILKEHPVENTQLQNEKLYLYYLQNGRDMYVDQELDINRLSDYDVDHIVPQSFLKDDSIDNKVLTRSDKARGKSDNVPSEEVVKKMKNYWRQLLNAKLITQRKFDNLTKAERGGLSELDKAGFIKRQLVETRQITKHVAQILDSRMNTKYDENDKLIREVKVITLKSKLVSDFRKDFQFYKVREINNYHHAHDAYLNAVVGTALIKKYPKLESEFVYGDYKVYDVRKMIAKSEQEIGKATAKYFFYSNIMNFFKTEITLANGEIRKRPLIETNGETGEIVWDKGRDFATVRKVLSMPQVNIVKKTEVQTGGFSKESILPKRNSDKLIARKKDWDPKKYGGFDSPTVAYSVLVVAKVEKGKSKKLKSVKELLGITIMERSSFEKNPIDFLEAKGYKEVKKDLIIKLPKYSLFELENGRKRMLASAGELQKGNELALPSKYVNFLYLASHYEKLKGSPEDNEQKQLFVEQHKHYLDEIIEQISEFSKRVILADANLDKVLSAYNKHRDKPIREQAENIIHLFTLTNLGAPAAFKYFDTTIDRKRYTSTKEVLDATLIHQSITGLYETRIDLSQLGGDGGGGGGSGGTVSLQDEHRLFDIPVTTSLPDVWLQDFPQAWAETGGLGRAKCQAPIIIDLKPTAVPVSIKQYPMSLEAHMGIRQHIIKFLELGVLRPCRSPWNTPLLPVKKPGTQDYRPVQDLREINKRTVDIHPTVPNPYNLLSTLKPDYSWYTVLDLKDAFFCLPLAPQSQELFAFEWKDPERGISGQLTWTRLPQGFKNSPTLFNEALHRDLTDFRTQHPEVTLLQYVDDLLLAAPTKKACTQGTRHLLQELGEKGYRASAKKAQICQTKVTYLGYILSEGKRWLTPGRIETVARIPPPRNPREVREFLGTAGFCRLWIPGFAELAAPLYALTKPSTPFTWQTEHQLAFEALKKALLSAPALGLPDTSKPFTLFLDERQGIAKGVLTQKLGPWKRPVAYLSKKLDPVAAGWPPCLRIMAATAMLVKDSAKLTLGQPLTVITPHTLEAIVRQPPDRWITNARLTHYQALLLDTDRVQFGPPVTLNPATLLPVPENQPSPHDCRQVLAETHGTREDLKDQELPDADHTWYTDGSSYLDSGTRRAGAAVVDGHNTIWAQSLPPGTSAQKAELIALTKALELSKGKKANIYTDSRYAFATAHTHGSIYERRGWLTSEGKEIKNKAEIIALLKALFLPQEVAIIHCPGHQKGQDPVAVGNRQADRVARQAAMAEVLTLATEPDNTSHITAGKRTADGSEFEKRTADGSEFESPKKKAKVE

SEQ ID NO: 1560 - protein, 2098 aa, synthetic construct
MPAAKRVKLDGGDKKYSIGLDIGTNSVGWAVITDEYKVPSKKFKVLGNTDRHSIKKNLIGALLFDSGETAEATRLKRTARRRYTRRKNRICYLQEIFSNEMAKVDDSFFHRLEESFLVEEDKKHERHPIFGNIVDEVAYHEKYPTIYHLRKKLVDSTDKADLRLIYLALAHMIKFRGHFLIEGDLNPDNSDVDKLFIQLVQTYNQLFEENPINASGVDAKAILSARLSKSRRLENLIAQLPGEKKNGLFGNLIALSLGLTPNFKSNFDLAEDAKLQLSKDTYDDDLDNLLAQIGDQYADLFLAAKNLSDAILLSDILRVNTEITKAPLSASMIKRYDEHHQDLTLLKALVRQQLPEKYKEIFFDQSKNGYAGYIDGGASQEEFYKFIKPILEKMDGTEELLVKLNREDLLRKQRTFDNGSIPHQIHLGELHAILRRQEDFYPFLKDNREKIEKILTFRIPYYVGPLARGNSRFAWMTRKSEETITPWNFEEVVDKGASAQSFIERMTNFDKNLPNEKVLPKHSLLYEYFTVYNELTKVKYVTEGMRKPAFLSGEQKKAIVDLLFKTNRKVTVKQLKEDYFKKIECFDSVEISGVEDRFNASLGTYHDLLKIIKDKDFLDNEENEDILEDIVLTLTLFEDREMIEERLKTYAHLFDDKVMKQLKRRRYTGWGRLSRKLINGIRDKQSGKTILDFLKSDGFANRNFMQLIHDDSLTFKEDIQKAQVSGQGDSLHEHIANLAGSPAIKKGILQTVKVVDELVKVMGRHKPENIVIEMARENQTTQKGQKNSRERMKRIEEGIKELGSQILKEHPVENTQLQNEKLYLYYLQNGRDMYVDQELDINRLSDYDVDHIVPQSFLKDDSIDNKVLTRSDKARGKSDNVPSEEVVKKMKNYWRQLLNAKLITQRKFDNLTKAERGGLSELDKAGFIKRQLVETRQITKHVAQILDSRMNTKYDENDKLIREVKVITLKSKLVSDFRKDFQFYKVREINNYHHAHDAYLNAVVGTALIKKYPKLESEFVYGDYKVYDVRKMIAKSEQEIGKATAKYFFYSNIMNFFKTEITLANGEIRKRPLIETNGETGEIVWDKGRDFATVRKVLSMPQVNIVKKTEVQTGGFSKESILPKRNSDKLIARKKDWDPKKYGGFDSPTVAYSVLVVAKVEKGKSKKLKSVKELLGITIMERSSFEKNPIDFLEAKGYKEVKKDLIIKLPKYSLFELENGRKRMLASAGELQKGNELALPSKYVNFLYLASHYEKLKGSPEDNEQKQLFVEQHKHYLDEIIEQISEFSKRVILADANLDKVLSAYNKHRDKPIREQAENIIHLFTLTNLGAPAAFKYFDTTIDRKRYTSTKEVLDATLIHQSITGLYETRIDLSQLGGDGGGGGGGGGGGTVSLQDEHRLFDIPVTTSLPDVWLQDFPQAWAETGGLGRAKCQAPIIIDLKPTAVPVSIKQYPMSLEAHMGIRQHIIKFLELGVLRPCRSPWNTPLLPVKKPGTQDYRPVQDLREINKRTVDIHPTVPNPYNLLSTLKPDYSWYTVLDLKDAFFCLPLAPQSQELFAFEWKDPERGISGQLTWTRLPQGFKNSPTLFNEALHRDLTDFRTQHPEVTLLQYVDDLLLAAPTKKACTQGTRHLLQELGEKGYRASAKKAQICQTKVTYLGYILSEGKRWLTPGRIETVARIPPPRNPREVREFLGTAGFCRLWIPGFAELAAPLYALTKPSTPFTWQTEHQLAFEALKKALLSAPALGLPDTSKPFTLFLDERQGIAKGVLTQKLGPWKRPVAYLSKKLDPVAAGWPPCLRIMAATAMLVKDSAKLTLGQPLTVITPHTLEAIVRQPPDRWITNARLTHYQALLLDTDRVQFGPPVTLNPATLLPVPENQPSPHDCRQVLAETHGTREDLKDQELPDADHTWYTDGSSYLDSGTRRAGAAVVDGHNTIWAQSLPPGTSAQKAELIALTKALELSKGKKANIYTDSRYAFATAHTHGSIYERRGWLTSEGKEIKNKAEIIALLKALFLPQEVAIIHCPGHQKGQDPVAVGNRQADRVARQAAMAEVLTLATEPDNTSHITAGKRTADGSEFEKRTADGSEFESPKKKAKVE

SEQ ID NO: 1561 - protein, 2106 aa, synthetic construct
MPAAKRVKLDGGDKKYSIGLDIGTNSVGWAVITDEYKVPSKKFKVLGNTDRHSIKKNLIGALLFDSGETAEATRLKRTARRRYTRRKNRICYLQEIFSNEMAKVDDSFFHRLEESFLVEEDKKHERHPIFGNIVDEVAYHEKYPTIYHLRKKLVDSTDKADLRLIYLALAHMIKFRGHFLIEGDLNPDNSDVDKLFIQLVQTYNQLFEENPINASGVDAKAILSARLSKSRRLENLIAQLPGEKKNGLFGNLIALSLGLTPNFKSNFDLAEDAKLQLSKDTYDDDLDNLLAQIGDQYADLFLAAKNLSDAILLSDILRVNTEITKAPLSASMIKRYDEHHQDLTLLKALVRQQLPEKYKEIFFDQSKNGYAGYIDGGASQEEFYKFIKPILEKMDGTEELLVKLNREDLLRKQRTFDNGSIPHQIHLGELHAILRRQEDFYPFLKDNREKIEKILTFRIPYYVGPLARGNSRFAWMTRKSEETITPWNFEEVVDKGASAQSFIERMTNFDKNLPNEKVLPKHSLLYEYFTVYNELTKVKYVTEGMRKPAFLSGEQKKAIVDLLFKTNRKVTVKQLKEDYFKKIECFDSVEISGVEDRFNASLGTYHDLLKIIKDKDFLDNEENEDILEDIVLTLTLFEDREMIEERLKTYAHLFDDKVMKQLKRRRYTGWGRLSRKLINGIRDKQSGKTILDFLKSDGFANRNFMQLIHDDSLTFKEDIQKAQVSGQGDSLHEHIANLAGSPAIKKGILQTVKVVDELVKVMGRHKPENIVIEMARENQTTQKGQKNSRERMKRIEEGIKELGSQILKEHPVENTQLQNEKLYLYYLQNGRDMYVDQELDINRLSDYDVDHIVPQSFLKDDSIDNKVLTRSDKARGKSDNVPSEEVVKKMKNYWRQLLNAKLITQRKFDNLTKAERGGLSELDKAGFIKRQLVETRQITKHVAQILDSRMNTKYDENDKLIREVKVITLKSKLVSDFRKDFQFYKVREINNYHHAHDAYLNAVVGTALIKKYPKLESEFVYGDYKVYDVRKMIAKSEQEIGKATAKYFFYSNIMNFFKTEITLANGEIRKRPLIETNGETGEIVWDKGRDFATVRKVLSMPQVNIVKKTEVQTGGFSKESILPKRNSDKLIARKKDWDPKKYGGFDSPTVAYSVLVVAKVEKGKSKKLKSVKELLGITIMERSSFEKNPIDFLEAKGYKEVKKDLIIKLPKYSLFELENGRKRMLASAGELQKGNELALPSKYVNFLYLASHYEKLKGSPEDNEQKQLFVEQHKHYLDEIIEQISEFSKRVILADANLDKVLSAYNKHRDKPIREQAENIIHLFTLTNLGAPAAFKYFDTTIDRKRYTSTKEVLDATLIHQSITGLYETRIDLSQLGGDGGGGGGSEAAAKGGGGSGGTVSLQDEHRLFDIPVTTSLPDVWLQDFPQAWAETGGLGRAKCQAPIIIDLKPTAVPVSIKQYPMSLEAHMGIRQHIIKFLELGVLRPCRSPWNTPLLPVKKPGTQDYRPVQDLREINKRTVDIHPTVPNPYNLLSTLKPDYSWYTVLDLKDAFFCLPLAPQSQELFAFEWKDPERGISGQLTWTRLPQGFKNSPTLFNEALHRDLTDFRTQHPEVTLLQYVDDLLLAAPTKKACTQGTRHLLQELGEKGYRASAKKAQICQTKVTYLGYILSEGKRWLTPGRIETVARIPPPRNPREVREFLGTAGFCRLWIPGFAELAAPLYALTKPSTPFTWQTEHQLAFEALKKALLSAPALGLPDTSKPFTLFLDERQGIAKGVLTQKLGPWKRPVAYLSKKLDPVAAGWPPCLRIMAATAMLVKDSAKLTLGQPLTVITPHTLEAIVRQPPDRWITNARLTHYQALLLDTDRVQFGPPVTLNPATLLPVPENQPSPHDCRQVLAETHGTREDLKDQELPDADHTWYTDGSSYLDSGTRRAGAAVVDGHNTIWAQSLPPGTSAQKAELIALTKALELSKGKKANIYTDSRYAFATAHTHGSIYERRGWLTSEGKEIKNKAEIIALLKALFLPQEVAIIHCPGHQKGQDPVAVGNRQADRVARQAAMAEVLTLATEPDNTSHITAGKRTADGSEFEKRTADGSEFESPKKKAKVE

SEQ ID NO: 1562 - protein, 2111 aa, synthetic construct
MPAAKRVKLDGGDKKYSIGLDIGTNSVGWAVITDEYKVPSKKFKVLGNTDRHSIKKNLIGALLFDSGETAEATRLKRTARRRYTRRKNRICYLQEIFSNEMAKVDDSFFHRLEESFLVEEDKKHERHPIFGNIVDEVAYHEKYPTIYHLRKKLVDSTDKADLRLIYLALAHMIKFRGHFLIEGDLNPDNSDVDKLFIQLVQTYNQLFEENPINASGVDAKAILSARLSKSRRLENLIAQLPGEKKNGLFGNLIALSLGLTPNFKSNFDLAEDAKLQLSKDTYDDDLDNLLAQIGDQYADLFLAAKNLSDAILLSDILRVNTEITKAPLSASMIKRYDEHHQDLTLLKALVRQQLPEKYKEIFFDQSKNGYAGYIDGGASQEEFYKFIKPILEKMDGTEELLVKLNREDLLRKQRTFDNGSIPHQIHLGELHAILRRQEDFYPFLKDNREKIEKILTFRIPYYVGPLARGNSRFAWMTRKSEETITPWNFEEVVDKGASAQSFIERMTNFDKNLPNEKVLPKHSLLYEYFTVYNELTKVKYVTEGMRKPAFLSGEQKKAIVDLLFKTNRKVTVKQLKEDYFKKIECFDSVEISGVEDRFNASLGTYHDLLKIIKDKDFLDNEENEDILEDIVLTLTLFEDREMIEERLKTYAHLFDDKVMKQLKRRRYTGWGRLSRKLINGIRDKQSGKTILDFLKSDGFANRNFMQLIHDDSLTFKEDIQKAQVSGQGDSLHEHIANLAGSPAIKKGILQTVKVVDELVKVMGRHKPENIVIEMARENQTTQKGQKNSRERMKRIEEGIKELGSQILKEHPVENTQLQNEKLYLYYLQNGRDMYVDQELDINRLSDYDVDHIVPQSFLKDDSIDNKVLTRSDKARGKSDNVPSEEVVKKMKNYWRQLLNAKLITQRKFDNLTKAERGGLSELDKAGFIKRQLVETRQITKHVAQILDSRMNTKYDENDKLIREVKVITLKSKLVSDFRKDFQFYKVREINNYHHAHDAYLNAVVGTALIKKYPKLESEFVYGDYKVYDVRKMIAKSEQEIGKATAKYFFYSNIMNFFKTEITLANGEIRKRPLIETNGETGEIVWDKGRDFATVRKVLSMPQVNIVKKTEVQTGGFSKESILPKRNSDKLIARKKDWDPKKYGGFDSPTVAYSVLVVAKVEKGKSKKLKSVKELLGITIMERSSFEKNPIDFLEAKGYKEVKKDLIIKLPKYSLFELENGRKRMLASAGELQKGNELALPSKYVNFLYLASHYEKLKGSPEDNEQKQLFVEQHKHYLDEIIEQISEFSKRVILADANLDKVLSAYNKHRDKPIREQAENIIHLFTLTNLGAPAAFKYFDTTIDRKRYTSTKEVLDATLIHQSITGLYETRIDLSQLGGDGGEAAAKEAAAKEAAAKEAAAKGGTVSLQDEHRLFDIPVTTSLPDVWLQDFPQAWAETGGLGRAKCQAPIIIDLKPTAVPVSIKQYPMSLEAHMGIRQHIIKFLELGVLRPCRSPWNTPLLPVKKPGTQDYRPVQDLREINKRTVDIHPTVPNPYNLLSTLKPDYSWYTVLDLKDAFFCLPLAPQSQELFAFEWKDPERGISGQLTWTRLPQGFKNSPTLFNEALHRDLTDFRTQHPEVTLLQYVDDLLLAAPTKKACTQGTRHLLQELGEKGYRASAKKAQICQTKVTYLGYILSEGKRWLTPGRIETVARIPPPRNPREVREFLGTAGFCRLWIPGFAELAAPLYALTKPSTPFTWQTEHQLAFEALKKALLSAPALGLPDTSKPFTLFLDERQGIAKGVLTQKLGPWKRPVAYLSKKLDPVAAGWPPCLRIMAATAMLVKDSAKLTLGQPLTVITPHTLEAIVRQPPDRWITNARLTHYQALLLDTDRVQFGPPVTLNPATLLPVPENQPSPHDCRQVLAETHGTREDLKDQELPDADHTWYTDGSSYLDSGTRRAGAAVVDGHNTIWAQSLPPGTSAQKAELIALTKALELSKGKKANIYTDSRYAFATAHTHGSIYERRGWLTSEGKEIKNKAEIIALLKALFLPQEVAIIHCPGHQKGQDPVAVGNRQADRVARQAAMAEVLTLATEPDNTSHITAGKRTADGSEFEKRTADGSEFESPKKKAKVE

SEQ ID NO: 1563 - protein, 2102 aa, synthetic construct
MPAAKRVKLDGGDKKYSIGLDIGTNSVGWAVITDEYKVPSKKFKVLGNTDRHSIKKNLIGALLFDSGETAEATRLKRTARRRYTRRKNRICYLQEIFSNEMAKVDDSFFHRLEESFLVEEDKKHERHPIFGNIVDEVAYHEKYPTIYHLRKKLVDSTDKADLRLIYLALAHMIKFRGHFLIEGDLNPDNSDVDKLFIQLVQTYNQLFEENPINASGVDAKAILSARLSKSRRLENLIAQLPGEKKNGLFGNLIALSLGLTPNFKSNFDLAEDAKLQLSKDTYDDDLDNLLAQIGDQYADLFLAAKNLSDAILLSDILRVNTEITKAPLSASMIKRYDEHHQDLTLLKALVRQQLPEKYKEIFFDQSKNGYAGYIDGGASQEEFYKFIKPILEKMDGTEELLVKLNREDLLRKQRTFDNGSIPHQIHLGELHAILRRQEDFYPFLKDNREKIEKILTFRIPYYVGPLARGNSRFAWMTRKSEETITPWNFEEVVDKGASAQSFIERMTNFDKNLPNEKVLPKHSLLYEYFTVYNELTKVKYVTEGMRKPAFLSGEQKKAIVDLLFKTNRKVTVKQLKEDYFKKIECFDSVEISGVEDRFNASLGTYHDLLKIIKDKDFLDNEENEDILEDIVLTLTLFEDREMIEERLKTYAHLFDDKVMKQLKRRRYTGWGRLSRKLINGIRDKQSGKTILDFLKSDGFANRNFMQLIHDDSLTFKEDIQKAQVSGQGDSLHEHIANLAGSPAIKKGILQTVKVVDELVKVMGRHKPENIVIEMARENQTTQKGQKNSRERMKRIEEGIKELGSQILKEHPVENTQLQNEKLYLYYLQNGRDMYVDQELDINRLSDYDVDHIVPQSFLKDDSIDNKVLTRSDKARGKSDNVPSEEVVKKMKNYWRQLLNAKLITQRKFDNLTKAERGGLSELDKAGFIKRQLVETRQITKHVAQILDSRMNTKYDENDKLIREVKVITLKSKLVSDFRKDFQFYKVREINNYHHAHDAYLNAVVGTALIKKYPKLESEFVYGDYKVYDVRKMIAKSEQEIGKATAKYFFYSNIMNFFKTEITLANGEIRKRPLIETNGETGEIVWDKGRDFATVRKVLSMPQVNIVKKTEVQTGGFSKESILPKRNSDKLIARKKDWDPKKYGGFDSPTVAYSVLVVAKVEKGKSKKLKSVKELLGITIMERSSFEKNPIDFLEAKGYKEVKKDLIIKLPKYSLFELENGRKRMLASAGELQKGNELALPSKYVNFLYLASHYEKLKGSPEDNEQKQLFVEQHKHYLDEIIEQISEFSKRVILADANLDKVLSAYNKHRDKPIREQAENIIHLFTLTNLGAPAAFKYFDTTIDRKRYTSTKEVLDATLIHQSITGLYETRIDLSQLGGDGGGGSEAAAKPAPGGTVSLQDEHRLFDIPVTTSLPDVWLQDFPQAWAETGGLGRAKCQAPIIIDLKPTAVPVSIKQYPMSLEAHMGIRQHIIKFLELGVLRPCRSPWNTPLLPVKKPGTQDYRPVQDLREINKRTVDIHPTVPNPYNLLSTLKPDYSWYTVLDLKDAFFCLPLAPQSQELFAFEWKDPERGISGQLTWTRLPQGFKNSPTLFNEALHRDLTDFRTQHPEVTLLQYVDDLLLAAPTKKACTQGTRHLLQELGEKGYRASAKKAQICQTKVTYLGYILSEGKRWLTPGRIETVARIPPPRNPREVREFLGTAGFCRLWIPGFAELAAPLYALTKPSTPFTWQTEHQLAFEALKKALLSAPALGLPDTSKPFTLFLDERQGIAKGVLTQKLGPWKRPVAYLSKKLDPVAAGWPPCLRIMAATAMLVKDSAKLTLGQPLTVITPHTLEAIVRQPPDRWITNARLTHYQALLLDTDRVQFGPPVTLNPATLLPVPENQPSPHDCRQVLAETHGTREDLKDQELPDADHTWYTDGSSYLDSGTRRAGAAVVDGHNTIWAQSLPPGTSAQKAELIALTKALELSKGKKANIYTDSRYAFATAHTHGSIYERRGWLTSEGKEIKNKAEIIALLKALFLPQEVAIIHCPGHQKGQDPVAVGNRQADRVARQAAMAEVLTLATEPDNTSHITAGKRTADGSEFEKRTADGSEFESPKKKAKVE

SEQ ID NO: 1564 - protein, 2096 aa, synthetic construct
MPAAKRVKLDGGDKKYSIGLDIGTNSVGWAVITDEYKVPSKKFKVLGNTDRHSIKKNLIGALLFDSGETAEATRLKRTARRRYTRRKNRICYLQEIFSNEMAKVDDSFFHRLEESFLVEEDKKHERHPIFGNIVDEVAYHEKYPTIYHLRKKLVDSTDKADLRLIYLALAHMIKFRGHFLIEGDLNPDNSDVDKLFIQLVQTYNQLFEENPINASGVDAKAILSARLSKSRRLENLIAQLPGEKKNGLFGNLIALSLGLTPNFKSNFDLAEDAKLQLSKDTYDDDLDNLLAQIGDQYADLFLAAKNLSDAILLSDILRVNTEITKAPLSASMIKRYDEHHQDLTLLKALVRQQLPEKYKEIFFDQSKNGYAGYIDGGASQEEFYKFIKPILEKMDGTEELLVKLNREDLLRKQRTFDNGSIPHQIHLGELHAILRRQEDFYPFLKDNREKIEKILTFRIPYYVGPLARGNSRFAWMTRKSEETITPWNFEEVVDKGASAQSFIERMTNFDKNLPNEKVLPKHSLLYEYFTVYNELTKVKYVTEGMRKPAFLSGEQKKAIVDLLFKTNRKVTVKQLKEDYFKKIECFDSVEISGVEDRFNASLGTYHDLLKIIKDKDFLDNEENEDILEDIVLTLTLFEDREMIEERLKTYAHLFDDKVMKQLKRRRYTGWGRLSRKLINGIRDKQSGKTILDFLKSDGFANRNFMQLIHDDSLTFKEDIQKAQVSGQGDSLHEHIANLAGSPAIKKGILQTVKVVDELVKVMGRHKPENIVIEMARENQTTQKGQKNSRERMKRIEEGIKELGSQILKEHPVENTQLQNEKLYLYYLQNGRDMYVDQELDINRLSDYDVDHIVPQSFLKDDSIDNKVLTRSDKARGKSDNVPSEEVVKKMKNYWRQLLNAKLITQRKFDNLTKAERGGLSELDKAGFIKRQLVETRQITKHVAQILDSRMNTKYDENDKLIREVKVITLKSKLVSDFRKDFQFYKVREINNYHHAHDAYLNAVVGTALIKKYPKLESEFVYGDYKVYDVRKMIAKSEQEIGKATAKYFFYSNIMNFFKTEITLANGEIRKRPLIETNGETGEIVWDKGRDFATVRKVLSMPQVNIVKKTEVQTGGFSKESILPKRNSDKLIARKKDWDPKKYGGFDSPTVAYSVLVVAKVEKGKSKKLKSVKELLGITIMERSSFEKNPIDFLEAKGYKEVKKDLIIKLPKYSLFELENGRKRMLASAGELQKGNELALPSKYVNFLYLASHYEKLKGSPEDNEQKQLFVEQHKHYLDEIIEQISEFSKRVILADANLDKVLSAYNKHRDKPIREQAENIIHLFTLTNLGAPAAFKYFDTTIDRKRYTSTKEVLDATLIHQSITGLYETRIDLSQLGGDGGPAPAPGGTVSLQDEHRLFDIPVTTSLPDVWLQDFPQAWAETGGLGRAKCQAPIIIDLKPTAVPVSIKQYPMSLEAHMGIRQHIIKFLELGVLRPCRSPWNTPLLPVKKPGTQDYRPVQDLREINKRTVDIHPTVPNPYNLLSTLKPDYSWYTVLDLKDAFFCLPLAPQSQELFAFEWKDPERGISGQLTWTRLPQGFKNSPTLFNEALHRDLTDFRTQHPEVTLLQYVDDLLLAAPTKKACTQGTRHLLQELGEKGYRASAKKAQICQTKVTYLGYILSEGKRWLTPGRIETVARIPPPRNPREVREFLGTAGFCRLWIPGFAELAAPLYALTKPSTPFTWQTEHQLAFEALKKALLSAPALGLPDTSKPFTLFLDERQGIAKGVLTQKLGPWKRPVAYLSKKLDPVAAGWPPCLRIMAATAMLVKDSAKLTLGQPLTVITPHTLEAIVRQPPDRWITNARLTHYQALLLDTDRVQFGPPVTLNPATLLPVPENQPSPHDCRQVLAETHGTREDLKDQELPDADHTWYTDGSSYLDSGTRRAGAAVVDGHNTIWAQSLPPGTSAQKAELIALTKALELSKGKKANIYTDSRYAFATAHTHGSIYERRGWLTSEGKEIKNKAEIIALLKALFLPQEVAIIHCPGHQKGQDPVAVGNRQADRVARQAAMAEVLTLATEPDNTSHITAGKRTADGSEFEKRTADGSEFESPKKKAKVE

SEQ ID NO: 1565 - protein, 2097 aa, synthetic construct
MPAAKRVKLDGGDKKYSIGLDIGTNSVGWAVITDEYKVPSKKFKVLGNTDRHSIKKNLIGALLFDSGETAEATRLKRTARRRYTRRKNRICYLQEIFSNEMAKVDDSFFHRLEESFLVEEDKKHERHPIFGNIVDEVAYHEKYPTIYHLRKKLVDSTDKADLRLIYLALAHMIKFRGHFLIEGDLNPDNSDVDKLFIQLVQTYNQLFEENPINASGVDAKAILSARLSKSRRLENLIAQLPGEKKNGLFGNLIALSLGLTPNFKSNFDLAEDAKLQLSKDTYDDDLDNLLAQIGDQYADLFLAAKNLSDAILLSDILRVNTEITKAPLSASMIKRYDEHHQDLTLLKALVRQQLPEKYKEIFFDQSKNGYAGYIDGGASQEEFYKFIKPILEKMDGTEELLVKLNREDLLRKQRTFDNGSIPHQIHLGELHAILRRQEDFYPFLKDNREKIEKILTFRIPYYVGPLARGNSRFAWMTRKSEETITPWNFEEVVDKGASAQSFIERMTNFDKNLPNEKVLPKHSLLYEYFTVYNELTKVKYVTEGMRKPAFLSGEQKKAIVDLLFKTNRKVTVKQLKEDYFKKIECFDSVEISGVEDRFNASLGTYHDLLKIIKDKDFLDNEENEDILEDIVLTLTLFEDREMIEERLKTYAHLFDDKVMKQLKRRRYTGWGRLSRKLINGIRDKQSGKTILDFLKSDGFANRNFMQLIHDDSLTFKEDIQKAQVSGQGDSLHEHIANLAGSPAIKKGILQTVKVVDELVKVMGRHKPENIVIEMARENQTTQKGQKNSRERMKRIEEGIKELGSQILKEHPVENTQLQNEKLYLYYLQNGRDMYVDQELDINRLSDYDVDHIVPQSFLKDDSIDNKVLTRSDKARGKSDNVPSEEVVKKMKNYWRQLLNAKLITQRKFDNLTKAERGGLSELDKAGFIKRQLVETRQITKHVAQILDSRMNTKYDENDKLIREVKVITLKSKLVSDFRKDFQFYKVREINNYHHAHDAYLNAVVGTALIKKYPKLESEFVYGDYKVYDVRKMIAKSEQEIGKATAKYFFYSNIMNFFKTEITLANGEIRKRPLIETNGETGEIVWDKGRDFATVRKVLSMPQVNIVKKTEVQTGGFSKESILPKRNSDKLIARKKDWDPKKYGGFDSPTVAYSVLVVAKVEKGKSKKLKSVKELLGITIMERSSFEKNPIDFLEAKGYKEVKKDLIIKLPKYSLFELENGRKRMLASAGELQKGNELALPSKYVNFLYLASHYEKLKGSPEDNEQKQLFVEQHKHYLDEIIEQISEFSKRVILADANLDKVLSAYNKHRDKPIREQAENIIHLFTLTNLGAPAAFKYFDTTIDRKRYTSTKEVLDATLIHQSITGLYETRIDLSQLGGDGGGGGGSSGGTVSLQDEHRLFDIPVTTSLPDVWLQDFPQAWAETGGLGRAKCQAPIIIDLKPTAVPVSIKQYPMSLEAHMGIRQHIIKFLELGVLRPCRSPWNTPLLPVKKPGTQDYRPVQDLREINKRTVDIHPTVPNPYNLLSTLKPDYSWYTVLDLKDAFFCLPLAPQSQELFAFEWKDPERGISGQLTWTRLPQGFKNSPTLFNEALHRDLTDFRTQHPEVTLLQYVDDLLLAAPTKKACTQGTRHLLQELGEKGYRASAKKAQICQTKVTYLGYILSEGKRWLTPGRIETVARIPPPRNPREVREFLGTAGFCRLWIPGFAELAAPLYALTKPSTPFTWQTEHQLAFEALKKALLSAPALGLPDTSKPFTLFLDERQGIAKGVLTQKLGPWKRPVAYLSKKLDPVAAGWPPCLRIMAATAMLVKDSAKLTLGQPLTVITPHTLEAIVRQPPDRWITNARLTHYQALLLDTDRVQFGPPVTLNPATLLPVPENQPSPHDCRQVLAETHGTREDLKDQELPDADHTWYTDGSSYLDSGTRRAGAAVVDGHNTIWAQSLPPGTSAQKAELIALTKALELSKGKKANIYTDSRYAFATAHTHGSIYERRGWLTSEGKEIKNKAEIIALLKALFLPQEVAIIHCPGHQKGQDPVAVGNRQADRVARQAAMAEVLTLATEPDNTSHITAGKRTADGSEFEKRTADGSEFESPKKKAKVE

SEQ ID NO: 1566 - protein, 2099 aa, synthetic construct
MPAAKRVKLDGGDKKYSIGLDIGTNSVGWAVITDEYKVPSKKFKVLGNTDRHSIKKNLIGALLFDSGETAEATRLKRTARRRYTRRKNRICYLQEIFSNEMAKVDDSFFHRLEESFLVEEDKKHERHPIFGNIVDEVAYHEKYPTIYHLRKKLVDSTDKADLRLIYLALAHMIKFRGHFLIEGDLNPDNSDVDKLFIQLVQTYNQLFEENPINASGVDAKAILSARLSKSRRLENLIAQLPGEKKNGLFGNLIALSLGLTPNFKSNFDLAEDAKLQLSKDTYDDDLDNLLAQIGDQYADLFLAAKNLSDAILLSDILRVNTEITKAPLSASMIKRYDEHHQDLTLLKALVRQQLPEKYKEIFFDQSKNGYAGYIDGGASQEEFYKFIKPILEKMDGTEELLVKLNREDLLRKQRTFDNGSIPHQIHLGELHAILRRQEDFYPFLKDNREKIEKILTFRIPYYVGPLARGNSRFAWMTRKSEETITPWNFEEVVDKGASAQSFIERMTNFDKNLPNEKVLPKHSLLYEYFTVYNELTKVKYVTEGMRKPAFLSGEQKKAIVDLLFKTNRKVTVKQLKEDYFKKIECFDSVEISGVEDRFNASLGTYHDLLKIIKDKDFLDNEENEDILEDIVLTLTLFEDREMIEERLKTYAHLFDDKVMKQLKRRRYTGWGRLSRKLINGIRDKQSGKTILDFLKSDGFANRNFMQLIHDDSLTFKEDIQKAQVSGQGDSLHEHIANLAGSPAIKKGILQTVKVVDELVKVMGRHKPENIVIEMARENQTTQKGQKNSRERMKRIEEGIKELGSQILKEHPVENTQLQNEKLYLYYLQNGRDMYVDQELDINRLSDYDVDHIVPQSFLKDDSIDNKVLTRSDKARGKSDNVPSEEVVKKMKNYWRQLLNAKLITQRKFDNLTKAERGGLSELDKAGFIKRQLVETRQITKHVAQILDSRMNTKYDENDKLIREVKVITLKSKLVSDFRKDFQFYKVREINNYHHAHDAYLNAVVGTALIKKYPKLESEFVYGDYKVYDVRKMIAKSEQEIGKATAKYFFYSNIMNFFKTEITLANGEIRKRPLIETNGETGEIVWDKGRDFATVRKVLSMPQVNIVKKTEVQTGGFSKESILPKRNSDKLIARKKDWDPKKYGGFDSPTVAYSVLVVAKVEKGKSKKLKSVKELLGITIMERSSFEKNPIDFLEAKGYKEVKKDLIIKLPKYSLFELENGRKRMLASAGELQKGNELALPSKYVNFLYLASHYEKLKGSPEDNEQKQLFVEQHKHYLDEIIEQISEFSKRVILADANLDKVLSAYNKHRDKPIREQAENIIHLFTLTNLGAPAAFKYFDTTIDRKRYTSTKEVLDATLIHQSITGLYETRIDLSQLGGDGGGGGEAAAKGGTVSLQDEHRLFDIPVTTSLPDVWLQDFPQAWAETGGLGRAKCQAPIIIDLKPTAVPVSIKQYPMSLEAHMGIRQHIIKFLELGVLRPCRSPWNTPLLPVKKPGTQDYRPVQDLREINKRTVDIHPTVPNPYNLLSTLKPDYSWYTVLDLKDAFFCLPLAPQSQELFAFEWKDPERGISGQLTWTRLPQGFKNSPTLFNEALHRDLTDFRTQHPEVTLLQYVDDLLLAAPTKKACTQGTRHLLQELGEKGYRASAKKAQICQTKVTYLGYILSEGKRWLTPGRIETVARIPPPRNPREVREFLGTAGFCRLWIPGFAELAAPLYALTKPSTPFTWQTEHQLAFEALKKALLSAPALGLPDTSKPFTLFLDERQGIAKGVLTQKLGPWKRPVAYLSKKLDPVAAGWPPCLRIMAATAMLVKDSAKLTLGQPLTVITPHTLEAIVRQPPDRWITNARLTHYQALLLDTDRVQFGPPVTLNPATLLPVPENQPSPHDCRQVLAETHGTREDLKDQELPDADHTWYTDGSSYLDSGTRRAGAAVVDGHNTIWAQSLPPGTSAQKAELIALTKALELSKGKKANIYTDSRYAFATAHTHGSIYERRGWLTSEGKEIKNKAEIIALLKALFLPQEVAIIHCPGHQKGQDPVAVGNRQADRVARQAAMAEVLTLATEPDNTSHITAGKRTADGSEFEKRTADGSEFESPKKKAKVE

SEQ ID NO: 1567 - protein, 2102 aa, synthetic construct
MPAAKRVKLDGGDKKYSIGLDIGTNSVGWAVITDEYKVPSKKFKVLGNTDRHSIKKNLIGALLFDSGETAEATRLKRTARRRYTRRKNRICYLQEIFSNEMAKVDDSFFHRLEESFLVEEDKKHERHPIFGNIVDEVAYHEKYPTIYHLRKKLVDSTDKADLRLIYLALAHMIKFRGHFLIEGDLNPDNSDVDKLFIQLVQTYNQLFEENPINASGVDAKAILSARLSKSRRLENLIAQLPGEKKNGLFGNLIALSLGLTPNFKSNFDLAEDAKLQLSKDTYDDDLDNLLAQIGDQYADLFLAAKNLSDAILLSDILRVNTEITKAPLSASMIKRYDEHHQDLTLLKALVRQQLPEKYKEIFFDQSKNGYAGYIDGGASQEEFYKFIKPILEKMDGTEELLVKLNREDLLRKQRTFDNGSIPHQIHLGELHAILRRQEDFYPFLKDNREKIEKILTFRIPYYVGPLARGNSRFAWMTRKSEETITPWNFEEVVDKGASAQSFIERMTNFDKNLPNEKVLPKHSLLYEYFTVYNELTKVKYVTEGMRKPAFLSGEQKKAIVDLLFKTNRKVTVKQLKEDYFKKIECFDSVEISGVEDRFNASLGTYHDLLKIIKDKDFLDNEENEDILEDIVLTLTLFEDREMIEERLKTYAHLFDDKVMKQLKRRRYTGWGRLSRKLINGIRDKQSGKTILDFLKSDGFANRNFMQLIHDDSLTFKEDIQKAQVSGQGDSLHEHIANLAGSPAIKKGILQTVKVVDELVKVMGRHKPENIVIEMARENQTTQKGQKNSRERMKRIEEGIKELGSQILKEHPVENTQLQNEKLYLYYLQNGRDMYVDQELDINRLSDYDVDHIVPQSFLKDDSIDNKVLTRSDKARGKSDNVPSEEVVKKMKNYWRQLLNAKLITQRKFDNLTKAERGGLSELDKAGFIKRQLVETRQITKHVAQILDSRMNTKYDENDKLIREVKVITLKSKLVSDFRKDFQFYKVREINNYHHAHDAYLNAVVGTALIKKYPKLESEFVYGDYKVYDVRKMIAKSEQEIGKATAKYFFYSNIMNFFKTEITLANGEIRKRPLIETNGETGEIVWDKGRDFATVRKVLSMPQVNIVKKTEVQTGGFSKESILPKRNSDKLIARKKDWDPKKYGGFDSPTVAYSVLVVAKVEKGKSKKLKSVKELLGITIMERSSFEKNPIDFLEAKGYKEVKKDLIIKLPKYSLFELENGRKRMLASAGELQKGNELALPSKYVNFLYLASHYEKLKGSPEDNEQKQLFVEQHKHYLDEIIEQISEFSKRVILADANLDKVLSAYNKHRDKPIREQAENIIHLFTLTNLGAPAAFKYFDTTIDRKRYTSTKEVLDATLIHQSITGLYETRIDLSQLGGDGGGSSGGSEAAAKGGTVSLQDEHRLFDIPVTTSLPDVWLQDFPQAWAETGGLGRAKCQAPIIIDLKPTAVPVSIKQYPMSLEAHMGIRQHIIKFLELGVLRPCRSPWNTPLLPVKKPGTQDYRPVQDLREINKRTVDIHPTVPNPYNLLSTLKPDYSWYTVLDLKDAFFCLPLAPQSQELFAFEWKDPERGISGQLTWTRLPQGFKNSPTLFNEALHRDLTDFRTQHPEVTLLQYVDDLLLAAPTKKACTQGTRHLLQELGEKGYRASAKKAQICQTKVTYLGYILSEGKRWLTPGRIETVARIPPPRNPREVREFLGTAGFCRLWIPGFAELAAPLYALTKPSTPFTWQTEHQLAFEALKKALLSAPALGLPDTSKPFTLFLDERQGIAKGVLTQKLGPWKRPVAYLSKKLDPVAAGWPPCLRIMAATAMLVKDSAKLTLGQPLTVITPHTLEAIVRQPPDRWITNARLTHYQALLLDTDRVQFGPPVTLNPATLLPVPENQPSPHDCRQVLAETHGTREDLKDQELPDADHTWYTDGSSYLDSGTRRAGAAVVDGHNTIWAQSLPPGTSAQKAELIALTKALELSKGKKANIYTDSRYAFATAHTHGSIYERRGWLTSEGKEIKNKAEIIALLKALFLPQEVAIIHCPGHQKGQDPVAVGNRQADRVARQAAMAEVLTLATEPDNTSHITAGKRTADGSEFEKRTADGSEFESPKKKAKVE

SEQ ID NO: 1568 - protein, 2100 aa, synthetic construct
MPAAKRVKLDGGDKKYSIGLDIGTNSVGWAVITDEYKVPSKKFKVLGNTDRHSIKKNLIGALLFDSGETAEATRLKRTARRRYTRRKNRICYLQEIFSNEMAKVDDSFFHRLEESFLVEEDKKHERHPIFGNIVDEVAYHEKYPTIYHLRKKLVDSTDKADLRLIYLALAHMIKFRGHFLIEGDLNPDNSDVDKLFIQLVQTYNQLFEENPINASGVDAKAILSARLSKSRRLENLIAQLPGEKKNGLFGNLIALSLGLTPNFKSNFDLAEDAKLQLSKDTYDDDLDNLLAQIGDQYADLFLAAKNLSDAILLSDILRVNTEITKAPLSASMIKRYDEHHQDLTLLKALVRQQLPEKYKEIFFDQSKNGYAGYIDGGASQEEFYKFIKPILEKMDGTEELLVKLNREDLLRKQRTFDNGSIPHQIHLGELHAILRRQEDFYPFLKDNREKIEKILTFRIPYYVGPLARGNSRFAWMTRKSEETITPWNFEEVVDKGASAQSFIERMTNFDKNLPNEKVLPKHSLLYEYFTVYNELTKVKYVTEGMRKPAFLSGEQKKAIVDLLFKTNRKVTVKQLKEDYFKKIECFDSVEISGVEDRFNASLGTYHDLLKIIKDKDFLDNEENEDILEDIVLTLTLFEDREMIEERLKTYAHLFDDKVMKQLKRRRYTGWGRLSRKLINGIRDKQSGKTILDFLKSDGFANRNFMQLIHDDSLTFKEDIQKAQVSGQGDSLHEHIANLAGSPAIKKGILQTVKVVDELVKVMGRHKPENIVIEMARENQTTQKGQKNSRERMKRIEEGIKELGSQILKEHPVENTQLQNEKLYLYYLQNGRDMYVDQELDINRLSDYDVDHIVPQSFLKDDSIDNKVLTRSDKARGKSDNVPSEEVVKKMKNYWRQLLNAKLITQRKFDNLTKAERGGLSELDKAGFIKRQLVETRQITKHVAQILDSRMNTKYDENDKLIREVKVITLKSKLVSDFRKDFQFYKVREINNYHHAHDAYLNAVVGTALIKKYPKLESEFVYGDYKVYDVRKMIAKSEQEIGKATAKYFFYSNIMNFFKTEITLANGEIRKRPLIETNGETGEIVWDKGRDFATVRKVLSMPQVNIVKKTEVQTGGFSKESILPKRNSDKLIARKKDWDPKKYGGFDSPTVAYSVLVVAKVEKGKSKKLKSVKELLGITIMERSSFEKNPIDFLEAKGYKEVKKDLIIKLPKYSLFELENGRKRMLASAGELQKGNELALPSKYVNFLYLASHYEKLKGSPEDNEQKQLFVEQHKHYLDEIIEQISEFSKRVILADANLDKVLSAYNKHRDKPIREQAENIIHLFTLTNLGAPAAFKYFDTTIDRKRYTSTKEVLDATLIHQSITGLYETRIDLSQLGGDGGPAPGSSGGGGGTVSLQDEHRLFDIPVTTSLPDVWLQDFPQAWAETGGLGRAKCQAPIIIDLKPTAVPVSIKQYPMSLEAHMGIRQHIIKFLELGVLRPCRSPWNTPLLPVKKPGTQDYRPVQDLREINKRTVDIHPTVPNPYNLLSTLKPDYSWYTVLDLKDAFFCLPLAPQSQELFAFEWKDPERGISGQLTWTRLPQGFKNSPTLFNEALHRDLTDFRTQHPEVTLLQYVDDLLLAAPTKKACTQGTRHLLQELGEKGYRASAKKAQICQTKVTYLGYILSEGKRWLTPGRIETVARIPPPRNPREVREFLGTAGFCRLWIPGFAELAAPLYALTKPSTPFTWQTEHQLAFEALKKALLSAPALGLPDTSKPFTLFLDERQGIAKGVLTQKLGPWKRPVAYLSKKLDPVAAGWPPCLRIMAATAMLVKDSAKLTLGQPLTVITPHTLEAIVRQPPDRWITNARLTHYQALLLDTDRVQFGPPVTLNPATLLPVPENQPSPHDCRQVLAETHGTREDLKDQELPDADHTWYTDGSSYLDSGTRRAGAAVVDGHNTIWAQSLPPGTSAQKAELIALTKALELSKGKKANIYTDSRYAFATAHTHGSIYERRGWLTSEGKEIKNKAEIIALLKALFLPQEVAIIHCPGHQKGQDPVAVGNRQADRVARQAAMAEVLTLATEPDNTSHITAGKRTADGSEFEKRTADGSEFESPKKKAKVE

SEQ ID NO: 1569 - protein, 2099 aa, synthetic construct
MPAAKRVKLDGGDKKYSIGLDIGTNSVGWAVITDEYKVPSKKFKVLGNTDRHSIKKNLIGALLFDSGETAEATRLKRTARRRYTRRKNRICYLQEIFSNEMAKVDDSFFHRLEESFLVEEDKKHERHPIFGNIVDEVAYHEKYPTIYHLRKKLVDSTDKADLRLIYLALAHMIKFRGHFLIEGDLNPDNSDVDKLFIQLVQTYNQLFEENPINASGVDAKAILSARLSKSRRLENLIAQLPGEKKNGLFGNLIALSLGLTPNFKSNFDLAEDAKLQLSKDTYDDDLDNLLAQIGDQYADLFLAAKNLSDAILLSDILRVNTEITKAPLSASMIKRYDEHHQDLTLLKALVRQQLPEKYKEIFFDQSKNGYAGYIDGGASQEEFYKFIKPILEKMDGTEELLVKLNREDLLRKQRTFDNGSIPHQIHLGELHAILRRQEDFYPFLKDNREKIEKILTFRIPYYVGPLARGNSRFAWMTRKSEETITPWNFEEVVDKGASAQSFIERMTNFDKNLPNEKVLPKHSLLYEYFTVYNELTKVKYVTEGMRKPAFLSGEQKKAIVDLLFKTNRKVTVKQLKEDYFKKIECFDSVEISGVEDRFNASLGTYHDLLKIIKDKDFLDNEENEDILEDIVLTLTLFEDREMIEERLKTYAHLFDDKVMKQLKRRRYTGWGRLSRKLINGIRDKQSGKTILDFLKSDGFANRNFMQLIHDDSLTFKEDIQKAQVSGQGDSLHEHIANLAGSPAIKKGILQTVKVVDELVKVMGRHKPENIVIEMARENQTTQKGQKNSRERMKRIEEGIKELGSQILKEHPVENTQLQNEKLYLYYLQNGRDMYVDQELDINRLSDYDVDHIVPQSFLKDDSIDNKVLTRSDKARGKSDNVPSEEVVKKMKNYWRQLLNAKLITQRKFDNLTKAERGGLSELDKAGFIKRQLVETRQITKHVAQILDSRMNTKYDENDKLIREVKVITLKSKLVSDFRKDFQFYKVREINNYHHAHDAYLNAVVGTALIKKYPKLESEFVYGDYKVYDVRKMIAKSEQEIGKATAKYFFYSNIMNFFKTEITLANGEIRKRPLIETNGETGEIVWDKGRDFATVRKVLSMPQVNIVKKTEVQTGGFSKESILPKRNSDKLIARKKDWDPKKYGGFDSPTVAYSVLVVAKVEKGKSKKLKSVKELLGITIMERSSFEKNPIDFLEAKGYKEVKKDLIIKLPKYSLFELENGRKRMLASAGELQKGNELALPSKYVNFLYLASHYEKLKGSPEDNEQKQLFVEQHKHYLDEIIEQISEFSKRVILADANLDKVLSAYNKHRDKPIREQAENIIHLFTLTNLGAPAAFKYFDTTIDRKRYTSTKEVLDATLIHQSITGLYETRIDLSQLGGDGGPAPEAAAKGGTVSLQDEHRLFDIPVTTSLPDVWLQDFPQAWAETGGLGRAKCQAPIIIDLKPTAVPVSIKQYPMSLEAHMGIRQHIIKFLELGVLRPCRSPWNTPLLPVKKPGTQDYRPVQDLREINKRTVDIHPTVPNPYNLLSTLKPDYSWYTVLDLKDAFFCLPLAPQSQELFAFEWKDPERGISGQLTWTRLPQGFKNSPTLFNEALHRDLTDFRTQHPEVTLLQYVDDLLLAAPTKKACTQGTRHLLQELGEKGYRASAKKAQICQTKVTYLGYILSEGKRWLTPGRIETVARIPPPRNPREVREFLGTAGFCRLWIPGFAELAAPLYALTKPSTPFTWQTEHQLAFEALKKALLSAPALGLPDTSKPFTLFLDERQGIAKGVLTQKLGPWKRPVAYLSKKLDPVAAGWPPCLRIMAATAMLVKDSAKLTLGQPLTVITPHTLEAIVRQPPDRWITNARLTHYQALLLDTDRVQFGPPVTLNPATLLPVPENQPSPHDCRQVLAETHGTREDLKDQELPDADHTWYTDGSSYLDSGTRRAGAAVVDGHNTIWAQSLPPGTSAQKAELIALTKALELSKGKKANIYTDSRYAFATAHTHGSIYERRGWLTSEGKEIKNKAEIIALLKALFLPQEVAIIHCPGHQKGQDPVAVGNRQADRVARQAAMAEVLTLATEPDNTSHITAGKRTADGSEFEKRTADGSEFESPKKKAKVE

SEQ ID NO: 1570 - protein, 2107 aa, synthetic construct
MPAAKRVKLDGGDKKYSIGLDIGTNSVGWAVITDEYKVPSKKFKVLGNTDRHSIKKNLIGALLFDSGETAEATRLKRTARRRYTRRKNRICYLQEIFSNEMAKVDDSFFHRLEESFLVEEDKKHERHPIFGNIVDEVAYHEKYPTIYHLRKKLVDSTDKADLRLIYLALAHMIKFRGHFLIEGDLNPDNSDVDKLFIQLVQTYNQLFEENPINASGVDAKAILSARLSKSRRLENLIAQLPGEKKNGLFGNLIALSLGLTPNFKSNFDLAEDAKLQLSKDTYDDDLDNLLAQIGDQYADLFLAAKNLSDAILLSDILRVNTEITKAPLSASMIKRYDEHHQDLTLLKALVRQQLPEKYKEIFFDQSKNGYAGYIDGGASQEEFYKFIKPILEKMDGTEELLVKLNREDLLRKQRTFDNGSIPHQIHLGELHAILRRQEDFYPFLKDNREKIEKILTFRIPYYVGPLARGNSRFAWMTRKSEETITPWNFEEVVDKGASAQSFIERMTNFDKNLPNEKVLPKHSLLYEYFTVYNELTKVKYVTEGMRKPAFLSGEQKKAIVDLLFKTNRKVTVKQLKEDYFKKIECFDSVEISGVEDRFNASLGTYHDLLKIIKDKDFLDNEENEDILEDIVLTLTLFEDREMIEERLKTYAHLFDDKVMKQLKRRRYTGWGRLSRKLINGIRDKQSGKTILDFLKSDGFANRNFMQLIHDDSLTFKEDIQKAQVSGQGDSLHEHIANLAGSPAIKKGILQTVKVVDELVKVMGRHKPENIVIEMARENQTTQKGQKNSRERMKRIEEGIKELGSQILKEHPVENTQLQNEKLYLYYLQNGRDMYVDQELDINRLSDYDVDHIVPQSFLKDDSIDNKVLTRSDKARGKSDNVPSEEVVKKMKNYWRQLLNAKLITQRKFDNLTKAERGGLSELDKAGFIKRQLVETRQITKHVAQILDSRMNTKYDENDKLIREVKVITLKSKLVSDFRKDFQFYKVREINNYHHAHDAYLNAVVGTALIKKYPKLESEFVYGDYKVYDVRKMIAKSEQEIGKATAKYFFYSNIMNFFKTEITLANGEIRKRPLIETNGETGEIVWDKGRDFATVRKVLSMPQVNIVKKTEVQTGGFSKESILPKRNSDKLIARKKDWDPKKYGGFDSPTVAYSVLVVAKVEKGKSKKLKSVKELLGITIMERSSFEKNPIDFLEAKGYKEVKKDLIIKLPKYSLFELENGRKRMLASAGELQKGNELALPSKYVNFLYLASHYEKLKGSPEDNEQKQLFVEQHKHYLDEIIEQISEFSKRVILADANLDKVLSAYNKHRDKPIREQAENIIHLFTLTNLGAPAAFKYFDTTIDRKRYTSTKEVLDATLIHQSITGLYETRIDLSQLGGDGGSGSETPGTSESATPESGGTVSLQDEHRLFDIPVTTSLPDVWLQDFPQAWAETGGLGRAKCQAPIIIDLKPTAVPVSIKQYPMSLEAHMGIRQHIIKFLELGVLRPCRSPWNTPLLPVKKPGTQDYRPVQDLREINKRTVDIHPTVPNPYNLLSTLKPDYSWYTVLDLKDAFFCLPLAPQSQELFAFEWKDPERGISGQLTWTRLPQGFKNSPTLFNEALHRDLTDFRTQHPEVTLLQYVDDLLLAAPTKKACTQGTRHLLQELGEKGYRASAKKAQICQTKVTYLGYILSEGKRWLTPGRIETVARIPPPRNPREVREFLGTAGFCRLWIPGFAELAAPLYALTKPSTPFTWQTEHQLAFEALKKALLSAPALGLPDTSKPFTLFLDERQGIAKGVLTQKLGPWKRPVAYLSKKLDPVAAGWPPCLRIMAATAMLVKDSAKLTLGQPLTVITPHTLEAIVRQPPDRWITNARLTHYQALLLDTDRVQFGPPVTLNPATLLPVPENQPSPHDCRQVLAETHGTREDLKDQELPDADHTWYTDGSSYLDSGTRRAGAAVVDGHNTIWAQSLPPGTSAQKAELIALTKALELSKGKKANIYTDSRYAFATAHTHGSIYERRGWLTSEGKEIKNKAEIIALLKALFLPQEVAIIHCPGHQKGQDPVAVGNRQADRVARQAAMAEVLTLATEPDNTSHITAGKRTADGSEFEKRTADGSEFESPKKKAKVE

SEQ ID NO: 1571 - protein, 2102 aa, synthetic construct
MPAAKRVKLDGGDKKYSIGLDIGTNSVGWAVITDEYKVPSKKFKVLGNTDRHSIKKNLIGALLFDSGETAEATRLKRTARRRYTRRKNRICYLQEIFSNEMAKVDDSFFHRLEESFLVEEDKKHERHPIFGNIVDEVAYHEKYPTIYHLRKKLVDSTDKADLRLIYLALAHMIKFRGHFLIEGDLNPDNSDVDKLFIQLVQTYNQLFEENPINASGVDAKAILSARLSKSRRLENLIAQLPGEKKNGLFGNLIALSLGLTPNFKSNFDLAEDAKLQLSKDTYDDDLDNLLAQIGDQYADLFLAAKNLSDAILLSDILRVNTEITKAPLSASMIKRYDEHHQDLTLLKALVRQQLPEKYKEIFFDQSKNGYAGYIDGGASQEEFYKFIKPILEKMDGTEELLVKLNREDLLRKQRTFDNGSIPHQIHLGELHAILRRQEDFYPFLKDNREKIEKILTFRIPYYVGPLARGNSRFAWMTRKSEETITPWNFEEVVDKGASAQSFIERMTNFDKNLPNEKVLPKHSLLYEYFTVYNELTKVKYVTEGMRKPAFLSGEQKKAIVDLLFKTNRKVTVKQLKEDYFKKIECFDSVEISGVEDRFNASLGTYHDLLKIIKDKDFLDNEENEDILEDIVLTLTLFEDREMIEERLKTYAHLFDDKVMKQLKRRRYTGWGRLSRKLINGIRDKQSGKTILDFLKSDGFANRNFMQLIHDDSLTFKEDIQKAQVSGQGDSLHEHIANLAGSPAIKKGILQTVKVVDELVKVMGRHKPENIVIEMARENQTTQKGQKNSRERMKRIEEGIKELGSQILKEHPVENTQLQNEKLYLYYLQNGRDMYVDQELDINRLSDYDVDHIVPQSFLKDDSIDNKVLTRSDKARGKSDNVPSEEVVKKMKNYWRQLLNAKLITQRKFDNLTKAERGGLSELDKAGFIKRQLVETRQITKHVAQILDSRMNTKYDENDKLIREVKVITLKSKLVSDFRKDFQFYKVREINNYHHAHDAYLNAVVGTALIKKYPKLESEFVYGDYKVYDVRKMIAKSEQEIGKATAKYFFYSNIMNFFKTEITLANGEIRKRPLIETNGETGEIVWDKGRDFATVRKVLSMPQVNIVKKTEVQTGGFSKESILPKRNSDKLIARKKDWDPKKYGGFDSPTVAYSVLVVAKVEKGKSKKLKSVKELLGITIMERSSFEKNPIDFLEAKGYKEVKKDLIIKLPKYSLFELENGRKRMLASAGELQKGNELALPSKYVNFLYLASHYEKLKGSPEDNEQKQLFVEQHKHYLDEIIEQISEFSKRVILADANLDKVLSAYNKHRDKPIREQAENIIHLFTLTNLGAPAAFKYFDTTIDRKRYTSTKEVLDATLIHQSITGLYETRIDLSQLGGDGGEAAAKGSSPAPGGTVSLQDEHRLFDIPVTTSLPDVWLQDFPQAWAETGGLGRAKCQAPIIIDLKPTAVPVSIKQYPMSLEAHMGIRQHIIKFLELGVLRPCRSPWNTPLLPVKKPGTQDYRPVQDLREINKRTVDIHPTVPNPYNLLSTLKPDYSWYTVLDLKDAFFCLPLAPQSQELFAFEWKDPERGISGQLTWTRLPQGFKNSPTLFNEALHRDLTDFRTQHPEVTLLQYVDDLLLAAPTKKACTQGTRHLLQELGEKGYRASAKKAQICQTKVTYLGYILSEGKRWLTPGRIETVARIPPPRNPREVREFLGTAGFCRLWIPGFAELAAPLYALTKPSTPFTWQTEHQLAFEALKKALLSAPALGLPDTSKPFTLFLDERQGIAKGVLTQKLGPWKRPVAYLSKKLDPVAAGWPPCLRIMAATAMLVKDSAKLTLGQPLTVITPHTLEAIVRQPPDRWITNARLTHYQALLLDTDRVQFGPPVTLNPATLLPVPENQPSPHDCRQVLAETHGTREDLKDQELPDADHTWYTDGSSYLDSGTRRAGAAVVDGHNTIWAQSLPPGTSAQKAELIALTKALELSKGKKANIYTDSRYAFATAHTHGSIYERRGWLTSEGKEIKNKAEIIALLKALFLPQEVAIIHCPGHQKGQDPVAVGNRQADRVARQAAMAEVLTLATEPDNTSHITAGKRTADGSEFEKRTADGSEFESPKKKAKVE

SEQ ID NO: 1572 - protein, 2097 aa, synthetic construct
MPAAKRVKLDGGDKKYSIGLDIGTNSVGWAVITDEYKVPSKKFKVLGNTDRHSIKKNLIGALLFDSGETAEATRLKRTARRRYTRRKNRICYLQEIFSNEMAKVDDSFFHRLEESFLVEEDKKHERHPIFGNIVDEVAYHEKYPTIYHLRKKLVDSTDKADLRLIYLALAHMIKFRGHFLIEGDLNPDNSDVDKLFIQLVQTYNQLFEENPINASGVDAKAILSARLSKSRRLENLIAQLPGEKKNGLFGNLIALSLGLTPNFKSNFDLAEDAKLQLSKDTYDDDLDNLLAQIGDQYADLFLAAKNLSDAILLSDILRVNTEITKAPLSASMIKRYDEHHQDLTLLKALVRQQLPEKYKEIFFDQSKNGYAGYIDGGASQEEFYKFIKPILEKMDGTEELLVKLNREDLLRKQRTFDNGSIPHQIHLGELHAILRRQEDFYPFLKDNREKIEKILTFRIPYYVGPLARGNSRFAWMTRKSEETITPWNFEEVVDKGASAQSFIERMTNFDKNLPNEKVLPKHSLLYEYFTVYNELTKVKYVTEGMRKPAFLSGEQKKAIVDLLFKTNRKVTVKQLKEDYFKKIECFDSVEISGVEDRFNASLGTYHDLLKIIKDKDFLDNEENEDILEDIVLTLTLFEDREMIEERLKTYAHLFDDKVMKQLKRRRYTGWGRLSRKLINGIRDKQSGKTILDFLKSDGFANRNFMQLIHDDSLTFKEDIQKAQVSGQGDSLHEHIANLAGSPAIKKGILQTVKVVDELVKVMGRHKPENIVIEMARENQTTQKGQKNSRERMKRIEEGIKELGSQILKEHPVENTQLQNEKLYLYYLQNGRDMYVDQELDINRLSDYDVDHIVPQSFLKDDSIDNKVLTRSDKARGKSDNVPSEEVVKKMKNYWRQLLNAKLITQRKFDNLTKAERGGLSELDKAGFIKRQLVETRQITKHVAQILDSRMNTKYDENDKLIREVKVITLKSKLVSDFRKDFQFYKVREINNYHHAHDAYLNAVVGTALIKKYPKLESEFVYGDYKVYDVRKMIAKSEQEIGKATAKYFFYSNIMNFFKTEITLANGEIRKRPLIETNGETGEIVWDKGRDFATVRKVLSMPQVNIVKKTEVQTGGFSKESILPKRNSDKLIARKKDWDPKKYGGFDSPTVAYSVLVVAKVEKGKSKKLKSVKELLGITIMERSSFEKNPIDFLEAKGYKEVKKDLIIKLPKYSLFELENGRKRMLASAGELQKGNELALPSKYVNFLYLASHYEKLKGSPEDNEQKQLFVEQHKHYLDEIIEQISEFSKRVILADANLDKVLSAYNKHRDKPIREQAENIIHLFTLTNLGAPAAFKYFDTTIDRKRYTSTKEVLDATLIHQSITGLYETRIDLSQLGGDGGGGGGGGGGTVSLQDEHRLFDIPVTTSLPDVWLQDFPQAWAETGGLGRAKCQAPIIIDLKPTAVPVSIKQYPMSLEAHMGIRQHIIKFLELGVLRPCRSPWNTPLLPVKKPGTQDYRPVQDLREINKRTVDIHPTVPNPYNLLSTLKPDYSWYTVLDLKDAFFCLPLAPQSQELFAFEWKDPERGISGQLTWTRLPQGFKNSPTLFNEALHRDLTDFRTQHPEVTLLQYVDDLLLAAPTKKACTQGTRHLLQELGEKGYRASAKKAQICQTKVTYLGYILSEGKRWLTPGRIETVARIPPPRNPREVREFLGTAGFCRLWIPGFAELAAPLYALTKPSTPFTWQTEHQLAFEALKKALLSAPALGLPDTSKPFTLFLDERQGIAKGVLTQKLGPWKRPVAYLSKKLDPVAAGWPPCLRIMAATAMLVKDSAKLTLGQPLTVITPHTLEAIVRQPPDRWITNARLTHYQALLLDTDRVQFGPPVTLNPATLLPVPENQPSPHDCRQVLAETHGTREDLKDQELPDADHTWYTDGSSYLDSGTRRAGAAVVDGHNTIWAQSLPPGTSAQKAELIALTKALELSKGKKANIYTDSRYAFATAHTHGSIYERRGWLTSEGKEIKNKAEIIALLKALFLPQEVAIIHCPGHQKGQDPVAVGNRQADRVARQAAMAEVLTLATEPDNTSHITAGKRTADGSEFEKRTADGSEFESPKKKAKVE

SEQ ID NO: 1573 - protein, 2100 aa, synthetic construct
MPAAKRVKLDGGDKKYSIGLDIGTNSVGWAVITDEYKVPSKKFKVLGNTDRHSIKKNLIGALLFDSGETAEATRLKRTARRRYTRRKNRICYLQEIFSNEMAKVDDSFFHRLEESFLVEEDKKHERHPIFGNIVDEVAYHEKYPTIYHLRKKLVDSTDKADLRLIYLALAHMIKFRGHFLIEGDLNPDNSDVDKLFIQLVQTYNQLFEENPINASGVDAKAILSARLSKSRRLENLIAQLPGEKKNGLFGNLIALSLGLTPNFKSNFDLAEDAKLQLSKDTYDDDLDNLLAQIGDQYADLFLAAKNLSDAILLSDILRVNTEITKAPLSASMIKRYDEHHQDLTLLKALVRQQLPEKYKEIFFDQSKNGYAGYIDGGASQEEFYKFIKPILEKMDGTEELLVKLNREDLLRKQRTFDNGSIPHQIHLGELHAILRRQEDFYPFLKDNREKIEKILTFRIPYYVGPLARGNSRFAWMTRKSEETITPWNFEEVVDKGASAQSFIERMTNFDKNLPNEKVLPKHSLLYEYFTVYNELTKVKYVTEGMRKPAFLSGEQKKAIVDLLFKTNRKVTVKQLKEDYFKKIECFDSVEISGVEDRFNASLGTYHDLLKIIKDKDFLDNEENEDILEDIVLTLTLFEDREMIEERLKTYAHLFDDKVMKQLKRRRYTGWGRLSRKLINGIRDKQSGKTILDFLKSDGFANRNFMQLIHDDSLTFKEDIQKAQVSGQGDSLHEHIANLAGSPAIKKGILQTVKVVDELVKVMGRHKPENIVIEMARENQTTQKGQKNSRERMKRIEEGIKELGSQILKEHPVENTQLQNEKLYLYYLQNGRDMYVDQELDINRLSDYDVDHIVPQSFLKDDSIDNKVLTRSDKARGKSDNVPSEEVVKKMKNYWRQLLNAKLITQRKFDNLTKAERGGLSELDKAGFIKRQLVETRQITKHVAQILDSRMNTKYDENDKLIREVKVITLKSKLVSDFRKDFQFYKVREINNYHHAHDAYLNAVVGTALIKKYPKLESEFVYGDYKVYDVRKMIAKSEQEIGKATAKYFFYSNIMNFFKTEITLANGEIRKRPLIETNGETGEIVWDKGRDFATVRKVLSMPQVNIVKKTEVQTGGFSKESILPKRNSDKLIARKKDWDPKKYGGFDSPTVAYSVLVVAKVEKGKSKKLKSVKELLGITIMERSSFEKNPIDFLEAKGYKEVKKDLIIKLPKYSLFELENGRKRMLASAGELQKGNELALPSKYVNFLYLASHYEKLKGSPEDNEQKQLFVEQHKHYLDEIIEQISEFSKRVILADANLDKVLSAYNKHRDKPIREQAENIIHLFTLTNLGAPAAFKYFDTTIDRKRYTSTKEVLDATLIHQSITGLYETRIDLSQLGGDGGGGSGGSGGSGGTVSLQDEHRLFDIPVTTSLPDVWLQDFPQAWAETGGLGRAKCQAPIIIDLKPTAVPVSIKQYPMSLEAHMGIRQHIIKFLELGVLRPCRSPWNTPLLPVKKPGTQDYRPVQDLREINKRTVDIHPTVPNPYNLLSTLKPDYSWYTVLDLKDAFFCLPLAPQSQELFAFEWKDPERGISGQLTWTRLPQGFKNSPTLFNEALHRDLTDFRTQHPEVTLLQYVDDLLLAAPTKKACTQGTRHLLQELGEKGYRASAKKAQICQTKVTYLGYILSEGKRWLTPGRIETVARIPPPRNPREVREFLGTAGFCRLWIPGFAELAAPLYALTKPSTPFTWQTEHQLAFEALKKALLSAPALGLPDTSKPFTLFLDERQGIAKGVLTQKLGPWKRPVAYLSKKLDPVAAGWPPCLRIMAATAMLVKDSAKLTLGQPLTVITPHTLEAIVRQPPDRWITNARLTHYQALLLDTDRVQFGPPVTLNPATLLPVPENQPSPHDCRQVLAETHGTREDLKDQELPDADHTWYTDGSSYLDSGTRRAGAAVVDGHNTIWAQSLPPGTSAQKAELIALTKALELSKGKKANIYTDSRYAFATAHTHGSIYERRGWLTSEGKEIKNKAEIIALLKALFLPQEVAIIHCPGHQKGQDPVAVGNRQADRVARQAAMAEVLTLATEPDNTSHITAGKRTADGSEFEKRTADGSEFESPKKKAKVE

SEQ ID NO: 1574 - protein, 2102 aa, synthetic construct
MPAAKRVKLDGGDKKYSIGLDIGTNSVGWAVITDEYKVPSKKFKVLGNTDRHSIKKNLIGALLFDSGETAEATRLKRTARRRYTRRKNRICYLQEIFSNEMAKVDDSFFHRLEESFLVEEDKKHERHPIFGNIVDEVAYHEKYPTIYHLRKKLVDSTDKADLRLIYLALAHMIKFRGHFLIEGDLNPDNSDVDKLFIQLVQTYNQLFEENPINASGVDAKAILSARLSKSRRLENLIAQLPGEKKNGLFGNLIALSLGLTPNFKSNFDLAEDAKLQLSKDTYDDDLDNLLAQIGDQYADLFLAAKNLSDAILLSDILRVNTEITKAPLSASMIKRYDEHHQDLTLLKALVRQQLPEKYKEIFFDQSKNGYAGYIDGGASQEEFYKFIKPILEKMDGTEELLVKLNREDLLRKQRTFDNGSIPHQIHLGELHAILRRQEDFYPFLKDNREKIEKILTFRIPYYVGPLARGNSRFAWMTRKSEETITPWNFEEVVDKGASAQSFIERMTNFDKNLPNEKVLPKHSLLYEYFTVYNELTKVKYVTEGMRKPAFLSGEQKKAIVDLLFKTNRKVTVKQLKEDYFKKIECFDSVEISGVEDRFNASLGTYHDLLKIIKDKDFLDNEENEDILEDIVLTLTLFEDREMIEERLKTYAHLFDDKVMKQLKRRRYTGWGRLSRKLINGIRDKQSGKTILDFLKSDGFANRNFMQLIHDDSLTFKEDIQKAQVSGQGDSLHEHIANLAGSPAIKKGILQTVKVVDELVKVMGRHKPENIVIEMARENQTTQKGQKNSRERMKRIEEGIKELGSQILKEHPVENTQLQNEKLYLYYLQNGRDMYVDQELDINRLSDYDVDHIVPQSFLKDDSIDNKVLTRSDKARGKSDNVPSEEVVKKMKNYWRQLLNAKLITQRKFDNLTKAERGGLSELDKAGFIKRQLVETRQITKHVAQILDSRMNTKYDENDKLIREVKVITLKSKLVSDFRKDFQFYKVREINNYHHAHDAYLNAVVGTALIKKYPKLESEFVYGDYKVYDVRKMIAKSEQEIGKATAKYFFYSNIMNFFKTEITLANGEIRKRPLIETNGETGEIVWDKGRDFATVRKVLSMPQVNIVKKTEVQTGGFSKESILPKRNSDKLIARKKDWDPKKYGGFDSPTVAYSVLVVAKVEKGKSKKLKSVKELLGITIMERSSFEKNPIDFLEAKGYKEVKKDLIIKLPKYSLFELENGRKRMLASAGELQKGNELALPSKYVNFLYLASHYEKLKGSPEDNEQKQLFVEQHKHYLDEIIEQISEFSKRVILADANLDKVLSAYNKHRDKPIREQAENIIHLFTLTNLGAPAAFKYFDTTIDRKRYTSTKEVLDATLIHQSITGLYETRIDLSQLGGDGGGGGEAAAKGSSGGTVSLQDEHRLFDIPVTTSLPDVWLQDFPQAWAETGGLGRAKCQAPIIIDLKPTAVPVSIKQYPMSLEAHMGIRQHIIKFLELGVLRPCRSPWNTPLLPVKKPGTQDYRPVQDLREINKRTVDIHPTVPNPYNLLSTLKPDYSWYTVLDLKDAFFCLPLAPQSQELFAFEWKDPERGISGQLTWTRLPQGFKNSPTLFNEALHRDLTDFRTQHPEVTLLQYVDDLLLAAPTKKACTQGTRHLLQELGEKGYRASAKKAQICQTKVTYLGYILSEGKRWLTPGRIETVARIPPPRNPREVREFLGTAGFCRLWIPGFAELAAPLYALTKPSTPFTWQTEHQLAFEALKKALLSAPALGLPDTSKPFTLFLDERQGIAKGVLTQKLGPWKRPVAYLSKKLDPVAAGWPPCLRIMAATAMLVKDSAKLTLGQPLTVITPHTLEAIVRQPPDRWITNARLTHYQALLLDTDRVQFGPPVTLNPATLLPVPENQPSPHDCRQVLAETHGTREDLKDQELPDADHTWYTDGSSYLDSGTRRAGAAVVDGHNTIWAQSLPPGTSAQKAELIALTKALELSKGKKANIYTDSRYAFATAHTHGSIYERRGWLTSEGKEIKNKAEIIALLKALFLPQEVAIIHCPGHQKGQDPVAVGNRQADRVARQAAMAEVLTLATEPDNTSHITAGKRTADGSEFEKRTADGSEFESPKKKAKVE

SEQ ID NO: 1575 - protein, 2102 aa, synthetic construct
MPAAKRVKLDGGDKKYSIGLDIGTNSVGWAVITDEYKVPSKKFKVLGNTDRHSIKKNLIGALLFDSGETAEATRLKRTARRRYTRRKNRICYLQEIFSNEMAKVDDSFFHRLEESFLVEEDKKHERHPIFGNIVDEVAYHEKYPTIYHLRKKLVDSTDKADLRLIYLALAHMIKFRGHFLIEGDLNPDNSDVDKLFIQLVQTYNQLFEENPINASGVDAKAILSARLSKSRRLENLIAQLPGEKKNGLFGNLIALSLGLTPNFKSNFDLAEDAKLQLSKDTYDDDLDNLLAQIGDQYADLFLAAKNLSDAILLSDILRVNTEITKAPLSASMIKRYDEHHQDLTLLKALVRQQLPEKYKEIFFDQSKNGYAGYIDGGASQEEFYKFIKPILEKMDGTEELLVKLNREDLLRKQRTFDNGSIPHQIHLGELHAILRRQEDFYPFLKDNREKIEKILTFRIPYYVGPLARGNSRFAWMTRKSEETITPWNFEEVVDKGASAQSFIERMTNFDKNLPNEKVLPKHSLLYEYFTVYNELTKVKYVTEGMRKPAFLSGEQKKAIVDLLFKTNRKVTVKQLKEDYFKKIECFDSVEISGVEDRFNASLGTYHDLLKIIKDKDFLDNEENEDILEDIVLTLTLFEDREMIEERLKTYAHLFDDKVMKQLKRRRYTGWGRLSRKLINGIRDKQSGKTILDFLKSDGFANRNFMQLIHDDSLTFKEDIQKAQVSGQGDSLHEHIANLAGSPAIKKGILQTVKVVDELVKVMGRHKPENIVIEMARENQTTQKGQKNSRERMKRIEEGIKELGSQILKEHPVENTQLQNEKLYLYYLQNGRDMYVDQELDINRLSDYDVDHIVPQSFLKDDSIDNKVLTRSDKARGKSDNVPSEEVVKKMKNYWRQLLNAKLITQRKFDNLTKAERGGLSELDKAGFIKRQLVETRQITKHVAQILDSRMNTKYDENDKLIREVKVITLKSKLVSDFRKDFQFYKVREINNYHHAHDAYLNAVVGTALIKKYPKLESEFVYGDYKVYDVRKMIAKSEQEIGKATAKYFFYSNIMNFFKTEITLANGEIRKRPLIETNGETGEIVWDKGRDFATVRKVLSMPQVNIVKKTEVQTGGFSKESILPKRNSDKLIARKKDWDPKKYGGFDSPTVAYSVLVVAKVEKGKSKKLKSVKELLGITIMERSSFEKNPIDFLEAKGYKEVKKDLIIKLPKYSLFELENGRKRMLASAGELQKGNELALPSKYVNFLYLASHYEKLKGSPEDNEQKQLFVEQHKHYLDEIIEQISEFSKRVILADANLDKVLSAYNKHRDKPIREQAENIIHLFTLTNLGAPAAFKYFDTTIDRKRYTSTKEVLDATLIHQSITGLYETRIDLSQLGGDGGPAPEAAAKGSSGGTVSLQDEHRLFDIPVTTSLPDVWLQDFPQAWAETGGLGRAKCQAPIIIDLKPTAVPVSIKQYPMSLEAHMGIRQHIIKFLELGVLRPCRSPWNTPLLPVKKPGTQDYRPVQDLREINKRTVDIHPTVPNPYNLLSTLKPDYSWYTVLDLKDAFFCLPLAPQSQELFAFEWKDPERGISGQLTWTRLPQGFKNSPTLFNEALHRDLTDFRTQHPEVTLLQYVDDLLLAAPTKKACTQGTRHLLQELGEKGYRASAKKAQICQTKVTYLGYILSEGKRWLTPGRIETVARIPPPRNPREVREFLGTAGFCRLWIPGFAELAAPLYALTKPSTPFTWQTEHQLAFEALKKALLSAPALGLPDTSKPFTLFLDERQGIAKGVLTQKLGPWKRPVAYLSKKLDPVAAGWPPCLRIMAATAMLVKDSAKLTLGQPLTVITPHTLEAIVRQPPDRWITNARLTHYQALLLDTDRVQFGPPVTLNPATLLPVPENQPSPHDCRQVLAETHGTREDLKDQELPDADHTWYTDGSSYLDSGTRRAGAAVVDGHNTIWAQSLPPGTSAQKAELIALTKALELSKGKKANIYTDSRYAFATAHTHGSIYERRGWLTSEGKEIKNKAEIIALLKALFLPQEVAIIHCPGHQKGQDPVAVGNRQADRVARQAAMAEVLTLATEPDNTSHITAGKRTADGSEFEKRTADGSEFESPKKKAKVE

SEQ ID NO: 1576 - protein, 2102 aa, synthetic construct
MPAAKRVKLDGGDKKYSIGLDIGTNSVGWAVITDEYKVPSKKFKVLGNTDRHSIKKNLIGALLFDSGETAEATRLKRTARRRYTRRKNRICYLQEIFSNEMAKVDDSFFHRLEESFLVEEDKKHERHPIFGNIVDEVAYHEKYPTIYHLRKKLVDSTDKADLRLIYLALAHMIKFRGHFLIEGDLNPDNSDVDKLFIQLVQTYNQLFEENPINASGVDAKAILSARLSKSRRLENLIAQLPGEKKNGLFGNLIALSLGLTPNFKSNFDLAEDAKLQLSKDTYDDDLDNLLAQIGDQYADLFLAAKNLSDAILLSDILRVNTEITKAPLSASMIKRYDEHHQDLTLLKALVRQQLPEKYKEIFFDQSKNGYAGYIDGGASQEEFYKFIKPILEKMDGTEELLVKLNREDLLRKQRTFDNGSIPHQIHLGELHAILRRQEDFYPFLKDNREKIEKILTFRIPYYVGPLARGNSRFAWMTRKSEETITPWNFEEVVDKGASAQSFIERMTNFDKNLPNEKVLPKHSLLYEYFTVYNELTKVKYVTEGMRKPAFLSGEQKKAIVDLLFKTNRKVTVKQLKEDYFKKIECFDSVEISGVEDRFNASLGTYHDLLKIIKDKDFLDNEENEDILEDIVLTLTLFEDREMIEERLKTYAHLFDDKVMKQLKRRRYTGWGRLSRKLINGIRDKQSGKTILDFLKSDGFANRNFMQLIHDDSLTFKEDIQKAQVSGQGDSLHEHIANLAGSPAIKKGILQTVKVVDELVKVMGRHKPENIVIEMARENQTTQKGQKNSRERMKRIEEGIKELGSQILKEHPVENTQLQNEKLYLYYLQNGRDMYVDQELDINRLSDYDVDHIVPQSFLKDDSIDNKVLTRSDKARGKSDNVPSEEVVKKMKNYWRQLLNAKLITQRKFDNLTKAERGGLSELDKAGFIKRQLVETRQITKHVAQILDSRMNTKYDENDKLIREVKVITLKSKLVSDFRKDFQFYKVREINNYHHAHDAYLNAVVGTALIKKYPKLESEFVYGDYKVYDVRKMIAKSEQEIGKATAKYFFYSNIMNFFKTEITLANGEIRKRPLIETNGETGEIVWDKGRDFATVRKVLSMPQVNIVKKTEVQTGGFSKESILPKRNSDKLIARKKDWDPKKYGGFDSPTVAYSVLVVAKVEKGKSKKLKSVKELLGITIMERSSFEKNPIDFLEAKGYKEVKKDLIIKLPKYSLFELENGRKRMLASAGELQKGNELALPSKYVNFLYLASHYEKLKGSPEDNEQKQLFVEQHKHYLDEIIEQISEFSKRVILADANLDKVLSAYNKHRDKPIREQAENIIHLFTLTNLGAPAAFKYFDTTIDRKRYTSTKEVLDATLIHQSITGLYETRIDLSQLGGDGGEAAAKGSSGGGGGTVSLQDEHRLFDIPVTTSLPDVWLQDFPQAWAETGGLGRAKCQAPIIIDLKPTAVPVSIKQYPMSLEAHMGIRQHIIKFLELGVLRPCRSPWNTPLLPVKKPGTQDYRPVQDLREINKRTVDIHPTVPNPYNLLSTLKPDYSWYTVLDLKDAFFCLPLAPQSQELFAFEWKDPERGISGQLTWTRLPQGFKNSPTLFNEALHRDLTDFRTQHPEVTLLQYVDDLLLAAPTKKACTQGTRHLLQELGEKGYRASAKKAQICQTKVTYLGYILSEGKRWLTPGRIETVARIPPPRNPREVREFLGTAGFCRLWIPGFAELAAPLYALTKPSTPFTWQTEHQLAFEALKKALLSAPALGLPDTSKPFTLFLDERQGIAKGVLTQKLGPWKRPVAYLSKKLDPVAAGWPPCLRIMAATAMLVKDSAKLTLGQPLTVITPHTLEAIVRQPPDRWITNARLTHYQALLLDTDRVQFGPPVTLNPATLLPVPENQPSPHDCRQVLAETHGTREDLKDQELPDADHTWYTDGSSYLDSGTRRAGAAVVDGHNTIWAQSLPPGTSAQKAELIALTKALELSKGKKANIYTDSRYAFATAHTHGSIYERRGWLTSEGKEIKNKAEIIALLKALFLPQEVAIIHCPGHQKGQDPVAVGNRQADRVARQAAMAEVLTLATEPDNTSHITAGKRTADGSEFEKRTADGSEFESPKKKAKVE

SEQ ID NO: 1577 - protein, 2102 aa, synthetic construct
MPAAKRVKLDGGDKKYSIGLDIGTNSVGWAVITDEYKVPSKKFKVLGNTDRHSIKKNLIGALLFDSGETAEATRLKRTARRRYTRRKNRICYLQEIFSNEMAKVDDSFFHRLEESFLVEEDKKHERHPIFGNIVDEVAYHEKYPTIYHLRKKLVDSTDKADLRLIYLALAHMIKFRGHFLIEGDLNPDNSDVDKLFIQLVQTYNQLFEENPINASGVDAKAILSARLSKSRRLENLIAQLPGEKKNGLFGNLIALSLGLTPNFKSNFDLAEDAKLQLSKDTYDDDLDNLLAQIGDQYADLFLAAKNLSDAILLSDILRVNTEITKAPLSASMIKRYDEHHQDLTLLKALVRQQLPEKYKEIFFDQSKNGYAGYIDGGASQEEFYKFIKPILEKMDGTEELLVKLNREDLLRKQRTFDNGSIPHQIHLGELHAILRRQEDFYPFLKDNREKIEKILTFRIPYYVGPLARGNSRFAWMTRKSEETITPWNFEEVVDKGASAQSFIERMTNFDKNLPNEKVLPKHSLLYEYFTVYNELTKVKYVTEGMRKPAFLSGEQKKAIVDLLFKTNRKVTVKQLKEDYFKKIECFDSVEISGVEDRFNASLGTYHDLLKIIKDKDFLDNEENEDILEDIVLTLTLFEDREMIEERLKTYAHLFDDKVMKQLKRRRYTGWGRLSRKLINGIRDKQSGKTILDFLKSDGFANRNFMQLIHDDSLTFKEDIQKAQVSGQGDSLHEHIANLAGSPAIKKGILQTVKVVDELVKVMGRHKPENIVIEMARENQTTQKGQKNSRERMKRIEEGIKELGSQILKEHPVENTQLQNEKLYLYYLQNGRDMYVDQELDINRLSDYDVDHIVPQSFLKDDSIDNKVLTRSDKARGKSDNVPSEEVVKKMKNYWRQLLNAKLITQRKFDNLTKAERGGLSELDKAGFIKRQLVETRQITKHVAQILDSRMNTKYDENDKLIREVKVITLKSKLVSDFRKDFQFYKVREINNYHHAHDAYLNAVVGTALIKKYPKLESEFVYGDYKVYDVRKMIAKSEQEIGKATAKYFFYSNIMNFFKTEITLANGEIRKRPLIETNGETGEIVWDKGRDFATVRKVLSMPQVNIVKKTEVQTGGFSKESILPKRNSDKLIARKKDWDPKKYGGFDSPTVAYSVLVVAKVEKGKSKKLKSVKELLGITIMERSSFEKNPIDFLEAKGYKEVKKDLIIKLPKYSLFELENGRKRMLASAGELQKGNELALPSKYVNFLYLASHYEKLKGSPEDNEQKQLFVEQHKHYLDEIIEQISEFSKRVILADANLDKVLSAYNKHRDKPIREQAENIIHLFTLTNLGAPAAFKYFDTTIDRKRYTSTKEVLDATLIHQSITGLYETRIDLSQLGGDGGEAAAKGGGGGSGGTVSLQDEHRLFDIPVTTSLPDVWLQDFPQAWAETGGLGRAKCQAPIIIDLKPTAVPVSIKQYPMSLEAHMGIRQHIIKFLELGVLRPCRSPWNTPLLPVKKPGTQDYRPVQDLREINKRTVDIHPTVPNPYNLLSTLKPDYSWYTVLDLKDAFFCLPLAPQSQELFAFEWKDPERGISGQLTWTRLPQGFKNSPTLFNEALHRDLTDFRTQHPEVTLLQYVDDLLLAAPTKKACTQGTRHLLQELGEKGYRASAKKAQICQTKVTYLGYILSEGKRWLTPGRIETVARIPPPRNPREVREFLGTAGFCRLWIPGFAELAAPLYALTKPSTPFTWQTEHQLAFEALKKALLSAPALGLPDTSKPFTLFLDERQGIAKGVLTQKLGPWKRPVAYLSKKLDPVAAGWPPCLRIMAATAMLVKDSAKLTLGQPLTVITPHTLEAIVRQPPDRWITNARLTHYQALLLDTDRVQFGPPVTLNPATLLPVPENQPSPHDCRQVLAETHGTREDLKDQELPDADHTWYTDGSSYLDSGTRRAGAAVVDGHNTIWAQSLPPGTSAQKAELIALTKALELSKGKKANIYTDSRYAFATAHTHGSIYERRGWLTSEGKEIKNKAEIIALLKALFLPQEVAIIHCPGHQKGQDPVAVGNRQADRVARQAAMAEVLTLATEPDNTSHITAGKRTADGSEFEKRTADGSEFESPKKKAKVE

SEQ ID NO: 1578 - protein, 2100 aa, synthetic construct
MPAAKRVKLDGGDKKYSIGLDIGTNSVGWAVITDEYKVPSKKFKVLGNTDRHSIKKNLIGALLFDSGETAEATRLKRTARRRYTRRKNRICYLQEIFSNEMAKVDDSFFHRLEESFLVEEDKKHERHPIFGNIVDEVAYHEKYPTIYHLRKKLVDSTDKADLRLIYLALAHMIKFRGHFLIEGDLNPDNSDVDKLFIQLVQTYNQLFEENPINASGVDAKAILSARLSKSRRLENLIAQLPGEKKNGLFGNLIALSLGLTPNFKSNFDLAEDAKLQLSKDTYDDDLDNLLAQIGDQYADLFLAAKNLSDAILLSDILRVNTEITKAPLSASMIKRYDEHHQDLTLLKALVRQQLPEKYKEIFFDQSKNGYAGYIDGGASQEEFYKFIKPILEKMDGTEELLVKLNREDLLRKQRTFDNGSIPHQIHLGELHAILRRQEDFYPFLKDNREKIEKILTFRIPYYVGPLARGNSRFAWMTRKSEETITPWNFEEVVDKGASAQSFIERMTNFDKNLPNEKVLPKHSLLYEYFTVYNELTKVKYVTEGMRKPAFLSGEQKKAIVDLLFKTNRKVTVKQLKEDYFKKIECFDSVEISGVEDRFNASLGTYHDLLKIIKDKDFLDNEENEDILEDIVLTLTLFEDREMIEERLKTYAHLFDDKVMKQLKRRRYTGWGRLSRKLINGIRDKQSGKTILDFLKSDGFANRNFMQLIHDDSLTFKEDIQKAQVSGQGDSLHEHIANLAGSPAIKKGILQTVKVVDELVKVMGRHKPENIVIEMARENQTTQKGQKNSRERMKRIEEGIKELGSQILKEHPVENTQLQNEKLYLYYLQNGRDMYVDQELDINRLSDYDVDHIVPQSFLKDDSIDNKVLTRSDKARGKSDNVPSEEVVKKMKNYWRQLLNAKLITQRKFDNLTKAERGGLSELDKAGFIKRQLVETRQITKHVAQILDSRMNTKYDENDKLIREVKVITLKSKLVSDFRKDFQFYKVREINNYHHAHDAYLNAVVGTALIKKYPKLESEFVYGDYKVYDVRKMIAKSEQEIGKATAKYFFYSNIMNFFKTEITLANGEIRKRPLIETNGETGEIVWDKGRDFATVRKVLSMPQVNIVKKTEVQTGGFSKESILPKRNSDKLIARKKDWDPKKYGGFDSPTVAYSVLVVAKVEKGKSKKLKSVKELLGITIMERSSFEKNPIDFLEAKGYKEVKKDLIIKLPKYSLFELENGRKRMLASAGELQKGNELALPSKYVNFLYLASHYEKLKGSPEDNEQKQLFVEQHKHYLDEIIEQISEFSKRVILADANLDKVLSAYNKHRDKPIREQAENIIHLFTLTNLGAPAAFKYFDTTIDRKRYTSTKEVLDATLIHQSITGLYETRIDLSQLGGDGGGGGGSSPAPGGTVSLQDEHRLFDIPVTTSLPDVWLQDFPQAWAETGGLGRAKCQAPIIIDLKPTAVPVSIKQYPMSLEAHMGIRQHIIKFLELGVLRPCRSPWNTPLLPVKKPGTQDYRPVQDLREINKRTVDIHPTVPNPYNLLSTLKPDYSWYTVLDLKDAFFCLPLAPQSQELFAFEWKDPERGISGQLTWTRLPQGFKNSPTLFNEALHRDLTDFRTQHPEVTLLQYVDDLLLAAPTKKACTQGTRHLLQELGEKGYRASAKKAQICQTKVTYLGYILSEGKRWLTPGRIETVARIPPPRNPREVREFLGTAGFCRLWIPGFAELAAPLYALTKPSTPFTWQTEHQLAFEALKKALLSAPALGLPDTSKPFTLFLDERQGIAKGVLTQKLGPWKRPVAYLSKKLDPVAAGWPPCLRIMAATAMLVKDSAKLTLGQPLTVITPHTLEAIVRQPPDRWITNARLTHYQALLLDTDRVQFGPPVTLNPATLLPVPENQPSPHDCRQVLAETHGTREDLKDQELPDADHTWYTDGSSYLDSGTRRAGAAVVDGHNTIWAQSLPPGTSAQKAELIALTKALELSKGKKANIYTDSRYAFATAHTHGSIYERRGWLTSEGKEIKNKAEIIALLKALFLPQEVAIIHCPGHQKGQDPVAVGNRQADRVARQAAMAEVLTLATEPDNTSHITAGKRTADGSEFEKRTADGSEFESPKKKAKVE

SEQ ID NO: 1579 - protein, 2102 aa, synthetic construct
MPAAKRVKLDGGDKKYSIGLDIGTNSVGWAVITDEYKVPSKKFKVLGNTDRHSIKKNLIGALLFDSGETAEATRLKRTARRRYTRRKNRICYLQEIFSNEMAKVDDSFFHRLEESFLVEEDKKHERHPIFGNIVDEVAYHEKYPTIYHLRKKLVDSTDKADLRLIYLALAHMIKFRGHFLIEGDLNPDNSDVDKLFIQLVQTYNQLFEENPINASGVDAKAILSARLSKSRRLENLIAQLPGEKKNGLFGNLIALSLGLTPNFKSNFDLAEDAKLQLSKDTYDDDLDNLLAQIGDQYADLFLAAKNLSDAILLSDILRVNTEITKAPLSASMIKRYDEHHQDLTLLKALVRQQLPEKYKEIFFDQSKNGYAGYIDGGASQEEFYKFIKPILEKMDGTEELLVKLNREDLLRKQRTFDNGSIPHQIHLGELHAILRRQEDFYPFLKDNREKIEKILTFRIPYYVGPLARGNSRFAWMTRKSEETITPWNFEEVVDKGASAQSFIERMTNFDKNLPNEKVLPKHSLLYEYFTVYNELTKVKYVTEGMRKPAFLSGEQKKAIVDLLFKTNRKVTVKQLKEDYFKKIECFDSVEISGVEDRFNASLGTYHDLLKIIKDKDFLDNEENEDILEDIVLTLTLFEDREMIEERLKTYAHLFDDKVMKQLKRRRYTGWGRLSRKLINGIRDKQSGKTILDFLKSDGFANRNFMQLIHDDSLTFKEDIQKAQVSGQGDSLHEHIANLAGSPAIKKGILQTVKVVDELVKVMGRHKPENIVIEMARENQTTQKGQKNSRERMKRIEEGIKELGSQILKEHPVENTQLQNEKLYLYYLQNGRDMYVDQELDINRLSDYDVDHIVPQSFLKDDSIDNKVLTRSDKARGKSDNVPSEEVVKKMKNYWRQLLNAKLITQRKFDNLTKAERGGLSELDKAGFIKRQLVETRQITKHVAQILDSRMNTKYDENDKLIREVKVITLKSKLVSDFRKDFQFYKVREINNYHHAHDAYLNAVVGTALIKKYPKLESEFVYGDYKVYDVRKMIAKSEQEIGKATAKYFFYSNIMNFFKTEITLANGEIRKRPLIETNGETGEIVWDKGRDFATVRKVLSMPQVNIVKKTEVQTGGFSKESILPKRNSDKLIARKKDWDPKKYGGFDSPTVAYSVLVVAKVEKGKSKKLKSVKELLGITIMERSSFEKNPIDFLEAKGYKEVKKDLIIKLPKYSLFELENGRKRMLASAGELQKGNELALPSKYVNFLYLASHYEKLKGSPEDNEQKQLFVEQHKHYLDEIIEQISEFSKRVILADANLDKVLSAYNKHRDKPIREQAENIIHLFTLTNLGAPAAFKYFDTTIDRKRYTSTKEVLDATLIHQSITGLYETRIDLSQLGGDGGEAAAKPAPGGSGGTVSLQDEHRLFDIPVTTSLPDVWLQDFPQAWAETGGLGRAKCQAPIIIDLKPTAVPVSIKQYPMSLEAHMGIRQHIIKFLELGVLRPCRSPWNTPLLPVKKPGTQDYRPVQDLREINKRTVDIHPTVPNPYNLLSTLKPDYSWYTVLDLKDAFFCLPLAPQSQELFAFEWKDPERGISGQLTWTRLPQGFKNSPTLFNEALHRDLTDFRTQHPEVTLLQYVDDLLLAAPTKKACTQGTRHLLQELGEKGYRASAKKAQICQTKVTYLGYILSEGKRWLTPGRIETVARIPPPRNPREVREFLGTAGFCRLWIPGFAELAAPLYALTKPSTPFTWQTEHQLAFEALKKALLSAPALGLPDTSKPFTLFLDERQGIAKGVLTQKLGPWKRPVAYLSKKLDPVAAGWPPCLRIMAATAMLVKDSAKLTLGQPLTVITPHTLEAIVRQPPDRWITNARLTHYQALLLDTDRVQFGPPVTLNPATLLPVPENQPSPHDCRQVLAETHGTREDLKDQELPDADHTWYTDGSSYLDSGTRRAGAAVVDGHNTIWAQSLPPGTSAQKAELIALTKALELSKGKKANIYTDSRYAFATAHTHGSIYERRGWLTSEGKEIKNKAEIIALLKALFLPQEVAIIHCPGHQKGQDPVAVGNRQADRVARQAAMAEVLTLATEPDNTSHITAGKRTADGSEFEKRTADGSEFESPKKKAKVE

SEQ ID NO: 1580 - protein, 2102 aa, synthetic construct
MPAAKRVKLDGGDKKYSIGLDIGTNSVGWAVITDEYKVPSKKFKVLGNTDRHSIKKNLIGALLFDSGETAEATRLKRTARRRYTRRKNRICYLQEIFSNEMAKVDDSFFHRLEESFLVEEDKKHERHPIFGNIVDEVAYHEKYPTIYHLRKKLVDSTDKADLRLIYLALAHMIKFRGHFLIEGDLNPDNSDVDKLFIQLVQTYNQLFEENPINASGVDAKAILSARLSKSRRLENLIAQLPGEKKNGLFGNLIALSLGLTPNFKSNFDLAEDAKLQLSKDTYDDDLDNLLAQIGDQYADLFLAAKNLSDAILLSDILRVNTEITKAPLSASMIKRYDEHHQDLTLLKALVRQQLPEKYKEIFFDQSKNGYAGYIDGGASQEEFYKFIKPILEKMDGTEELLVKLNREDLLRKQRTFDNGSIPHQIHLGELHAILRRQEDFYPFLKDNREKIEKILTFRIPYYVGPLARGNSRFAWMTRKSEETITPWNFEEVVDKGASAQSFIERMTNFDKNLPNEKVLPKHSLLYEYFTVYNELTKVKYVTEGMRKPAFLSGEQKKAIVDLLFKTNRKVTVKQLKEDYFKKIECFDSVEISGVEDRFNASLGTYHDLLKIIKDKDFLDNEENEDILEDIVLTLTLFEDREMIEERLKTYAHLFDDKVMKQLKRRRYTGWGRLSRKLINGIRDKQSGKTILDFLKSDGFANRNFMQLIHDDSLTFKEDIQKAQVSGQGDSLHEHIANLAGSPAIKKGILQTVKVVDELVKVMGRHKPENIVIEMARENQTTQKGQKNSRERMKRIEEGIKELGSQILKEHPVENTQLQNEKLYLYYLQNGRDMYVDQELDINRLSDYDVDHIVPQSFLKDDSIDNKVLTRSDKARGKSDNVPSEEVVKKMKNYWRQLLNAKLITQRKFDNLTKAERGGLSELDKAGFIKRQLVETRQITKHVAQILDSRMNTKYDENDKLIREVKVITLKSKLVSDFRKDFQFYKVREINNYHHAHDAYLNAVVGTALIKKYPKLESEFVYGDYKVYDVRKMIAKSEQEIGKATAKYFFYSNIMNFFKTEITLANGEIRKRPLIETNGETGEIVWDKGRDFATVRKVLSMPQVNIVKKTEVQTGGFSKESILPKRNSDKLIARKKDWDPKKYGGFDSPTVAYSVLVVAKVEKGKSKKLKSVKELLGITIMERSSFEKNPIDFLEAKGYKEVKKDLIIKLPKYSLFELENGRKRMLASAGELQKGNELALPSKYVNFLYLASHYEKLKGSPEDNEQKQLFVEQHKHYLDEIIEQISEFSKRVILADANLDKVLSAYNKHRDKPIREQAENIIHLFTLTNLGAPAAFKYFDTTIDRKRYTSTKEVLDATLIHQSITGLYETRIDLSQLGGDGGPAPGGGEAAAKGGTVSLQDEHRLFDIPVTTSLPDVWLQDFPQAWAETGGLGRAKCQAPIIIDLKPTAVPVSIKQYPMSLEAHMGIRQHIIKFLELGVLRPCRSPWNTPLLPVKKPGTQDYRPVQDLREINKRTVDIHPTVPNPYNLLSTLKPDYSWYTVLDLKDAFFCLPLAPQSQELFAFEWKDPERGISGQLTWTRLPQGFKNSPTLFNEALHRDLTDFRTQHPEVTLLQYVDDLLLAAPTKKACTQGTRHLLQELGEKGYRASAKKAQICQTKVTYLGYILSEGKRWLTPGRIETVARIPPPRNPREVREFLGTAGFCRLWIPGFAELAAPLYALTKPSTPFTWQTEHQLAFEALKKALLSAPALGLPDTSKPFTLFLDERQGIAKGVLTQKLGPWKRPVAYLSKKLDPVAAGWPPCLRIMAATAMLVKDSAKLTLGQPLTVITPHTLEAIVRQPPDRWITNARLTHYQALLLDTDRVQFGPPVTLNPATLLPVPENQPSPHDCRQVLAETHGTREDLKDQELPDADHTWYTDGSSYLDSGTRRAGAAVVDGHNTIWAQSLPPGTSAQKAELIALTKALELSKGKKANIYTDSRYAFATAHTHGSIYERRGWLTSEGKEIKNKAEIIALLKALFLPQEVAIIHCPGHQKGQDPVAVGNRQADRVARQAAMAEVLTLATEPDNTSHITAGKRTADGSEFEKRTADGSEFESPKKKAKVE

SEQ ID NO: 1581 - protein, 2102 aa, synthetic construct
MPAAKRVKLDGGDKKYSIGLDIGTNSVGWAVITDEYKVPSKKFKVLGNTDRHSIKKNLIGALLFDSGETAEATRLKRTARRRYTRRKNRICYLQEIFSNEMAKVDDSFFHRLEESFLVEEDKKHERHPIFGNIVDEVAYHEKYPTIYHLRKKLVDSTDKADLRLIYLALAHMIKFRGHFLIEGDLNPDNSDVDKLFIQLVQTYNQLFEENPINASGVDAKAILSARLSKSRRLENLIAQLPGEKKNGLFGNLIALSLGLTPNFKSNFDLAEDAKLQLSKDTYDDDLDNLLAQIGDQYADLFLAAKNLSDAILLSDILRVNTEITKAPLSASMIKRYDEHHQDLTLLKALVRQQLPEKYKEIFFDQSKNGYAGYIDGGASQEEFYKFIKPILEKMDGTEELLVKLNREDLLRKQRTFDNGSIPHQIHLGELHAILRRQEDFYPFLKDNREKIEKILTFRIPYYVGPLARGNSRFAWMTRKSEETITPWNFEEVVDKGASAQSFIERMTNFDKNLPNEKVLPKHSLLYEYFTVYNELTKVKYVTEGMRKPAFLSGEQKKAIVDLLFKTNRKVTVKQLKEDYFKKIECFDSVEISGVEDRFNASLGTYHDLLKIIKDKDFLDNEENEDILEDIVLTLTLFEDREMIEERLKTYAHLFDDKVMKQLKRRRYTGWGRLSRKLINGIRDKQSGKTILDFLKSDGFANRNFMQLIHDDSLTFKEDIQKAQVSGQGDSLHEHIANLAGSPAIKKGILQTVKVVDELVKVMGRHKPENIVIEMARENQTTQKGQKNSRERMKRIEEGIKELGSQILKEHPVENTQLQNEKLYLYYLQNGRDMYVDQELDINRLSDYDVDHIVPQSFLKDDSIDNKVLTRSDKARGKSDNVPSEEVVKKMKNYWRQLLNAKLITQRKFDNLTKAERGGLSELDKAGFIKRQLVETRQITKHVAQILDSRMNTKYDENDKLIREVKVITLKSKLVSDFRKDFQFYKVREINNYHHAHDAYLNAVVGTALIKKYPKLESEFVYGDYKVYDVRKMIAKSEQEIGKATAKYFFYSNIMNFFKTEITLANGEIRKRPLIETNGETGEIVWDKGRDFATVRKVLSMPQVNIVKKTEVQTGGFSKESILPKRNSDKLIARKKDWDPKKYGGFDSPTVAYSVLVVAKVEKGKSKKLKSVKELLGITIMERSSFEKNPIDFLEAKGYKEVKKDLIIKLPKYSLFELENGRKRMLASAGELQKGNELALPSKYVNFLYLASHYEKLKGSPEDNEQKQLFVEQHKHYLDEIIEQISEFSKRVILADANLDKVLSAYNKHRDKPIREQAENIIHLFTLTNLGAPAAFKYFDTTIDRKRYTSTKEVLDATLIHQSITGLYETRIDLSQLGGDGGPAPEAAAKGGGGGTVSLQDEHRLFDIPVTTSLPDVWLQDFPQAWAETGGLGRAKCQAPIIIDLKPTAVPVSIKQYPMSLEAHMGIRQHIIKFLELGVLRPCRSPWNTPLLPVKKPGTQDYRPVQDLREINKRTVDIHPTVPNPYNLLSTLKPDYSWYTVLDLKDAFFCLPLAPQSQELFAFEWKDPERGISGQLTWTRLPQGFKNSPTLFNEALHRDLTDFRTQHPEVTLLQYVDDLLLAAPTKKACTQGTRHLLQELGEKGYRASAKKAQICQTKVTYLGYILSEGKRWLTPGRIETVARIPPPRNPREVREFLGTAGFCRLWIPGFAELAAPLYALTKPSTPFTWQTEHQLAFEALKKALLSAPALGLPDTSKPFTLFLDERQGIAKGVLTQKLGPWKRPVAYLSKKLDPVAAGWPPCLRIMAATAMLVKDSAKLTLGQPLTVITPHTLEAIVRQPPDRWITNARLTHYQALLLDTDRVQFGPPVTLNPATLLPVPENQPSPHDCRQVLAETHGTREDLKDQELPDADHTWYTDGSSYLDSGTRRAGAAVVDGHNTIWAQSLPPGTSAQKAELIALTKALELSKGKKANIYTDSRYAFATAHTHGSIYERRGWLTSEGKEIKNKAEIIALLKALFLPQEVAIIHCPGHQKGQDPVAVGNRQADRVARQAAMAEVLTLATEPDNTSHITAGKRTADGSEFEKRTADGSEFESPKKKAKVE

SEQ ID NO: 1582 - protein, 2100 aa, synthetic construct
MPAAKRVKLDGGDKKYSIGLDIGTNSVGWAVITDEYKVPSKKFKVLGNTDRHSIKKNLIGALLFDSGETAEATRLKRTARRRYTRRKNRICYLQEIFSNEMAKVDDSFFHRLEESFLVEEDKKHERHPIFGNIVDEVAYHEKYPTIYHLRKKLVDSTDKADLRLIYLALAHMIKFRGHFLIEGDLNPDNSDVDKLFIQLVQTYNQLFEENPINASGVDAKAILSARLSKSRRLENLIAQLPGEKKNGLFGNLIALSLGLTPNFKSNFDLAEDAKLQLSKDTYDDDLDNLLAQIGDQYADLFLAAKNLSDAILLSDILRVNTEITKAPLSASMIKRYDEHHQDLTLLKALVRQQLPEKYKEIFFDQSKNGYAGYIDGGASQEEFYKFIKPILEKMDGTEELLVKLNREDLLRKQRTFDNGSIPHQIHLGELHAILRRQEDFYPFLKDNREKIEKILTFRIPYYVGPLARGNSRFAWMTRKSEETITPWNFEEVVDKGASAQSFIERMTNFDKNLPNEKVLPKHSLLYEYFTVYNELTKVKYVTEGMRKPAFLSGEQKKAIVDLLFKTNRKVTVKQLKEDYFKKIECFDSVEISGVEDRFNASLGTYHDLLKIIKDKDFLDNEENEDILEDIVLTLTLFEDREMIEERLKTYAHLFDDKVMKQLKRRRYTGWGRLSRKLINGIRDKQSGKTILDFLKSDGFANRNFMQLIHDDSLTFKEDIQKAQVSGQGDSLHEHIANLAGSPAIKKGILQTVKVVDELVKVMGRHKPENIVIEMARENQTTQKGQKNSRERMKRIEEGIKELGSQILKEHPVENTQLQNEKLYLYYLQNGRDMYVDQELDINRLSDYDVDHIVPQSFLKDDSIDNKVLTRSDKARGKSDNVPSEEVVKKMKNYWRQLLNAKLITQRKFDNLTKAERGGLSELDKAGFIKRQLVETRQITKHVAQILDSRMNTKYDENDKLIREVKVITLKSKLVSDFRKDFQFYKVREINNYHHAHDAYLNAVVGTALIKKYPKLESEFVYGDYKVYDVRKMIAKSEQEIGKATAKYFFYSNIMNFFKTEITLANGEIRKRPLIETNGETGEIVWDKGRDFATVRKVLSMPQVNIVKKTEVQTGGFSKESILPKRNSDKLIARKKDWDPKKYGGFDSPTVAYSVLVVAKVEKGKSKKLKSVKELLGITIMERSSFEKNPIDFLEAKGYKEVKKDLIIKLPKYSLFELENGRKRMLASAGELQKGNELALPSKYVNFLYLASHYEKLKGSPEDNEQKQLFVEQHKHYLDEIIEQISEFSKRVILADANLDKVLSAYNKHRDKPIREQAENIIHLFTLTNLGAPAAFKYFDTTIDRKRYTSTKEVLDATLIHQSITGLYETRIDLSQLGGDGGGSSGSSGSSGGTVSLQDEHRLFDIPVTTSLPDVWLQDFPQAWAETGGLGRAKCQAPIIIDLKPTAVPVSIKQYPMSLEAHMGIRQHIIKFLELGVLRPCRSPWNTPLLPVKKPGTQDYRPVQDLREINKRTVDIHPTVPNPYNLLSTLKPDYSWYTVLDLKDAFFCLPLAPQSQELFAFEWKDPERGISGQLTWTRLPQGFKNSPTLFNEALHRDLTDFRTQHPEVTLLQYVDDLLLAAPTKKACTQGTRHLLQELGEKGYRASAKKAQICQTKVTYLGYILSEGKRWLTPGRIETVARIPPPRNPREVREFLGTAGFCRLWIPGFAELAAPLYALTKPSTPFTWQTEHQLAFEALKKALLSAPALGLPDTSKPFTLFLDERQGIAKGVLTQKLGPWKRPVAYLSKKLDPVAAGWPPCLRIMAATAMLVKDSAKLTLGQPLTVITPHTLEAIVRQPPDRWITNARLTHYQALLLDTDRVQFGPPVTLNPATLLPVPENQPSPHDCRQVLAETHGTREDLKDQELPDADHTWYTDGSSYLDSGTRRAGAAVVDGHNTIWAQSLPPGTSAQKAELIALTKALELSKGKKANIYTDSRYAFATAHTHGSIYERRGWLTSEGKEIKNKAEIIALLKALFLPQEVAIIHCPGHQKGQDPVAVGNRQADRVARQAAMAEVLTLATEPDNTSHITAGKRTADGSEFEKRTADGSEFESPKKKAKVE

SEQ ID NO: 1583 - protein, 2099 aa, synthetic construct
MPAAKRVKLDGGDKKYSIGLDIGTNSVGWAVITDEYKVPSKKFKVLGNTDRHSIKKNLIGALLFDSGETAEATRLKRTARRRYTRRKNRICYLQEIFSNEMAKVDDSFFHRLEESFLVEEDKKHERHPIFGNIVDEVAYHEKYPTIYHLRKKLVDSTDKADLRLIYLALAHMIKFRGHFLIEGDLNPDNSDVDKLFIQLVQTYNQLFEENPINASGVDAKAILSARLSKSRRLENLIAQLPGEKKNGLFGNLIALSLGLTPNFKSNFDLAEDAKLQLSKDTYDDDLDNLLAQIGDQYADLFLAAKNLSDAILLSDILRVNTEITKAPLSASMIKRYDEHHQDLTLLKALVRQQLPEKYKEIFFDQSKNGYAGYIDGGASQEEFYKFIKPILEKMDGTEELLVKLNREDLLRKQRTFDNGSIPHQIHLGELHAILRRQEDFYPFLKDNREKIEKILTFRIPYYVGPLARGNSRFAWMTRKSEETITPWNFEEVVDKGASAQSFIERMTNFDKNLPNEKVLPKHSLLYEYFTVYNELTKVKYVTEGMRKPAFLSGEQKKAIVDLLFKTNRKVTVKQLKEDYFKKIECFDSVEISGVEDRFNASLGTYHDLLKIIKDKDFLDNEENEDILEDIVLTLTLFEDREMIEERLKTYAHLFDDKVMKQLKRRRYTGWGRLSRKLINGIRDKQSGKTILDFLKSDGFANRNFMQLIHDDSLTFKEDIQKAQVSGQGDSLHEHIANLAGSPAIKKGILQTVKVVDELVKVMGRHKPENIVIEMARENQTTQKGQKNSRERMKRIEEGIKELGSQILKEHPVENTQLQNEKLYLYYLQNGRDMYVDQELDINRLSDYDVDHIVPQSFLKDDSIDNKVLTRSDKARGKSDNVPSEEVVKKMKNYWRQLLNAKLITQRKFDNLTKAERGGLSELDKAGFIKRQLVETRQITKHVAQILDSRMNTKYDENDKLIREVKVITLKSKLVSDFRKDFQFYKVREINNYHHAHDAYLNAVVGTALIKKYPKLESEFVYGDYKVYDVRKMIAKSEQEIGKATAKYFFYSNIMNFFKTEITLANGEIRKRPLIETNGETGEIVWDKGRDFATVRKVLSMPQVNIVKKTEVQTGGFSKESILPKRNSDKLIARKKDWDPKKYGGFDSPTVAYSVLVVAKVEKGKSKKLKSVKELLGITIMERSSFEKNPIDFLEAKGYKEVKKDLIIKLPKYSLFELENGRKRMLASAGELQKGNELALPSKYVNFLYLASHYEKLKGSPEDNEQKQLFVEQHKHYLDEIIEQISEFSKRVILADANLDKVLSAYNKHRDKPIREQAENIIHLFTLTNLGAPAAFKYFDTTIDRKRYTSTKEVLDATLIHQSITGLYETRIDLSQLGGDGGEAAAKGSSGGTVSLQDEHRLFDIPVTTSLPDVWLQDFPQAWAETGGLGRAKCQAPIIIDLKPTAVPVSIKQYPMSLEAHMGIRQHIIKFLELGVLRPCRSPWNTPLLPVKKPGTQDYRPVQDLREINKRTVDIHPTVPNPYNLLSTLKPDYSWYTVLDLKDAFFCLPLAPQSQELFAFEWKDPERGISGQLTWTRLPQGFKNSPTLFNEALHRDLTDFRTQHPEVTLLQYVDDLLLAAPTKKACTQGTRHLLQELGEKGYRASAKKAQICQTKVTYLGYILSEGKRWLTPGRIETVARIPPPRNPREVREFLGTAGFCRLWIPGFAELAAPLYALTKPSTPFTWQTEHQLAFEALKKALLSAPALGLPDTSKPFTLFLDERQGIAKGVLTQKLGPWKRPVAYLSKKLDPVAAGWPPCLRIMAATAMLVKDSAKLTLGQPLTVITPHTLEAIVRQPPDRWITNARLTHYQALLLDTDRVQFGPPVTLNPATLLPVPENQPSPHDCRQVLAETHGTREDLKDQELPDADHTWYTDGSSYLDSGTRRAGAAVVDGHNTIWAQSLPPGTSAQKAELIALTKALELSKGKKANIYTDSRYAFATAHTHGSIYERRGWLTSEGKEIKNKAEIIALLKALFLPQEVAIIHCPGHQKGQDPVAVGNRQADRVARQAAMAEVLTLATEPDNTSHITAGKRTADGSEFEKRTADGSEFESPKKKAKVE

SEQ ID NO: 1584 - protein, 2100 aa, synthetic construct
MPAAKRVKLDGGDKKYSIGLDIGTNSVGWAVITDEYKVPSKKFKVLGNTDRHSIKKNLIGALLFDSGETAEATRLKRTARRRYTRRKNRICYLQEIFSNEMAKVDDSFFHRLEESFLVEEDKKHERHPIFGNIVDEVAYHEKYPTIYHLRKKLVDSTDKADLRLIYLALAHMIKFRGHFLIEGDLNPDNSDVDKLFIQLVQTYNQLFEENPINASGVDAKAILSARLSKSRRLENLIAQLPGEKKNGLFGNLIALSLGLTPNFKSNFDLAEDAKLQLSKDTYDDDLDNLLAQIGDQYADLFLAAKNLSDAILLSDILRVNTEITKAPLSASMIKRYDEHHQDLTLLKALVRQQLPEKYKEIFFDQSKNGYAGYIDGGASQEEFYKFIKPILEKMDGTEELLVKLNREDLLRKQRTFDNGSIPHQIHLGELHAILRRQEDFYPFLKDNREKIEKILTFRIPYYVGPLARGNSRFAWMTRKSEETITPWNFEEVVDKGASAQSFIERMTNFDKNLPNEKVLPKHSLLYEYFTVYNELTKVKYVTEGMRKPAFLSGEQKKAIVDLLFKTNRKVTVKQLKEDYFKKIECFDSVEISGVEDRFNASLGTYHDLLKIIKDKDFLDNEENEDILEDIVLTLTLFEDREMIEERLKTYAHLFDDKVMKQLKRRRYTGWGRLSRKLINGIRDKQSGKTILDFLKSDGFANRNFMQLIHDDSLTFKEDIQKAQVSGQGDSLHEHIANLAGSPAIKKGILQTVKVVDELVKVMGRHKPENIVIEMARENQTTQKGQKNSRERMKRIEEGIKELGSQILKEHPVENTQLQNEKLYLYYLQNGRDMYVDQELDINRLSDYDVDHIVPQSFLKDDSIDNKVLTRSDKARGKSDNVPSEEVVKKMKNYWRQLLNAKLITQRKFDNLTKAERGGLSELDKAGFIKRQLVETRQITKHVAQILDSRMNTKYDENDKLIREVKVITLKSKLVSDFRKDFQFYKVREINNYHHAHDAYLNAVVGTALIKKYPKLESEFVYGDYKVYDVRKMIAKSEQEIGKATAKYFFYSNIMNFFKTEITLANGEIRKRPLIETNGETGEIVWDKGRDFATVRKVLSMPQVNIVKKTEVQTGGFSKESILPKRNSDKLIARKKDWDPKKYGGFDSPTVAYSVLVVAKVEKGKSKKLKSVKELLGITIMERSSFEKNPIDFLEAKGYKEVKKDLIIKLPKYSLFELENGRKRMLASAGELQKGNELALPSKYVNFLYLASHYEKLKGSPEDNEQKQLFVEQHKHYLDEIIEQISEFSKRVILADANLDKVLSAYNKHRDKPIREQAENIIHLFTLTNLGAPAAFKYFDTTIDRKRYTSTKEVLDATLIHQSITGLYETRIDLSQLGGDGGGSSGGSPAPGGTVSLQDEHRLFDIPVTTSLPDVWLQDFPQAWAETGGLGRAKCQAPIIIDLKPTAVPVSIKQYPMSLEAHMGIRQHIIKFLELGVLRPCRSPWNTPLLPVKKPGTQDYRPVQDLREINKRTVDIHPTVPNPYNLLSTLKPDYSWYTVLDLKDAFFCLPLAPQSQELFAFEWKDPERGISGQLTWTRLPQGFKNSPTLFNEALHRDLTDFRTQHPEVTLLQYVDDLLLAAPTKKACTQGTRHLLQELGEKGYRASAKKAQICQTKVTYLGYILSEGKRWLTPGRIETVARIPPPRNPREVREFLGTAGFCRLWIPGFAELAAPLYALTKPSTPFTWQTEHQLAFEALKKALLSAPALGLPDTSKPFTLFLDERQGIAKGVLTQKLGPWKRPVAYLSKKLDPVAAGWPPCLRIMAATAMLVKDSAKLTLGQPLTVITPHTLEAIVRQPPDRWITNARLTHYQALLLDTDRVQFGPPVTLNPATLLPVPENQPSPHDCRQVLAETHGTREDLKDQELPDADHTWYTDGSSYLDSGTRRAGAAVVDGHNTIWAQSLPPGTSAQKAELIALTKALELSKGKKANIYTDSRYAFATAHTHGSIYERRGWLTSEGKEIKNKAEIIALLKALFLPQEVAIIHCPGHQKGQDPVAVGNRQADRVARQAAMAEVLTLATEPDNTSHITAGKRTADGSEFEKRTADGSEFESPKKKAKVE

SEQ ID NO: 1585 - protein, 2102 aa, synthetic construct
MPAAKRVKLDGGDKKYSIGLDIGTNSVGWAVITDEYKVPSKKFKVLGNTDRHSIKKNLIGALLFDSGETAEATRLKRTARRRYTRRKNRICYLQEIFSNEMAKVDDSFFHRLEESFLVEEDKKHERHPIFGNIVDEVAYHEKYPTIYHLRKKLVDSTDKADLRLIYLALAHMIKFRGHFLIEGDLNPDNSDVDKLFIQLVQTYNQLFEENPINASGVDAKAILSARLSKSRRLENLIAQLPGEKKNGLFGNLIALSLGLTPNFKSNFDLAEDAKLQLSKDTYDDDLDNLLAQIGDQYADLFLAAKNLSDAILLSDILRVNTEITKAPLSASMIKRYDEHHQDLTLLKALVRQQLPEKYKEIFFDQSKNGYAGYIDGGASQEEFYKFIKPILEKMDGTEELLVKLNREDLLRKQRTFDNGSIPHQIHLGELHAILRRQEDFYPFLKDNREKIEKILTFRIPYYVGPLARGNSRFAWMTRKSEETITPWNFEEVVDKGASAQSFIERMTNFDKNLPNEKVLPKHSLLYEYFTVYNELTKVKYVTEGMRKPAFLSGEQKKAIVDLLFKTNRKVTVKQLKEDYFKKIECFDSVEISGVEDRFNASLGTYHDLLKIIKDKDFLDNEENEDILEDIVLTLTLFEDREMIEERLKTYAHLFDDKVMKQLKRRRYTGWGRLSRKLINGIRDKQSGKTILDFLKSDGFANRNFMQLIHDDSLTFKEDIQKAQVSGQGDSLHEHIANLAGSPAIKKGILQTVKVVDELVKVMGRHKPENIVIEMARENQTTQKGQKNSRERMKRIEEGIKELGSQILKEHPVENTQLQNEKLYLYYLQNGRDMYVDQELDINRLSDYDVDHIVPQSFLKDDSIDNKVLTRSDKARGKSDNVPSEEVVKKMKNYWRQLLNAKLITQRKFDNLTKAERGGLSELDKAGFIKRQLVETRQITKHVAQILDSRMNTKYDENDKLIREVKVITLKSKLVSDFRKDFQFYKVREINNYHHAHDAYLNAVVGTALIKKYPKLESEFVYGDYKVYDVRKMIAKSEQEIGKATAKYFFYSNIMNFFKTEITLANGEIRKRPLIETNGETGEIVWDKGRDFATVRKVLSMPQVNIVKKTEVQTGGFSKESILPKRNSDKLIARKKDWDPKKYGGFDSPTVAYSVLVVAKVEKGKSKKLKSVKELLGITIMERSSFEKNPIDFLEAKGYKEVKKDLIIKLPKYSLFELENGRKRMLASAGELQKGNELALPSKYVNFLYLASHYEKLKGSPEDNEQKQLFVEQHKHYLDEIIEQISEFSKRVILADANLDKVLSAYNKHRDKPIREQAENIIHLFTLTNLGAPAAFKYFDTTIDRKRYTSTKEVLDATLIHQSITGLYETRIDLSQLGGDGGGGGEAAAKGGSGGTVSLQDEHRLFDIPVTTSLPDVWLQDFPQAWAETGGLGRAKCQAPIIIDLKPTAVPVSIKQYPMSLEAHMGIRQHIIKFLELGVLRPCRSPWNTPLLPVKKPGTQDYRPVQDLREINKRTVDIHPTVPNPYNLLSTLKPDYSWYTVLDLKDAFFCLPLAPQSQELFAFEWKDPERGISGQLTWTRLPQGFKNSPTLFNEALHRDLTDFRTQHPEVTLLQYVDDLLLAAPTKKACTQGTRHLLQELGEKGYRASAKKAQICQTKVTYLGYILSEGKRWLTPGRIETVARIPPPRNPREVREFLGTAGFCRLWIPGFAELAAPLYALTKPSTPFTWQTEHQLAFEALKKALLSAPALGLPDTSKPFTLFLDERQGIAKGVLTQKLGPWKRPVAYLSKKLDPVAAGWPPCLRIMAATAMLVKDSAKLTLGQPLTVITPHTLEAIVRQPPDRWITNARLTHYQALLLDTDRVQFGPPVTLNPATLLPVPENQPSPHDCRQVLAETHGTREDLKDQELPDADHTWYTDGSSYLDSGTRRAGAAVVDGHNTIWAQSLPPGTSAQKAELIALTKALELSKGKKANIYTDSRYAFATAHTHGSIYERRGWLTSEGKEIKNKAEIIALLKALFLPQEVAIIHCPGHQKGQDPVAVGNRQADRVARQAAMAEVLTLATEPDNTSHITAGKRTADGSEFEKRTADGSEFESPKKKAKVE

SEQ ID NO: 1586 - protein, 2100 aa, synthetic construct
MPAAKRVKLDGGDKKYSIGLDIGTNSVGWAVITDEYKVPSKKFKVLGNTDRHSIKKNLIGALLFDSGETAEATRLKRTARRRYTRRKNRICYLQEIFSNEMAKVDDSFFHRLEESFLVEEDKKHERHPIFGNIVDEVAYHEKYPTIYHLRKKLVDSTDKADLRLIYLALAHMIKFRGHFLIEGDLNPDNSDVDKLFIQLVQTYNQLFEENPINASGVDAKAILSARLSKSRRLENLIAQLPGEKKNGLFGNLIALSLGLTPNFKSNFDLAEDAKLQLSKDTYDDDLDNLLAQIGDQYADLFLAAKNLSDAILLSDILRVNTEITKAPLSASMIKRYDEHHQDLTLLKALVRQQLPEKYKEIFFDQSKNGYAGYIDGGASQEEFYKFIKPILEKMDGTEELLVKLNREDLLRKQRTFDNGSIPHQIHLGELHAILRRQEDFYPFLKDNREKIEKILTFRIPYYVGPLARGNSRFAWMTRKSEETITPWNFEEVVDKGASAQSFIERMTNFDKNLPNEKVLPKHSLLYEYFTVYNELTKVKYVTEGMRKPAFLSGEQKKAIVDLLFKTNRKVTVKQLKEDYFKKIECFDSVEISGVEDRFNASLGTYHDLLKIIKDKDFLDNEENEDILEDIVLTLTLFEDREMIEERLKTYAHLFDDKVMKQLKRRRYTGWGRLSRKLINGIRDKQSGKTILDFLKSDGFANRNFMQLIHDDSLTFKEDIQKAQVSGQGDSLHEHIANLAGSPAIKKGILQTVKVVDELVKVMGRHKPENIVIEMARENQTTQKGQKNSRERMKRIEEGIKELGSQILKEHPVENTQLQNEKLYLYYLQNGRDMYVDQELDINRLSDYDVDHIVPQSFLKDDSIDNKVLTRSDKARGKSDNVPSEEVVKKMKNYWRQLLNAKLITQRKFDNLTKAERGGLSELDKAGFIKRQLVETRQITKHVAQILDSRMNTKYDENDKLIREVKVITLKSKLVSDFRKDFQFYKVREINNYHHAHDAYLNAVVGTALIKKYPKLESEFVYGDYKVYDVRKMIAKSEQEIGKATAKYFFYSNIMNFFKTEITLANGEIRKRPLIETNGETGEIVWDKGRDFATVRKVLSMPQVNIVKKTEVQTGGFSKESILPKRNSDKLIARKKDWDPKKYGGFDSPTVAYSVLVVAKVEKGKSKKLKSVKELLGITIMERSSFEKNPIDFLEAKGYKEVKKDLIIKLPKYSLFELENGRKRMLASAGELQKGNELALPSKYVNFLYLASHYEKLKGSPEDNEQKQLFVEQHKHYLDEIIEQISEFSKRVILADANLDKVLSAYNKHRDKPIREQAENIIHLFTLTNLGAPAAFKYFDTTIDRKRYTSTKEVLDATLIHQSITGLYETRIDLSQLGGDGGPAPGSSGGSGGTVSLQDEHRLFDIPVTTSLPDVWLQDFPQAWAETGGLGRAKCQAPIIIDLKPTAVPVSIKQYPMSLEAHMGIRQHIIKFLELGVLRPCRSPWNTPLLPVKKPGTQDYRPVQDLREINKRTVDIHPTVPNPYNLLSTLKPDYSWYTVLDLKDAFFCLPLAPQSQELFAFEWKDPERGISGQLTWTRLPQGFKNSPTLFNEALHRDLTDFRTQHPEVTLLQYVDDLLLAAPTKKACTQGTRHLLQELGEKGYRASAKKAQICQTKVTYLGYILSEGKRWLTPGRIETVARIPPPRNPREVREFLGTAGFCRLWIPGFAELAAPLYALTKPSTPFTWQTEHQLAFEALKKALLSAPALGLPDTSKPFTLFLDERQGIAKGVLTQKLGPWKRPVAYLSKKLDPVAAGWPPCLRIMAATAMLVKDSAKLTLGQPLTVITPHTLEAIVRQPPDRWITNARLTHYQALLLDTDRVQFGPPVTLNPATLLPVPENQPSPHDCRQVLAETHGTREDLKDQELPDADHTWYTDGSSYLDSGTRRAGAAVVDGHNTIWAQSLPPGTSAQKAELIALTKALELSKGKKANIYTDSRYAFATAHTHGSIYERRGWLTSEGKEIKNKAEIIALLKALFLPQEVAIIHCPGHQKGQDPVAVGNRQADRVARQAAMAEVLTLATEPDNTSHITAGKRTADGSEFEKRTADGSEFESPKKKAKVE

SEQ ID NO: 1587 - protein, 2101 aa, synthetic construct
MPAAKRVKLDGGDKKYSIGLDIGTNSVGWAVITDEYKVPSKKFKVLGNTDRHSIKKNLIGALLFDSGETAEATRLKRTARRRYTRRKNRICYLQEIFSNEMAKVDDSFFHRLEESFLVEEDKKHERHPIFGNIVDEVAYHEKYPTIYHLRKKLVDSTDKADLRLIYLALAHMIKFRGHFLIEGDLNPDNSDVDKLFIQLVQTYNQLFEENPINASGVDAKAILSARLSKSRRLENLIAQLPGEKKNGLFGNLIALSLGLTPNFKSNFDLAEDAKLQLSKDTYDDDLDNLLAQIGDQYADLFLAAKNLSDAILLSDILRVNTEITKAPLSASMIKRYDEHHQDLTLLKALVRQQLPEKYKEIFFDQSKNGYAGYIDGGASQEEFYKFIKPILEKMDGTEELLVKLNREDLLRKQRTFDNGSIPHQIHLGELHAILRRQEDFYPFLKDNREKIEKILTFRIPYYVGPLARGNSRFAWMTRKSEETITPWNFEEVVDKGASAQSFIERMTNFDKNLPNEKVLPKHSLLYEYFTVYNELTKVKYVTEGMRKPAFLSGEQKKAIVDLLFKTNRKVTVKQLKEDYFKKIECFDSVEISGVEDRFNASLGTYHDLLKIIKDKDFLDNEENEDILEDIVLTLTLFEDREMIEERLKTYAHLFDDKVMKQLKRRRYTGWGRLSRKLINGIRDKQSGKTILDFLKSDGFANRNFMQLIHDDSLTFKEDIQKAQVSGQGDSLHEHIANLAGSPAIKKGILQTVKVVDELVKVMGRHKPENIVIEMARENQTTQKGQKNSRERMKRIEEGIKELGSQILKEHPVENTQLQNEKLYLYYLQNGRDMYVDQELDINRLSDYDVDHIVPQSFLKDDSIDNKVLTRSDKARGKSDNVPSEEVVKKMKNYWRQLLNAKLITQRKFDNLTKAERGGLSELDKAGFIKRQLVETRQITKHVAQILDSRMNTKYDENDKLIREVKVITLKSKLVSDFRKDFQFYKVREINNYHHAHDAYLNAVVGTALIKKYPKLESEFVYGDYKVYDVRKMIAKSEQEIGKATAKYFFYSNIMNFFKTEITLANGEIRKRPLIETNGETGEIVWDKGRDFATVRKVLSMPQVNIVKKTEVQTGGFSKESILPKRNSDKLIARKKDWDPKKYGGFDSPTVAYSVLVVAKVEKGKSKKLKSVKELLGITIMERSSFEKNPIDFLEAKGYKEVKKDLIIKLPKYSLFELENGRKRMLASAGELQKGNELALPSKYVNFLYLASHYEKLKGSPEDNEQKQLFVEQHKHYLDEIIEQISEFSKRVILADANLDKVLSAYNKHRDKPIREQAENIIHLFTLTNLGAPAAFKYFDTTIDRKRYTSTKEVLDATLIHQSITGLYETRIDLSQLGGDGGEAAAKEAAAKGGTVSLQDEHRLFDIPVTTSLPDVWLQDFPQAWAETGGLGRAKCQAPIIIDLKPTAVPVSIKQYPMSLEAHMGIRQHIIKFLELGVLRPCRSPWNTPLLPVKKPGTQDYRPVQDLREINKRTVDIHPTVPNPYNLLSTLKPDYSWYTVLDLKDAFFCLPLAPQSQELFAFEWKDPERGISGQLTWTRLPQGFKNSPTLFNEALHRDLTDFRTQHPEVTLLQYVDDLLLAAPTKKACTQGTRHLLQELGEKGYRASAKKAQICQTKVTYLGYILSEGKRWLTPGRIETVARIPPPRNPREVREFLGTAGFCRLWIPGFAELAAPLYALTKPSTPFTWQTEHQLAFEALKKALLSAPALGLPDTSKPFTLFLDERQGIAKGVLTQKLGPWKRPVAYLSKKLDPVAAGWPPCLRIMAATAMLVKDSAKLTLGQPLTVITPHTLEAIVRQPPDRWITNARLTHYQALLLDTDRVQFGPPVTLNPATLLPVPENQPSPHDCRQVLAETHGTREDLKDQELPDADHTWYTDGSSYLDSGTRRAGAAVVDGHNTIWAQSLPPGTSAQKAELIALTKALELSKGKKANIYTDSRYAFATAHTHGSIYERRGWLTSEGKEIKNKAEIIALLKALFLPQEVAIIHCPGHQKGQDPVAVGNRQADRVARQAAMAEVLTLATEPDNTSHITAGKRTADGSEFEKRTADGSEFESPKKKAKVE

SEQ ID NO: 1588 - protein, 2109 aa, synthetic construct
MPAAKRVKLDGGDKKYSIGLDIGTNSVGWAVITDEYKVPSKKFKVLGNTDRHSIKKNLIGALLFDSGETAEATRLKRTARRRYTRRKNRICYLQEIFSNEMAKVDDSFFHRLEESFLVEEDKKHERHPIFGNIVDEVAYHEKYPTIYHLRKKLVDSTDKADLRLIYLALAHMIKFRGHFLIEGDLNPDNSDVDKLFIQLVQTYNQLFEENPINASGVDAKAILSARLSKSRRLENLIAQLPGEKKNGLFGNLIALSLGLTPNFKSNFDLAEDAKLQLSKDTYDDDLDNLLAQIGDQYADLFLAAKNLSDAILLSDILRVNTEITKAPLSASMIKRYDEHHQDLTLLKALVRQQLPEKYKEIFFDQSKNGYAGYIDGGASQEEFYKFIKPILEKMDGTEELLVKLNREDLLRKQRTFDNGSIPHQIHLGELHAILRRQEDFYPFLKDNREKIEKILTFRIPYYVGPLARGNSRFAWMTRKSEETITPWNFEEVVDKGASAQSFIERMTNFDKNLPNEKVLPKHSLLYEYFTVYNELTKVKYVTEGMRKPAFLSGEQKKAIVDLLFKTNRKVTVKQLKEDYFKKIECFDSVEISGVEDRFNASLGTYHDLLKIIKDKDFLDNEENEDILEDIVLTLTLFEDREMIEERLKTYAHLFDDKVMKQLKRRRYTGWGRLSRKLINGIRDKQSGKTILDFLKSDGFANRNFMQLIHDDSLTFKEDIQKAQVSGQGDSLHEHIANLAGSPAIKKGILQTVKVVDELVKVMGRHKPENIVIEMARENQTTQKGQKNSRERMKRIEEGIKELGSQILKEHPVENTQLQNEKLYLYYLQNGRDMYVDQELDINRLSDYDVDHIVPQSFLKDDSIDNKVLTRSDKARGKSDNVPSEEVVKKMKNYWRQLLNAKLITQRKFDNLTKAERGGLSELDKAGFIKRQLVETRQITKHVAQILDSRMNTKYDENDKLIREVKVITLKSKLVSDFRKDFQFYKVREINNYHHAHDAYLNAVVGTALIKKYPKLESEFVYGDYKVYDVRKMIAKSEQEIGKATAKYFFYSNIMNFFKTEITLANGEIRKRPLIETNGETGEIVWDKGRDFATVRKVLSMPQVNIVKKTEVQTGGFSKESILPKRNSDKLIARKKDWDPKKYGGFDSPTVAYSVLVVAKVEKGKSKKLKSVKELLGITIMERSSFEKNPIDFLEAKGYKEVKKDLIIKLPKYSLFELENGRKRMLASAGELQKGNELALPSKYVNFLYLASHYEKLKGSPEDNEQKQLFVEQHKHYLDEIIEQISEFSKRVILADANLDKVLSAYNKHRDKPIREQAENIIHLFTLTNLGAPAAFKYFDTTIDRKRYTSTKEVLDATLIHQSITGLYETRIDLSQLGGDGGGSSGSSGSSGSSGSSGSSGGTVSLQDEHRLFDIPVTTSLPDVWLQDFPQAWAETGGLGRAKCQAPIIIDLKPTAVPVSIKQYPMSLEAHMGIRQHIIKFLELGVLRPCRSPWNTPLLPVKKPGTQDYRPVQDLREINKRTVDIHPTVPNPYNLLSTLKPDYSWYTVLDLKDAFFCLPLAPQSQELFAFEWKDPERGISGQLTWTRLPQGFKNSPTLFNEALHRDLTDFRTQHPEVTLLQYVDDLLLAAPTKKACTQGTRHLLQELGEKGYRASAKKAQICQTKVTYLGYILSEGKRWLTPGRIETVARIPPPRNPREVREFLGTAGFCRLWIPGFAELAAPLYALTKPSTPFTWQTEHQLAFEALKKALLSAPALGLPDTSKPFTLFLDERQGIAKGVLTQKLGPWKRPVAYLSKKLDPVAAGWPPCLRIMAATAMLVKDSAKLTLGQPLTVITPHTLEAIVRQPPDRWITNARLTHYQALLLDTDRVQFGPPVTLNPATLLPVPENQPSPHDCRQVLAETHGTREDLKDQELPDADHTWYTDGSSYLDSGTRRAGAAVVDGHNTIWAQSLPPGTSAQKAELIALTKALELSKGKKANIYTDSRYAFATAHTHGSIYERRGWLTSEGKEIKNKAEIIALLKALFLPQEVAIIHCPGHQKGQDPVAVGNRQADRVARQAAMAEVLTLATEPDNTSHITAGKRTADGSEFEKRTADGSEFESPKKKAKVE

SEQ ID NO: 1589 - protein, 2102 aa, synthetic construct
MPAAKRVKLDGGDKKYSIGLDIGTNSVGWAVITDEYKVPSKKFKVLGNTDRHSIKKNLIGALLFDSGETAEATRLKRTARRRYTRRKNRICYLQEIFSNEMAKVDDSFFHRLEESFLVEEDKKHERHPIFGNIVDEVAYHEKYPTIYHLRKKLVDSTDKADLRLIYLALAHMIKFRGHFLIEGDLNPDNSDVDKLFIQLVQTYNQLFEENPINASGVDAKAILSARLSKSRRLENLIAQLPGEKKNGLFGNLIALSLGLTPNFKSNFDLAEDAKLQLSKDTYDDDLDNLLAQIGDQYADLFLAAKNLSDAILLSDILRVNTEITKAPLSASMIKRYDEHHQDLTLLKALVRQQLPEKYKEIFFDQSKNGYAGYIDGGASQEEFYKFIKPILEKMDGTEELLVKLNREDLLRKQRTFDNGSIPHQIHLGELHAILRRQEDFYPFLKDNREKIEKILTFRIPYYVGPLARGNSRFAWMTRKSEETITPWNFEEVVDKGASAQSFIERMTNFDKNLPNEKVLPKHSLLYEYFTVYNELTKVKYVTEGMRKPAFLSGEQKKAIVDLLFKTNRKVTVKQLKEDYFKKIECFDSVEISGVEDRFNASLGTYHDLLKIIKDKDFLDNEENEDILEDIVLTLTLFEDREMIEERLKTYAHLFDDKVMKQLKRRRYTGWGRLSRKLINGIRDKQSGKTILDFLKSDGFANRNFMQLIHDDSLTFKEDIQKAQVSGQGDSLHEHIANLAGSPAIKKGILQTVKVVDELVKVMGRHKPENIVIEMARENQTTQKGQKNSRERMKRIEEGIKELGSQILKEHPVENTQLQNEKLYLYYLQNGRDMYVDQELDINRLSDYDVDHIVPQSFLKDDSIDNKVLTRSDKARGKSDNVPSEEVVKKMKNYWRQLLNAKLITQRKFDNLTKAERGGLSELDKAGFIKRQLVETRQITKHVAQILDSRMNTKYDENDKLIREVKVITLKSKLVSDFRKDFQFYKVREINNYHHAHDAYLNAVVGTALIKKYPKLESEFVYGDYKVYDVRKMIAKSEQEIGKATAKYFFYSNIMNFFKTEITLANGEIRKRPLIETNGETGEIVWDKGRDFATVRKVLSMPQVNIVKKTEVQTGGFSKESILPKRNSDKLIARKKDWDPKKYGGFDSPTVAYSVLVVAKVEKGKSKKLKSVKELLGITIMERSSFEKNPIDFLEAKGYKEVKKDLIIKLPKYSLFELENGRKRMLASAGELQKGNELALPSKYVNFLYLASHYEKLKGSPEDNEQKQLFVEQHKHYLDEIIEQISEFSKRVILADANLDKVLSAYNKHRDKPIREQAENIIHLFTLTNLGAPAAFKYFDTTIDRKRYTSTKEVLDATLIHQSITGLYETRIDLSQLGGDGGGGGEAAAKPAPGGTVSLQDEHRLFDIPVTTSLPDVWLQDFPQAWAETGGLGRAKCQAPIIIDLKPTAVPVSIKQYPMSLEAHMGIRQHIIKFLELGVLRPCRSPWNTPLLPVKKPGTQDYRPVQDLREINKRTVDIHPTVPNPYNLLSTLKPDYSWYTVLDLKDAFFCLPLAPQSQELFAFEWKDPERGISGQLTWTRLPQGFKNSPTLFNEALHRDLTDFRTQHPEVTLLQYVDDLLLAAPTKKACTQGTRHLLQELGEKGYRASAKKAQICQTKVTYLGYILSEGKRWLTPGRIETVARIPPPRNPREVREFLGTAGFCRLWIPGFAELAAPLYALTKPSTPFTWQTEHQLAFEALKKALLSAPALGLPDTSKPFTLFLDERQGIAKGVLTQKLGPWKRPVAYLSKKLDPVAAGWPPCLRIMAATAMLVKDSAKLTLGQPLTVITPHTLEAIVRQPPDRWITNARLTHYQALLLDTDRVQFGPPVTLNPATLLPVPENQPSPHDCRQVLAETHGTREDLKDQELPDADHTWYTDGSSYLDSGTRRAGAAVVDGHNTIWAQSLPPGTSAQKAELIALTKALELSKGKKANIYTDSRYAFATAHTHGSIYERRGWLTSEGKEIKNKAEIIALLKALFLPQEVAIIHCPGHQKGQDPVAVGNRQADRVARQAAMAEVLTLATEPDNTSHITAGKRTADGSEFEKRTADGSEFESPKKKAKVE

SEQ ID NO: 1590 - protein, 2097 aa, synthetic construct
MPAAKRVKLDGGDKKYSIGLDIGTNSVGWAVITDEYKVPSKKFKVLGNTDRHSIKKNLIGALLFDSGETAEATRLKRTARRRYTRRKNRICYLQEIFSNEMAKVDDSFFHRLEESFLVEEDKKHERHPIFGNIVDEVAYHEKYPTIYHLRKKLVDSTDKADLRLIYLALAHMIKFRGHFLIEGDLNPDNSDVDKLFIQLVQTYNQLFEENPINASGVDAKAILSARLSKSRRLENLIAQLPGEKKNGLFGNLIALSLGLTPNFKSNFDLAEDAKLQLSKDTYDDDLDNLLAQIGDQYADLFLAAKNLSDAILLSDILRVNTEITKAPLSASMIKRYDEHHQDLTLLKALVRQQLPEKYKEIFFDQSKNGYAGYIDGGASQEEFYKFIKPILEKMDGTEELLVKLNREDLLRKQRTFDNGSIPHQIHLGELHAILRRQEDFYPFLKDNREKIEKILTFRIPYYVGPLARGNSRFAWMTRKSEETITPWNFEEVVDKGASAQSFIERMTNFDKNLPNEKVLPKHSLLYEYFTVYNELTKVKYVTEGMRKPAFLSGEQKKAIVDLLFKTNRKVTVKQLKEDYFKKIECFDSVEISGVEDRFNASLGTYHDLLKIIKDKDFLDNEENEDILEDIVLTLTLFEDREMIEERLKTYAHLFDDKVMKQLKRRRYTGWGRLSRKLINGIRDKQSGKTILDFLKSDGFANRNFMQLIHDDSLTFKEDIQKAQVSGQGDSLHEHIANLAGSPAIKKGILQTVKVVDELVKVMGRHKPENIVIEMARENQTTQKGQKNSRERMKRIEEGIKELGSQILKEHPVENTQLQNEKLYLYYLQNGRDMYVDQELDINRLSDYDVDHIVPQSFLKDDSIDNKVLTRSDKARGKSDNVPSEEVVKKMKNYWRQLLNAKLITQRKFDNLTKAERGGLSELDKAGFIKRQLVETRQITKHVAQILDSRMNTKYDENDKLIREVKVITLKSKLVSDFRKDFQFYKVREINNYHHAHDAYLNAVVGTALIKKYPKLESEFVYGDYKVYDVRKMIAKSEQEIGKATAKYFFYSNIMNFFKTEITLANGEIRKRPLIETNGETGEIVWDKGRDFATVRKVLSMPQVNIVKKTEVQTGGFSKESILPKRNSDKLIARKKDWDPKKYGGFDSPTVAYSVLVVAKVEKGKSKKLKSVKELLGITIMERSSFEKNPIDFLEAKGYKEVKKDLIIKLPKYSLFELENGRKRMLASAGELQKGNELALPSKYVNFLYLASHYEKLKGSPEDNEQKQLFVEQHKHYLDEIIEQISEFSKRVILADANLDKVLSAYNKHRDKPIREQAENIIHLFTLTNLGAPAAFKYFDTTIDRKRYTSTKEVLDATLIHQSITGLYETRIDLSQLGGDGGPAPGGGGGTVSLQDEHRLFDIPVTTSLPDVWLQDFPQAWAETGGLGRAKCQAPIIIDLKPTAVPVSIKQYPMSLEAHMGIRQHIIKFLELGVLRPCRSPWNTPLLPVKKPGTQDYRPVQDLREINKRTVDIHPTVPNPYNLLSTLKPDYSWYTVLDLKDAFFCLPLAPQSQELFAFEWKDPERGISGQLTWTRLPQGFKNSPTLFNEALHRDLTDFRTQHPEVTLLQYVDDLLLAAPTKKACTQGTRHLLQELGEKGYRASAKKAQICQTKVTYLGYILSEGKRWLTPGRIETVARIPPPRNPREVREFLGTAGFCRLWIPGFAELAAPLYALTKPSTPFTWQTEHQLAFEALKKALLSAPALGLPDTSKPFTLFLDERQGIAKGVLTQKLGPWKRPVAYLSKKLDPVAAGWPPCLRIMAATAMLVKDSAKLTLGQPLTVITPHTLEAIVRQPPDRWITNARLTHYQALLLDTDRVQFGPPVTLNPATLLPVPENQPSPHDCRQVLAETHGTREDLKDQELPDADHTWYTDGSSYLDSGTRRAGAAVVDGHNTIWAQSLPPGTSAQKAELIALTKALELSKGKKANIYTDSRYAFATAHTHGSIYERRGWLTSEGKEIKNKAEIIALLKALFLPQEVAIIHCPGHQKGQDPVAVGNRQADRVARQAAMAEVLTLATEPDNTSHITAGKRTADGSEFEKRTADGSEFESPKKKAKVE

SEQ ID NO: 1591 - protein, 2100 aa, synthetic construct
MPAAKRVKLDGGDKKYSIGLDIGTNSVGWAVITDEYKVPSKKFKVLGNTDRHSIKKNLIGALLFDSGETAEATRLKRTARRRYTRRKNRICYLQEIFSNEMAKVDDSFFHRLEESFLVEEDKKHERHPIFGNIVDEVAYHEKYPTIYHLRKKLVDSTDKADLRLIYLALAHMIKFRGHFLIEGDLNPDNSDVDKLFIQLVQTYNQLFEENPINASGVDAKAILSARLSKSRRLENLIAQLPGEKKNGLFGNLIALSLGLTPNFKSNFDLAEDAKLQLSKDTYDDDLDNLLAQIGDQYADLFLAAKNLSDAILLSDILRVNTEITKAPLSASMIKRYDEHHQDLTLLKALVRQQLPEKYKEIFFDQSKNGYAGYIDGGASQEEFYKFIKPILEKMDGTEELLVKLNREDLLRKQRTFDNGSIPHQIHLGELHAILRRQEDFYPFLKDNREKIEKILTFRIPYYVGPLARGNSRFAWMTRKSEETITPWNFEEVVDKGASAQSFIERMTNFDKNLPNEKVLPKHSLLYEYFTVYNELTKVKYVTEGMRKPAFLSGEQKKAIVDLLFKTNRKVTVKQLKEDYFKKIECFDSVEISGVEDRFNASLGTYHDLLKIIKDKDFLDNEENEDILEDIVLTLTLFEDREMIEERLKTYAHLFDDKVMKQLKRRRYTGWGRLSRKLINGIRDKQSGKTILDFLKSDGFANRNFMQLIHDDSLTFKEDIQKAQVSGQGDSLHEHIANLAGSPAIKKGILQTVKVVDELVKVMGRHKPENIVIEMARENQTTQKGQKNSRERMKRIEEGIKELGSQILKEHPVENTQLQNEKLYLYYLQNGRDMYVDQELDINRLSDYDVDHIVPQSFLKDDSIDNKVLTRSDKARGKSDNVPSEEVVKKMKNYWRQLLNAKLITQRKFDNLTKAERGGLSELDKAGFIKRQLVETRQITKHVAQILDSRMNTKYDENDKLIREVKVITLKSKLVSDFRKDFQFYKVREINNYHHAHDAYLNAVVGTALIKKYPKLESEFVYGDYKVYDVRKMIAKSEQEIGKATAKYFFYSNIMNFFKTEITLANGEIRKRPLIETNGETGEIVWDKGRDFATVRKVLSMPQVNIVKKTEVQTGGFSKESILPKRNSDKLIARKKDWDPKKYGGFDSPTVAYSVLVVAKVEKGKSKKLKSVKELLGITIMERSSFEKNPIDFLEAKGYKEVKKDLIIKLPKYSLFELENGRKRMLASAGELQKGNELALPSKYVNFLYLASHYEKLKGSPEDNEQKQLFVEQHKHYLDEIIEQISEFSKRVILADANLDKVLSAYNKHRDKPIREQAENIIHLFTLTNLGAPAAFKYFDTTIDRKRYTSTKEVLDATLIHQSITGLYETRIDLSQLGGDGGGGSPAPGSSGGTVSLQDEHRLFDIPVTTSLPDVWLQDFPQAWAETGGLGRAKCQAPIIIDLKPTAVPVSIKQYPMSLEAHMGIRQHIIKFLELGVLRPCRSPWNTPLLPVKKPGTQDYRPVQDLREINKRTVDIHPTVPNPYNLLSTLKPDYSWYTVLDLKDAFFCLPLAPQSQELFAFEWKDPERGISGQLTWTRLPQGFKNSPTLFNEALHRDLTDFRTQHPEVTLLQYVDDLLLAAPTKKACTQGTRHLLQELGEKGYRASAKKAQICQTKVTYLGYILSEGKRWLTPGRIETVARIPPPRNPREVREFLGTAGFCRLWIPGFAELAAPLYALTKPSTPFTWQTEHQLAFEALKKALLSAPALGLPDTSKPFTLFLDERQGIAKGVLTQKLGPWKRPVAYLSKKLDPVAAGWPPCLRIMAATAMLVKDSAKLTLGQPLTVITPHTLEAIVRQPPDRWITNARLTHYQALLLDTDRVQFGPPVTLNPATLLPVPENQPSPHDCRQVLAETHGTREDLKDQELPDADHTWYTDGSSYLDSGTRRAGAAVVDGHNTIWAQSLPPGTSAQKAELIALTKALELSKGKKANIYTDSRYAFATAHTHGSIYERRGWLTSEGKEIKNKAEIIALLKALFLPQEVAIIHCPGHQKGQDPVAVGNRQADRVARQAAMAEVLTLATEPDNTSHITAGKRTADGSEFEKRTADGSEFESPKKKAKVE

SEQ ID NO: 1592 - protein, 2097 aa, synthetic construct
MPAAKRVKLDGGDKKYSIGLDIGTNSVGWAVITDEYKVPSKKFKVLGNTDRHSIKKNLIGALLFDSGETAEATRLKRTARRRYTRRKNRICYLQEIFSNEMAKVDDSFFHRLEESFLVEEDKKHERHPIFGNIVDEVAYHEKYPTIYHLRKKLVDSTDKADLRLIYLALAHMIKFRGHFLIEGDLNPDNSDVDKLFIQLVQTYNQLFEENPINASGVDAKAILSARLSKSRRLENLIAQLPGEKKNGLFGNLIALSLGLTPNFKSNFDLAEDAKLQLSKDTYDDDLDNLLAQIGDQYADLFLAAKNLSDAILLSDILRVNTEITKAPLSASMIKRYDEHHQDLTLLKALVRQQLPEKYKEIFFDQSKNGYAGYIDGGASQEEFYKFIKPILEKMDGTEELLVKLNREDLLRKQRTFDNGSIPHQIHLGELHAILRRQEDFYPFLKDNREKIEKILTFRIPYYVGPLARGNSRFAWMTRKSEETITPWNFEEVVDKGASAQSFIERMTNFDKNLPNEKVLPKHSLLYEYFTVYNELTKVKYVTEGMRKPAFLSGEQKKAIVDLLFKTNRKVTVKQLKEDYFKKIECFDSVEISGVEDRFNASLGTYHDLLKIIKDKDFLDNEENEDILEDIVLTLTLFEDREMIEERLKTYAHLFDDKVMKQLKRRRYTGWGRLSRKLINGIRDKQSGKTILDFLKSDGFANRNFMQLIHDDSLTFKEDIQKAQVSGQGDSLHEHIANLAGSPAIKKGILQTVKVVDELVKVMGRHKPENIVIEMARENQTTQKGQKNSRERMKRIEEGIKELGSQILKEHPVENTQLQNEKLYLYYLQNGRDMYVDQELDINRLSDYDVDHIVPQSFLKDDSIDNKVLTRSDKARGKSDNVPSEEVVKKMKNYWRQLLNAKLITQRKFDNLTKAERGGLSELDKAGFIKRQLVETRQITKHVAQILDSRMNTKYDENDKLIREVKVITLKSKLVSDFRKDFQFYKVREINNYHHAHDAYLNAVVGTALIKKYPKLESEFVYGDYKVYDVRKMIAKSEQEIGKATAKYFFYSNIMNFFKTEITLANGEIRKRPLIETNGETGEIVWDKGRDFATVRKVLSMPQVNIVKKTEVQTGGFSKESILPKRNSDKLIARKKDWDPKKYGGFDSPTVAYSVLVVAKVEKGKSKKLKSVKELLGITIMERSSFEKNPIDFLEAKGYKEVKKDLIIKLPKYSLFELENGRKRMLASAGELQKGNELALPSKYVNFLYLASHYEKLKGSPEDNEQKQLFVEQHKHYLDEIIEQISEFSKRVILADANLDKVLSAYNKHRDKPIREQAENIIHLFTLTNLGAPAAFKYFDTTIDRKRYTSTKEVLDATLIHQSITGLYETRIDLSQLGGDGGGSSPAPGGTVSLQDEHRLFDIPVTTSLPDVWLQDFPQAWAETGGLGRAKCQAPIIIDLKPTAVPVSIKQYPMSLEAHMGIRQHIIKFLELGVLRPCRSPWNTPLLPVKKPGTQDYRPVQDLREINKRTVDIHPTVPNPYNLLSTLKPDYSWYTVLDLKDAFFCLPLAPQSQELFAFEWKDPERGISGQLTWTRLPQGFKNSPTLFNEALHRDLTDFRTQHPEVTLLQYVDDLLLAAPTKKACTQGTRHLLQELGEKGYRASAKKAQICQTKVTYLGYILSEGKRWLTPGRIETVARIPPPRNPREVREFLGTAGFCRLWIPGFAELAAPLYALTKPSTPFTWQTEHQLAFEALKKALLSAPALGLPDTSKPFTLFLDERQGIAKGVLTQKLGPWKRPVAYLSKKLDPVAAGWPPCLRIMAATAMLVKDSAKLTLGQPLTVITPHTLEAIVRQPPDRWITNARLTHYQALLLDTDRVQFGPPVTLNPATLLPVPENQPSPHDCRQVLAETHGTREDLKDQELPDADHTWYTDGSSYLDSGTRRAGAAVVDGHNTIWAQSLPPGTSAQKAELIALTKALELSKGKKANIYTDSRYAFATAHTHGSIYERRGWLTSEGKEIKNKAEIIALLKALFLPQEVAIIHCPGHQKGQDPVAVGNRQADRVARQAAMAEVLTLATEPDNTSHITAGKRTADGSEFEKRTADGSEFESPKKKAKVE

SEQ ID NO: 1593 - protein, 2102 aa, synthetic construct
MPAAKRVKLDGGDKKYSIGLDIGTNSVGWAVITDEYKVPSKKFKVLGNTDRHSIKKNLIGALLFDSGETAEATRLKRTARRRYTRRKNRICYLQEIFSNEMAKVDDSFFHRLEESFLVEEDKKHERHPIFGNIVDEVAYHEKYPTIYHLRKKLVDSTDKADLRLIYLALAHMIKFRGHFLIEGDLNPDNSDVDKLFIQLVQTYNQLFEENPINASGVDAKAILSARLSKSRRLENLIAQLPGEKKNGLFGNLIALSLGLTPNFKSNFDLAEDAKLQLSKDTYDDDLDNLLAQIGDQYADLFLAAKNLSDAILLSDILRVNTEITKAPLSASMIKRYDEHHQDLTLLKALVRQQLPEKYKEIFFDQSKNGYAGYIDGGASQEEFYKFIKPILEKMDGTEELLVKLNREDLLRKQRTFDNGSIPHQIHLGELHAILRRQEDFYPFLKDNREKIEKILTFRIPYYVGPLARGNSRFAWMTRKSEETITPWNFEEVVDKGASAQSFIERMTNFDKNLPNEKVLPKHSLLYEYFTVYNELTKVKYVTEGMRKPAFLSGEQKKAIVDLLFKTNRKVTVKQLKEDYFKKIECFDSVEISGVEDRFNASLGTYHDLLKIIKDKDFLDNEENEDILEDIVLTLTLFEDREMIEERLKTYAHLFDDKVMKQLKRRRYTGWGRLSRKLINGIRDKQSGKTILDFLKSDGFANRNFMQLIHDDSLTFKEDIQKAQVSGQGDSLHEHIANLAGSPAIKKGILQTVKVVDELVKVMGRHKPENIVIEMARENQTTQKGQKNSRERMKRIEEGIKELGSQILKEHPVENTQLQNEKLYLYYLQNGRDMYVDQELDINRLSDYDVDHIVPQSFLKDDSIDNKVLTRSDKARGKSDNVPSEEVVKKMKNYWRQLLNAKLITQRKFDNLTKAERGGLSELDKAGFIKRQLVETRQITKHVAQILDSRMNTKYDENDKLIREVKVITLKSKLVSDFRKDFQFYKVREINNYHHAHDAYLNAVVGTALIKKYPKLESEFVYGDYKVYDVRKMIAKSEQEIGKATAKYFFYSNIMNFFKTEITLANGEIRKRPLIETNGETGEIVWDKGRDFATVRKVLSMPQVNIVKKTEVQTGGFSKESILPKRNSDKLIARKKDWDPKKYGGFDSPTVAYSVLVVAKVEKGKSKKLKSVKELLGITIMERSSFEKNPIDFLEAKGYKEVKKDLIIKLPKYSLFELENGRKRMLASAGELQKGNELALPSKYVNFLYLASHYEKLKGSPEDNEQKQLFVEQHKHYLDEIIEQISEFSKRVILADANLDKVLSAYNKHRDKPIREQAENIIHLFTLTNLGAPAAFKYFDTTIDRKRYTSTKEVLDATLIHQSITGLYETRIDLSQLGGDGGEAAAKGGGGSSGGTVSLQDEHRLFDIPVTTSLPDVWLQDFPQAWAETGGLGRAKCQAPIIIDLKPTAVPVSIKQYPMSLEAHMGIRQHIIKFLELGVLRPCRSPWNTPLLPVKKPGTQDYRPVQDLREINKRTVDIHPTVPNPYNLLSTLKPDYSWYTVLDLKDAFFCLPLAPQSQELFAFEWKDPERGISGQLTWTRLPQGFKNSPTLFNEALHRDLTDFRTQHPEVTLLQYVDDLLLAAPTKKACTQGTRHLLQELGEKGYRASAKKAQICQTKVTYLGYILSEGKRWLTPGRIETVARIPPPRNPREVREFLGTAGFCRLWIPGFAELAAPLYALTKPSTPFTWQTEHQLAFEALKKALLSAPALGLPDTSKPFTLFLDERQGIAKGVLTQKLGPWKRPVAYLSKKLDPVAAGWPPCLRIMAATAMLVKDSAKLTLGQPLTVITPHTLEAIVRQPPDRWITNARLTHYQALLLDTDRVQFGPPVTLNPATLLPVPENQPSPHDCRQVLAETHGTREDLKDQELPDADHTWYTDGSSYLDSGTRRAGAAVVDGHNTIWAQSLPPGTSAQKAELIALTKALELSKGKKANIYTDSRYAFATAHTHGSIYERRGWLTSEGKEIKNKAEIIALLKALFLPQEVAIIHCPGHQKGQDPVAVGNRQADRVARQAAMAEVLTLATEPDNTSHITAGKRTADGSEFEKRTADGSEFESPKKKAKVE

SEQ ID NO: 1594 - protein, 2103 aa, synthetic construct
MPAAKRVKLDGGDKKYSIGLDIGTNSVGWAVITDEYKVPSKKFKVLGNTDRHSIKKNLIGALLFDSGETAEATRLKRTARRRYTRRKNRICYLQEIFSNEMAKVDDSFFHRLEESFLVEEDKKHERHPIFGNIVDEVAYHEKYPTIYHLRKKLVDSTDKADLRLIYLALAHMIKFRGHFLIEGDLNPDNSDVDKLFIQLVQTYNQLFEENPINASGVDAKAILSARLSKSRRLENLIAQLPGEKKNGLFGNLIALSLGLTPNFKSNFDLAEDAKLQLSKDTYDDDLDNLLAQIGDQYADLFLAAKNLSDAILLSDILRVNTEITKAPLSASMIKRYDEHHQDLTLLKALVRQQLPEKYKEIFFDQSKNGYAGYIDGGASQEEFYKFIKPILEKMDGTEELLVKLNREDLLRKQRTFDNGSIPHQIHLGELHAILRRQEDFYPFLKDNREKIEKILTFRIPYYVGPLARGNSRFAWMTRKSEETITPWNFEEVVDKGASAQSFIERMTNFDKNLPNEKVLPKHSLLYEYFTVYNELTKVKYVTEGMRKPAFLSGEQKKAIVDLLFKTNRKVTVKQLKEDYFKKIECFDSVEISGVEDRFNASLGTYHDLLKIIKDKDFLDNEENEDILEDIVLTLTLFEDREMIEERLKTYAHLFDDKVMKQLKRRRYTGWGRLSRKLINGIRDKQSGKTILDFLKSDGFANRNFMQLIHDDSLTFKEDIQKAQVSGQGDSLHEHIANLAGSPAIKKGILQTVKVVDELVKVMGRHKPENIVIEMARENQTTQKGQKNSRERMKRIEEGIKELGSQILKEHPVENTQLQNEKLYLYYLQNGRDMYVDQELDINRLSDYDVDHIVPQSFLKDDSIDNKVLTRSDKARGKSDNVPSEEVVKKMKNYWRQLLNAKLITQRKFDNLTKAERGGLSELDKAGFIKRQLVETRQITKHVAQILDSRMNTKYDENDKLIREVKVITLKSKLVSDFRKDFQFYKVREINNYHHAHDAYLNAVVGTALIKKYPKLESEFVYGDYKVYDVRKMIAKSEQEIGKATAKYFFYSNIMNFFKTEITLANGEIRKRPLIETNGETGEIVWDKGRDFATVRKVLSMPQVNIVKKTEVQTGGFSKESILPKRNSDKLIARKKDWDPKKYGGFDSPTVAYSVLVVAKVEKGKSKKLKSVKELLGITIMERSSFEKNPIDFLEAKGYKEVKKDLIIKLPKYSLFELENGRKRMLASAGELQKGNELALPSKYVNFLYLASHYEKLKGSPEDNEQKQLFVEQHKHYLDEIIEQISEFSKRVILADANLDKVLSAYNKHRDKPIREQAENIIHLFTLTNLGAPAAFKYFDTTIDRKRYTSTKEVLDATLIHQSITGLYETRIDLSQLGGDGGGSAGSAAGSGEFGGTVSLQDEHRLFDIPVTTSLPDVWLQDFPQAWAETGGLGRAKCQAPIIIDLKPTAVPVSIKQYPMSLEAHMGIRQHIIKFLELGVLRPCRSPWNTPLLPVKKPGTQDYRPVQDLREINKRTVDIHPTVPNPYNLLSTLKPDYSWYTVLDLKDAFFCLPLAPQSQELFAFEWKDPERGISGQLTWTRLPQGFKNSPTLFNEALHRDLTDFRTQHPEVTLLQYVDDLLLAAPTKKACTQGTRHLLQELGEKGYRASAKKAQICQTKVTYLGYILSEGKRWLTPGRIETVARIPPPRNPREVREFLGTAGFCRLWIPGFAELAAPLYALTKPSTPFTWQTEHQLAFEALKKALLSAPALGLPDTSKPFTLFLDERQGIAKGVLTQKLGPWKRPVAYLSKKLDPVAAGWPPCLRIMAATAMLVKDSAKLTLGQPLTVITPHTLEAIVRQPPDRWITNARLTHYQALLLDTDRVQFGPPVTLNPATLLPVPENQPSPHDCRQVLAETHGTREDLKDQELPDADHTWYTDGSSYLDSGTRRAGAAVVDGHNTIWAQSLPPGTSAQKAELIALTKALELSKGKKANIYTDSRYAFATAHTHGSIYERRGWLTSEGKEIKNKAEIIALLKALFLPQEVAIIHCPGHQKGQDPVAVGNRQADRVARQAAMAEVLTLATEPDNTSHITAGKRTADGSEFEKRTADGSEFESPKKKAKVE

SEQ ID NO: 1595 - protein, 2100 aa, synthetic construct
MPAAKRVKLDGGDKKYSIGLDIGTNSVGWAVITDEYKVPSKKFKVLGNTDRHSIKKNLIGALLFDSGETAEATRLKRTARRRYTRRKNRICYLQEIFSNEMAKVDDSFFHRLEESFLVEEDKKHERHPIFGNIVDEVAYHEKYPTIYHLRKKLVDSTDKADLRLIYLALAHMIKFRGHFLIEGDLNPDNSDVDKLFIQLVQTYNQLFEENPINASGVDAKAILSARLSKSRRLENLIAQLPGEKKNGLFGNLIALSLGLTPNFKSNFDLAEDAKLQLSKDTYDDDLDNLLAQIGDQYADLFLAAKNLSDAILLSDILRVNTEITKAPLSASMIKRYDEHHQDLTLLKALVRQQLPEKYKEIFFDQSKNGYAGYIDGGASQEEFYKFIKPILEKMDGTEELLVKLNREDLLRKQRTFDNGSIPHQIHLGELHAILRRQEDFYPFLKDNREKIEKILTFRIPYYVGPLARGNSRFAWMTRKSEETITPWNFEEVVDKGASAQSFIERMTNFDKNLPNEKVLPKHSLLYEYFTVYNELTKVKYVTEGMRKPAFLSGEQKKAIVDLLFKTNRKVTVKQLKEDYFKKIECFDSVEISGVEDRFNASLGTYHDLLKIIKDKDFLDNEENEDILEDIVLTLTLFEDREMIEERLKTYAHLFDDKVMKQLKRRRYTGWGRLSRKLINGIRDKQSGKTILDFLKSDGFANRNFMQLIHDDSLTFKEDIQKAQVSGQGDSLHEHIANLAGSPAIKKGILQTVKVVDELVKVMGRHKPENIVIEMARENQTTQKGQKNSRERMKRIEEGIKELGSQILKEHPVENTQLQNEKLYLYYLQNGRDMYVDQELDINRLSDYDVDHIVPQSFLKDDSIDNKVLTRSDKARGKSDNVPSEEVVKKMKNYWRQLLNAKLITQRKFDNLTKAERGGLSELDKAGFIKRQLVETRQITKHVAQILDSRMNTKYDENDKLIREVKVITLKSKLVSDFRKDFQFYKVREINNYHHAHDAYLNAVVGTALIKKYPKLESEFVYGDYKVYDVRKMIAKSEQEIGKATAKYFFYSNIMNFFKTEITLANGEIRKRPLIETNGETGEIVWDKGRDFATVRKVLSMPQVNIVKKTEVQTGGFSKESILPKRNSDKLIARKKDWDPKKYGGFDSPTVAYSVLVVAKVEKGKSKKLKSVKELLGITIMERSSFEKNPIDFLEAKGYKEVKKDLIIKLPKYSLFELENGRKRMLASAGELQKGNELALPSKYVNFLYLASHYEKLKGSPEDNEQKQLFVEQHKHYLDEIIEQISEFSKRVILADANLDKVLSAYNKHRDKPIREQAENIIHLFTLTNLGAPAAFKYFDTTIDRKRYTSTKEVLDATLIHQSITGLYETRIDLSQLGGDGGGGGPAPGGSGGTVSLQDEHRLFDIPVTTSLPDVWLQDFPQAWAETGGLGRAKCQAPIIIDLKPTAVPVSIKQYPMSLEAHMGIRQHIIKFLELGVLRPCRSPWNTPLLPVKKPGTQDYRPVQDLREINKRTVDIHPTVPNPYNLLSTLKPDYSWYTVLDLKDAFFCLPLAPQSQELFAFEWKDPERGISGQLTWTRLPQGFKNSPTLFNEALHRDLTDFRTQHPEVTLLQYVDDLLLAAPTKKACTQGTRHLLQELGEKGYRASAKKAQICQTKVTYLGYILSEGKRWLTPGRIETVARIPPPRNPREVREFLGTAGFCRLWIPGFAELAAPLYALTKPSTPFTWQTEHQLAFEALKKALLSAPALGLPDTSKPFTLFLDERQGIAKGVLTQKLGPWKRPVAYLSKKLDPVAAGWPPCLRIMAATAMLVKDSAKLTLGQPLTVITPHTLEAIVRQPPDRWITNARLTHYQALLLDTDRVQFGPPVTLNPATLLPVPENQPSPHDCRQVLAETHGTREDLKDQELPDADHTWYTDGSSYLDSGTRRAGAAVVDGHNTIWAQSLPPGTSAQKAELIALTKALELSKGKKANIYTDSRYAFATAHTHGSIYERRGWLTSEGKEIKNKAEIIALLKALFLPQEVAIIHCPGHQKGQDPVAVGNRQADRVARQAAMAEVLTLATEPDNTSHITAGKRTADGSEFEKRTADGSEFESPKKKAKVE

SEQ ID NO: 1596 - protein, 2102 aa, synthetic construct
MPAAKRVKLDGGDKKYSIGLDIGTNSVGWAVITDEYKVPSKKFKVLGNTDRHSIKKNLIGALLFDSGETAEATRLKRTARRRYTRRKNRICYLQEIFSNEMAKVDDSFFHRLEESFLVEEDKKHERHPIFGNIVDEVAYHEKYPTIYHLRKKLVDSTDKADLRLIYLALAHMIKFRGHFLIEGDLNPDNSDVDKLFIQLVQTYNQLFEENPINASGVDAKAILSARLSKSRRLENLIAQLPGEKKNGLFGNLIALSLGLTPNFKSNFDLAEDAKLQLSKDTYDDDLDNLLAQIGDQYADLFLAAKNLSDAILLSDILRVNTEITKAPLSASMIKRYDEHHQDLTLLKALVRQQLPEKYKEIFFDQSKNGYAGYIDGGASQEEFYKFIKPILEKMDGTEELLVKLNREDLLRKQRTFDNGSIPHQIHLGELHAILRRQEDFYPFLKDNREKIEKILTFRIPYYVGPLARGNSRFAWMTRKSEETITPWNFEEVVDKGASAQSFIERMTNFDKNLPNEKVLPKHSLLYEYFTVYNELTKVKYVTEGMRKPAFLSGEQKKAIVDLLFKTNRKVTVKQLKEDYFKKIECFDSVEISGVEDRFNASLGTYHDLLKIIKDKDFLDNEENEDILEDIVLTLTLFEDREMIEERLKTYAHLFDDKVMKQLKRRRYTGWGRLSRKLINGIRDKQSGKTILDFLKSDGFANRNFMQLIHDDSLTFKEDIQKAQVSGQGDSLHEHIANLAGSPAIKKGILQTVKVVDELVKVMGRHKPENIVIEMARENQTTQKGQKNSRERMKRIEEGIKELGSQILKEHPVENTQLQNEKLYLYYLQNGRDMYVDQELDINRLSDYDVDHIVPQSFLKDDSIDNKVLTRSDKARGKSDNVPSEEVVKKMKNYWRQLLNAKLITQRKFDNLTKAERGGLSELDKAGFIKRQLVETRQITKHVAQILDSRMNTKYDENDKLIREVKVITLKSKLVSDFRKDFQFYKVREINNYHHAHDAYLNAVVGTALIKKYPKLESEFVYGDYKVYDVRKMIAKSEQEIGKATAKYFFYSNIMNFFKTEITLANGEIRKRPLIETNGETGEIVWDKGRDFATVRKVLSMPQVNIVKKTEVQTGGFSKESILPKRNSDKLIARKKDWDPKKYGGFDSPTVAYSVLVVAKVEKGKSKKLKSVKELLGITIMERSSFEKNPIDFLEAKGYKEVKKDLIIKLPKYSLFELENGRKRMLASAGELQKGNELALPSKYVNFLYLASHYEKLKGSPEDNEQKQLFVEQHKHYLDEIIEQISEFSKRVILADANLDKVLSAYNKHRDKPIREQAENIIHLFTLTNLGAPAAFKYFDTTIDRKRYTSTKEVLDATLIHQSITGLYETRIDLSQLGGDGGGSSPAPEAAAKGGTVSLQDEHRLFDIPVTTSLPDVWLQDFPQAWAETGGLGRAKCQAPIIIDLKPTAVPVSIKQYPMSLEAHMGIRQHIIKFLELGVLRPCRSPWNTPLLPVKKPGTQDYRPVQDLREINKRTVDIHPTVPNPYNLLSTLKPDYSWYTVLDLKDAFFCLPLAPQSQELFAFEWKDPERGISGQLTWTRLPQGFKNSPTLFNEALHRDLTDFRTQHPEVTLLQYVDDLLLAAPTKKACTQGTRHLLQELGEKGYRASAKKAQICQTKVTYLGYILSEGKRWLTPGRIETVARIPPPRNPREVREFLGTAGFCRLWIPGFAELAAPLYALTKPSTPFTWQTEHQLAFEALKKALLSAPALGLPDTSKPFTLFLDERQGIAKGVLTQKLGPWKRPVAYLSKKLDPVAAGWPPCLRIMAATAMLVKDSAKLTLGQPLTVITPHTLEAIVRQPPDRWITNARLTHYQALLLDTDRVQFGPPVTLNPATLLPVPENQPSPHDCRQVLAETHGTREDLKDQELPDADHTWYTDGSSYLDSGTRRAGAAVVDGHNTIWAQSLPPGTSAQKAELIALTKALELSKGKKANIYTDSRYAFATAHTHGSIYERRGWLTSEGKEIKNKAEIIALLKALFLPQEVAIIHCPGHQKGQDPVAVGNRQADRVARQAAMAEVLTLATEPDNTSHITAGKRTADGSEFEKRTADGSEFESPKKKAKVE

SEQ ID NO: 1597 - protein, 2101 aa, synthetic construct
MPAAKRVKLDGGDKKYSIGLDIGTNSVGWAVITDEYKVPSKKFKVLGNTDRHSIKKNLIGALLFDSGETAEATRLKRTARRRYTRRKNRICYLQEIFSNEMAKVDDSFFHRLEESFLVEEDKKHERHPIFGNIVDEVAYHEKYPTIYHLRKKLVDSTDKADLRLIYLALAHMIKFRGHFLIEGDLNPDNSDVDKLFIQLVQTYNQLFEENPINASGVDAKAILSARLSKSRRLENLIAQLPGEKKNGLFGNLIALSLGLTPNFKSNFDLAEDAKLQLSKDTYDDDLDNLLAQIGDQYADLFLAAKNLSDAILLSDILRVNTEITKAPLSASMIKRYDEHHQDLTLLKALVRQQLPEKYKEIFFDQSKNGYAGYIDGGASQEEFYKFIKPILEKMDGTEELLVKLNREDLLRKQRTFDNGSIPHQIHLGELHAILRRQEDFYPFLKDNREKIEKILTFRIPYYVGPLARGNSRFAWMTRKSEETITPWNFEEVVDKGASAQSFIERMTNFDKNLPNEKVLPKHSLLYEYFTVYNELTKVKYVTEGMRKPAFLSGEQKKAIVDLLFKTNRKVTVKQLKEDYFKKIECFDSVEISGVEDRFNASLGTYHDLLKIIKDKDFLDNEENEDILEDIVLTLTLFEDREMIEERLKTYAHLFDDKVMKQLKRRRYTGWGRLSRKLINGIRDKQSGKTILDFLKSDGFANRNFMQLIHDDSLTFKEDIQKAQVSGQGDSLHEHIANLAGSPAIKKGILQTVKVVDELVKVMGRHKPENIVIEMARENQTTQKGQKNSRERMKRIEEGIKELGSQILKEHPVENTQLQNEKLYLYYLQNGRDMYVDQELDINRLSDYDVDHIVPQSFLKDDSIDNKVLTRSDKARGKSDNVPSEEVVKKMKNYWRQLLNAKLITQRKFDNLTKAERGGLSELDKAGFIKRQLVETRQITKHVAQILDSRMNTKYDENDKLIREVKVITLKSKLVSDFRKDFQFYKVREINNYHHAHDAYLNAVVGTALIKKYPKLESEFVYGDYKVYDVRKMIAKSEQEIGKATAKYFFYSNIMNFFKTEITLANGEIRKRPLIETNGETGEIVWDKGRDFATVRKVLSMPQVNIVKKTEVQTGGFSKESILPKRNSDKLIARKKDWDPKKYGGFDSPTVAYSVLVVAKVEKGKSKKLKSVKELLGITIMERSSFEKNPIDFLEAKGYKEVKKDLIIKLPKYSLFELENGRKRMLASAGELQKGNELALPSKYVNFLYLASHYEKLKGSPEDNEQKQLFVEQHKHYLDEIIEQISEFSKRVILADANLDKVLSAYNKHRDKPIREQAENIIHLFTLTNLGAPAAFKYFDTTIDRKRYTSTKEVLDATLIHQSITGLYETRIDLSQLGGDGGGGGGSGGGGSGGTVSLQDEHRLFDIPVTTSLPDVWLQDFPQAWAETGGLGRAKCQAPIIIDLKPTAVPVSIKQYPMSLEAHMGIRQHIIKFLELGVLRPCRSPWNTPLLPVKKPGTQDYRPVQDLREINKRTVDIHPTVPNPYNLLSTLKPDYSWYTVLDLKDAFFCLPLAPQSQELFAFEWKDPERGISGQLTWTRLPQGFKNSPTLFNEALHRDLTDFRTQHPEVTLLQYVDDLLLAAPTKKACTQGTRHLLQELGEKGYRASAKKAQICQTKVTYLGYILSEGKRWLTPGRIETVARIPPPRNPREVREFLGTAGFCRLWIPGFAELAAPLYALTKPSTPFTWQTEHQLAFEALKKALLSAPALGLPDTSKPFTLFLDERQGIAKGVLTQKLGPWKRPVAYLSKKLDPVAAGWPPCLRIMAATAMLVKDSAKLTLGQPLTVITPHTLEAIVRQPPDRWITNARLTHYQALLLDTDRVQFGPPVTLNPATLLPVPENQPSPHDCRQVLAETHGTREDLKDQELPDADHTWYTDGSSYLDSGTRRAGAAVVDGHNTIWAQSLPPGTSAQKAELIALTKALELSKGKKANIYTDSRYAFATAHTHGSIYERRGWLTSEGKEIKNKAEIIALLKALFLPQEVAIIHCPGHQKGQDPVAVGNRQADRVARQAAMAEVLTLATEPDNTSHITAGKRTADGSEFEKRTADGSEFESPKKKAKVE

SEQ ID NO: 1598 - protein, 2102 aa, synthetic construct
MPAAKRVKLDGGDKKYSIGLDIGTNSVGWAVITDEYKVPSKKFKVLGNTDRHSIKKNLIGALLFDSGETAEATRLKRTARRRYTRRKNRICYLQEIFSNEMAKVDDSFFHRLEESFLVEEDKKHERHPIFGNIVDEVAYHEKYPTIYHLRKKLVDSTDKADLRLIYLALAHMIKFRGHFLIEGDLNPDNSDVDKLFIQLVQTYNQLFEENPINASGVDAKAILSARLSKSRRLENLIAQLPGEKKNGLFGNLIALSLGLTPNFKSNFDLAEDAKLQLSKDTYDDDLDNLLAQIGDQYADLFLAAKNLSDAILLSDILRVNTEITKAPLSASMIKRYDEHHQDLTLLKALVRQQLPEKYKEIFFDQSKNGYAGYIDGGASQEEFYKFIKPILEKMDGTEELLVKLNREDLLRKQRTFDNGSIPHQIHLGELHAILRRQEDFYPFLKDNREKIEKILTFRIPYYVGPLARGNSRFAWMTRKSEETITPWNFEEVVDKGASAQSFIERMTNFDKNLPNEKVLPKHSLLYEYFTVYNELTKVKYVTEGMRKPAFLSGEQKKAIVDLLFKTNRKVTVKQLKEDYFKKIECFDSVEISGVEDRFNASLGTYHDLLKIIKDKDFLDNEENEDILEDIVLTLTLFEDREMIEERLKTYAHLFDDKVMKQLKRRRYTGWGRLSRKLINGIRDKQSGKTILDFLKSDGFANRNFMQLIHDDSLTFKEDIQKAQVSGQGDSLHEHIANLAGSPAIKKGILQTVKVVDELVKVMGRHKPENIVIEMARENQTTQKGQKNSRERMKRIEEGIKELGSQILKEHPVENTQLQNEKLYLYYLQNGRDMYVDQELDINRLSDYDVDHIVPQSFLKDDSIDNKVLTRSDKARGKSDNVPSEEVVKKMKNYWRQLLNAKLITQRKFDNLTKAERGGLSELDKAGFIKRQLVETRQITKHVAQILDSRMNTKYDENDKLIREVKVITLKSKLVSDFRKDFQFYKVREINNYHHAHDAYLNAVVGTALIKKYPKLESEFVYGDYKVYDVRKMIAKSEQEIGKATAKYFFYSNIMNFFKTEITLANGEIRKRPLIETNGETGEIVWDKGRDFATVRKVLSMPQVNIVKKTEVQTGGFSKESILPKRNSDKLIARKKDWDPKKYGGFDSPTVAYSVLVVAKVEKGKSKKLKSVKELLGITIMERSSFEKNPIDFLEAKGYKEVKKDLIIKLPKYSLFELENGRKRMLASAGELQKGNELALPSKYVNFLYLASHYEKLKGSPEDNEQKQLFVEQHKHYLDEIIEQISEFSKRVILADANLDKVLSAYNKHRDKPIREQAENIIHLFTLTNLGAPAAFKYFDTTIDRKRYTSTKEVLDATLIHQSITGLYETRIDLSQLGGDGGGGSPAPEAAAKGGTVSLQDEHRLFDIPVTTSLPDVWLQDFPQAWAETGGLGRAKCQAPIIIDLKPTAVPVSIKQYPMSLEAHMGIRQHIIKFLELGVLRPCRSPWNTPLLPVKKPGTQDYRPVQDLREINKRTVDIHPTVPNPYNLLSTLKPDYSWYTVLDLKDAFFCLPLAPQSQELFAFEWKDPERGISGQLTWTRLPQGFKNSPTLFNEALHRDLTDFRTQHPEVTLLQYVDDLLLAAPTKKACTQGTRHLLQELGEKGYRASAKKAQICQTKVTYLGYILSEGKRWLTPGRIETVARIPPPRNPREVREFLGTAGFCRLWIPGFAELAAPLYALTKPSTPFTWQTEHQLAFEALKKALLSAPALGLPDTSKPFTLFLDERQGIAKGVLTQKLGPWKRPVAYLSKKLDPVAAGWPPCLRIMAATAMLVKDSAKLTLGQPLTVITPHTLEAIVRQPPDRWITNARLTHYQALLLDTDRVQFGPPVTLNPATLLPVPENQPSPHDCRQVLAETHGTREDLKDQELPDADHTWYTDGSSYLDSGTRRAGAAVVDGHNTIWAQSLPPGTSAQKAELIALTKALELSKGKKANIYTDSRYAFATAHTHGSIYERRGWLTSEGKEIKNKAEIIALLKALFLPQEVAIIHCPGHQKGQDPVAVGNRQADRVARQAAMAEVLTLATEPDNTSHITAGKRTADGSEFEKRTADGSEFESPKKKAKVE

SEQ ID NO: 1599 - protein, 2100 aa, synthetic construct
MPAAKRVKLDGGDKKYSIGLDIGTNSVGWAVITDEYKVPSKKFKVLGNTDRHSIKKNLIGALLFDSGETAEATRLKRTARRRYTRRKNRICYLQEIFSNEMAKVDDSFFHRLEESFLVEEDKKHERHPIFGNIVDEVAYHEKYPTIYHLRKKLVDSTDKADLRLIYLALAHMIKFRGHFLIEGDLNPDNSDVDKLFIQLVQTYNQLFEENPINASGVDAKAILSARLSKSRRLENLIAQLPGEKKNGLFGNLIALSLGLTPNFKSNFDLAEDAKLQLSKDTYDDDLDNLLAQIGDQYADLFLAAKNLSDAILLSDILRVNTEITKAPLSASMIKRYDEHHQDLTLLKALVRQQLPEKYKEIFFDQSKNGYAGYIDGGASQEEFYKFIKPILEKMDGTEELLVKLNREDLLRKQRTFDNGSIPHQIHLGELHAILRRQEDFYPFLKDNREKIEKILTFRIPYYVGPLARGNSRFAWMTRKSEETITPWNFEEVVDKGASAQSFIERMTNFDKNLPNEKVLPKHSLLYEYFTVYNELTKVKYVTEGMRKPAFLSGEQKKAIVDLLFKTNRKVTVKQLKEDYFKKIECFDSVEISGVEDRFNASLGTYHDLLKIIKDKDFLDNEENEDILEDIVLTLTLFEDREMIEERLKTYAHLFDDKVMKQLKRRRYTGWGRLSRKLINGIRDKQSGKTILDFLKSDGFANRNFMQLIHDDSLTFKEDIQKAQVSGQGDSLHEHIANLAGSPAIKKGILQTVKVVDELVKVMGRHKPENIVIEMARENQTTQKGQKNSRERMKRIEEGIKELGSQILKEHPVENTQLQNEKLYLYYLQNGRDMYVDQELDINRLSDYDVDHIVPQSFLKDDSIDNKVLTRSDKARGKSDNVPSEEVVKKMKNYWRQLLNAKLITQRKFDNLTKAERGGLSELDKAGFIKRQLVETRQITKHVAQILDSRMNTKYDENDKLIREVKVITLKSKLVSDFRKDFQFYKVREINNYHHAHDAYLNAVVGTALIKKYPKLESEFVYGDYKVYDVRKMIAKSEQEIGKATAKYFFYSNIMNFFKTEITLANGEIRKRPLIETNGETGEIVWDKGRDFATVRKVLSMPQVNIVKKTEVQTGGFSKESILPKRNSDKLIARKKDWDPKKYGGFDSPTVAYSVLVVAKVEKGKSKKLKSVKELLGITIMERSSFEKNPIDFLEAKGYKEVKKDLIIKLPKYSLFELENGRKRMLASAGELQKGNELALPSKYVNFLYLASHYEKLKGSPEDNEQKQLFVEQHKHYLDEIIEQISEFSKRVILADANLDKVLSAYNKHRDKPIREQAENIIHLFTLTNLGAPAAFKYFDTTIDRKRYTSTKEVLDATLIHQSITGLYETRIDLSQLGGDGGPAPGGSGSSGGTVSLQDEHRLFDIPVTTSLPDVWLQDFPQAWAETGGLGRAKCQAPIIIDLKPTAVPVSIKQYPMSLEAHMGIRQHIIKFLELGVLRPCRSPWNTPLLPVKKPGTQDYRPVQDLREINKRTVDIHPTVPNPYNLLSTLKPDYSWYTVLDLKDAFFCLPLAPQSQELFAFEWKDPERGISGQLTWTRLPQGFKNSPTLFNEALHRDLTDFRTQHPEVTLLQYVDDLLLAAPTKKACTQGTRHLLQELGEKGYRASAKKAQICQTKVTYLGYILSEGKRWLTPGRIETVARIPPPRNPREVREFLGTAGFCRLWIPGFAELAAPLYALTKPSTPFTWQTEHQLAFEALKKALLSAPALGLPDTSKPFTLFLDERQGIAKGVLTQKLGPWKRPVAYLSKKLDPVAAGWPPCLRIMAATAMLVKDSAKLTLGQPLTVITPHTLEAIVRQPPDRWITNARLTHYQALLLDTDRVQFGPPVTLNPATLLPVPENQPSPHDCRQVLAETHGTREDLKDQELPDADHTWYTDGSSYLDSGTRRAGAAVVDGHNTIWAQSLPPGTSAQKAELIALTKALELSKGKKANIYTDSRYAFATAHTHGSIYERRGWLTSEGKEIKNKAEIIALLKALFLPQEVAIIHCPGHQKGQDPVAVGNRQADRVARQAAMAEVLTLATEPDNTSHITAGKRTADGSEFEKRTADGSEFESPKKKAKVE

SEQ ID NO: 1600 - protein, 2006 aa, synthetic construct
MPAAKRVKLDGGDKKYSIGLDIGTNSVGWAVITDEYKVPSKKFKVLGNTDRHSIKKNLIGALLFDSGETAEATRLKRTARRRYTRRKNRICYLQEIFSNEMAKVDDSFFHRLEESFLVEEDKKHERHPIFGNIVDEVAYHEKYPTIYHLRKKLVDSTDKADLRLIYLALAHMIKFRGHFLIEGDLNPDNSDVDKLFIQLVQTYNQLFEENPINASGVDAKAILSARLSKSRRLENLIAQLPGEKKNGLFGNLIALSLGLTPNFKSNFDLAEDAKLQLSKDTYDDDLDNLLAQIGDQYADLFLAAKNLSDAILLSDILRVNTEITKAPLSASMIKRYDEHHQDLTLLKALVRQQLPEKYKEIFFDQSKNGYAGYIDGGASQEEFYKFIKPILEKMDGTEELLVKLNREDLLRKQRTFDNGSIPHQIHLGELHAILRRQEDFYPFLKDNREKIEKILTFRIPYYVGPLARGNSRFAWMTRKSEETITPWNFEEVVDKGASAQSFIERMTNFDKNLPNEKVLPKHSLLYEYFTVYNELTKVKYVTEGMRKPAFLSGEQKKAIVDLLFKTNRKVTVKQLKEDYFKKIECFDSVEISGVEDRFNASLGTYHDLLKIIKDKDFLDNEENEDILEDIVLTLTLFEDREMIEERLKTYAHLFDDKVMKQLKRRRYTGWGRLSRKLINGIRDKQSGKTILDFLKSDGFANRNFMQLIHDDSLTFKEDIQKAQVSGQGDSLHEHIANLAGSPAIKKGILQTVKVVDELVKVMGRHKPENIVIEMARENQTTQKGQKNSRERMKRIEEGIKELGSQILKEHPVENTQLQNEKLYLYYLQNGRDMYVDQELDINRLSDYDVDHIVPQSFLKDDSIDNKVLTRSDKARGKSDNVPSEEVVKKMKNYWRQLLNAKLITQRKFDNLTKAERGGLSELDKAGFIKRQLVETRQITKHVAQILDSRMNTKYDENDKLIREVKVITLKSKLVSDFRKDFQFYKVREINNYHHAHDAYLNAVVGTALIKKYPKLESEFVYGDYKVYDVRKMIAKSEQEIGKATAKYFFYSNIMNFFKTEITLANGEIRKRPLIETNGETGEIVWDKGRDFATVRKVLSMPQVNIVKKTEVQTGGFSKESILPKRNSDKLIARKKDWDPKKYGGFDSPTVAYSVLVVAKVEKGKSKKLKSVKELLGITIMERSSFEKNPIDFLEAKGYKEVKKDLIIKLPKYSLFELENGRKRMLASAGELQKGNELALPSKYVNFLYLASHYEKLKGSPEDNEQKQLFVEQHKHYLDEIIEQISEFSKRVILADANLDKVLSAYNKHRDKPIREQAENIIHLFTLTNLGAPAAFKYFDTTIDRKRYTSTKEVLDATLIHQSITGLYETRIDLSQLGGDGGEAAAKGGGPAPGGPLGTSDSPVTHADPIDWKSEEPVWVDQWPLTQEKLSAAQQLVQEQLRLGHIEPSTSAWNSPIFVIKKKSGKWRLLQDLRKVNETMMHMGALQPGLPTPSPIPDKSYIIVIDLKDCFYTIPLAPQDCKRFAFSLPSVNFKEPMQRYQWRVLPQGMTNSPTLCQKFVATAIAPVRQRFPQLYLVHYMDDILLAHTDEHLLYQAFSILKQHLSLNGLVIADEKIQTHFPYNYLGFSLYPRVYNTQLVKLQTDHLKTLNDFQKLLGDINWIRPYLKLPTYTLQPLFDILKGDSDPASPRTLSLEGRTALQSIEEAIRQQQITYCDYQRSWGLYILPTPRAPTGVLYQDKPLRWIYLSATPTKHLLPYYELVAKIIAKGRHEAIQYFGMEPPFICVPYALEQQDWLFQFSDNWSIAFANYPGQITHHYPSDKLLQFASSHAFIFPKIVRRQPIPEATLIFTDGSSNGTAALIINHQTYYAQTSFSSAQVVELFAVHQALLTVPTSFNLFTDSSYVVGALQMIETVPIIGTTSPEVLNLFTLIQQVLHCRQHPCFFGHIRAHSTLPGALVQGNHTADVLTKQVFFQSAGKRTADGSEFEKRTADGSEFESPKKKAKVE

SEQ ID NO: 1601 - protein, 2006 aa, synthetic construct
MPAAKRVKLDGGDKKYSIGLDIGTNSVGWAVITDEYKVPSKKFKVLGNTDRHSIKKNLIGALLFDSGETAEATRLKRTARRRYTRRKNRICYLQEIFSNEMAKVDDSFFHRLEESFLVEEDKKHERHPIFGNIVDEVAYHEKYPTIYHLRKKLVDSTDKADLRLIYLALAHMIKFRGHFLIEGDLNPDNSDVDKLFIQLVQTYNQLFEENPINASGVDAKAILSARLSKSRRLENLIAQLPGEKKNGLFGNLIALSLGLTPNFKSNFDLAEDAKLQLSKDTYDDDLDNLLAQIGDQYADLFLAAKNLSDAILLSDILRVNTEITKAPLSASMIKRYDEHHQDLTLLKALVRQQLPEKYKEIFFDQSKNGYAGYIDGGASQEEFYKFIKPILEKMDGTEELLVKLNREDLLRKQRTFDNGSIPHQIHLGELHAILRRQEDFYPFLKDNREKIEKILTFRIPYYVGPLARGNSRFAWMTRKSEETITPWNFEEVVDKGASAQSFIERMTNFDKNLPNEKVLPKHSLLYEYFTVYNELTKVKYVTEGMRKPAFLSGEQKKAIVDLLFKTNRKVTVKQLKEDYFKKIECFDSVEISGVEDRFNASLGTYHDLLKIIKDKDFLDNEENEDILEDIVLTLTLFEDREMIEERLKTYAHLFDDKVMKQLKRRRYTGWGRLSRKLINGIRDKQSGKTILDFLKSDGFANRNFMQLIHDDSLTFKEDIQKAQVSGQGDSLHEHIANLAGSPAIKKGILQTVKVVDELVKVMGRHKPENIVIEMARENQTTQKGQKNSRERMKRIEEGIKELGSQILKEHPVENTQLQNEKLYLYYLQNGRDMYVDQELDINRLSDYDVDHIVPQSFLKDDSIDNKVLTRSDKARGKSDNVPSEEVVKKMKNYWRQLLNAKLITQRKFDNLTKAERGGLSELDKAGFIKRQLVETRQITKHVAQILDSRMNTKYDENDKLIREVKVITLKSKLVSDFRKDFQFYKVREINNYHHAHDAYLNAVVGTALIKKYPKLESEFVYGDYKVYDVRKMIAKSEQEIGKATAKYFFYSNIMNFFKTEITLANGEIRKRPLIETNGETGEIVWDKGRDFATVRKVLSMPQVNIVKKTEVQTGGFSKESILPKRNSDKLIARKKDWDPKKYGGFDSPTVAYSVLVVAKVEKGKSKKLKSVKELLGITIMERSSFEKNPIDFLEAKGYKEVKKDLIIKLPKYSLFELENGRKRMLASAGELQKGNELALPSKYVNFLYLASHYEKLKGSPEDNEQKQLFVEQHKHYLDEIIEQISEFSKRVILADANLDKVLSAYNKHRDKPIREQAENIIHLFTLTNLGAPAAFKYFDTTIDRKRYTSTKEVLDATLIHQSITGLYETRIDLSQLGGDGGGGSEAAAKGSSGGPLGTSDSPVTHADPIDWKSEEPVWVDQWPLTQEKLSAAQQLVQEQLRLGHIEPSTSAWNSPIFVIKKKSGKWRLLQDLRKVNETMMHMGALQPGLPTPSPIPDKSYIIVIDLKDCFYTIPLAPQDCKRFAFSLPSVNFKEPMQRYQWRVLPQGMTNSPTLCQKFVATAIAPVRQRFPQLYLVHYMDDILLAHTDEHLLYQAFSILKQHLSLNGLVIADEKIQTHFPYNYLGFSLYPRVYNTQLVKLQTDHLKTLNDFQKLLGDINWIRPYLKLPTYTLQPLFDILKGDSDPASPRTLSLEGRTALQSIEEAIRQQQITYCDYQRSWGLYILPTPRAPTGVLYQDKPLRWIYLSATPTKHLLPYYELVAKIIAKGRHEAIQYFGMEPPFICVPYALEQQDWLFQFSDNWSIAFANYPGQITHHYPSDKLLQFASSHAFIFPKIVRRQPIPEATLIFTDGSSNGTAALIINHQTYYAQTSFSSAQVVELFAVHQALLTVPTSFNLFTDSSYVVGALQMIETVPIIGTTSPEVLNLFTLIQQVLHCRQHPCFFGHIRAHSTLPGALVQGNHTADVLTKQVFFQSAGKRTADGSEFEKRTADGSEFESPKKKAKVE

SEQ ID NO: 1602 - protein, 2013 aa, synthetic construct
MPAAKRVKLDGGDKKYSIGLDIGTNSVGWAVITDEYKVPSKKFKVLGNTDRHSIKKNLIGALLFDSGETAEATRLKRTARRRYTRRKNRICYLQEIFSNEMAKVDDSFFHRLEESFLVEEDKKHERHPIFGNIVDEVAYHEKYPTIYHLRKKLVDSTDKADLRLIYLALAHMIKFRGHFLIEGDLNPDNSDVDKLFIQLVQTYNQLFEENPINASGVDAKAILSARLSKSRRLENLIAQLPGEKKNGLFGNLIALSLGLTPNFKSNFDLAEDAKLQLSKDTYDDDLDNLLAQIGDQYADLFLAAKNLSDAILLSDILRVNTEITKAPLSASMIKRYDEHHQDLTLLKALVRQQLPEKYKEIFFDQSKNGYAGYIDGGASQEEFYKFIKPILEKMDGTEELLVKLNREDLLRKQRTFDNGSIPHQIHLGELHAILRRQEDFYPFLKDNREKIEKILTFRIPYYVGPLARGNSRFAWMTRKSEETITPWNFEEVVDKGASAQSFIERMTNFDKNLPNEKVLPKHSLLYEYFTVYNELTKVKYVTEGMRKPAFLSGEQKKAIVDLLFKTNRKVTVKQLKEDYFKKIECFDSVEISGVEDRFNASLGTYHDLLKIIKDKDFLDNEENEDILEDIVLTLTLFEDREMIEERLKTYAHLFDDKVMKQLKRRRYTGWGRLSRKLINGIRDKQSGKTILDFLKSDGFANRNFMQLIHDDSLTFKEDIQKAQVSGQGDSLHEHIANLAGSPAIKKGILQTVKVVDELVKVMGRHKPENIVIEMARENQTTQKGQKNSRERMKRIEEGIKELGSQILKEHPVENTQLQNEKLYLYYLQNGRDMYVDQELDINRLSDYDVDHIVPQSFLKDDSIDNKVLTRSDKARGKSDNVPSEEVVKKMKNYWRQLLNAKLITQRKFDNLTKAERGGLSELDKAGFIKRQLVETRQITKHVAQILDSRMNTKYDENDKLIREVKVITLKSKLVSDFRKDFQFYKVREINNYHHAHDAYLNAVVGTALIKKYPKLESEFVYGDYKVYDVRKMIAKSEQEIGKATAKYFFYSNIMNFFKTEITLANGEIRKRPLIETNGETGEIVWDKGRDFATVRKVLSMPQVNIVKKTEVQTGGFSKESILPKRNSDKLIARKKDWDPKKYGGFDSPTVAYSVLVVAKVEKGKSKKLKSVKELLGITIMERSSFEKNPIDFLEAKGYKEVKKDLIIKLPKYSLFELENGRKRMLASAGELQKGNELALPSKYVNFLYLASHYEKLKGSPEDNEQKQLFVEQHKHYLDEIIEQISEFSKRVILADANLDKVLSAYNKHRDKPIREQAENIIHLFTLTNLGAPAAFKYFDTTIDRKRYTSTKEVLDATLIHQSITGLYETRIDLSQLGGDGGGSSGSSGSSGSSGSSGSSGGPLGTSDSPVTHADPIDWKSEEPVWVDQWPLTQEKLSAAQQLVQEQLRLGHIEPSTSAWNSPIFVIKKKSGKWRLLQDLRKVNETMMHMGALQPGLPTPSPIPDKSYIIVIDLKDCFYTIPLAPQDCKRFAFSLPSVNFKEPMQRYQWRVLPQGMTNSPTLCQKFVATAIAPVRQRFPQLYLVHYMDDILLAHTDEHLLYQAFSILKQHLSLNGLVIADEKIQTHFPYNYLGFSLYPRVYNTQLVKLQTDHLKTLNDFQKLLGDINWIRPYLKLPTYTLQPLFDILKGDSDPASPRTLSLEGRTALQSIEEAIRQQQITYCDYQRSWGLYILPTPRAPTGVLYQDKPLRWIYLSATPTKHLLPYYELVAKIIAKGRHEAIQYFGMEPPFICVPYALEQQDWLFQFSDNWSIAFANYPGQITHHYPSDKLLQFASSHAFIFPKIVRRQPIPEATLIFTDGSSNGTAALIINHQTYYAQTSFSSAQVVELFAVHQALLTVPTSFNLFTDSSYVVGALQMIETVPIIGTTSPEVLNLFTLIQQVLHCRQHPCFFGHIRAHSTLPGALVQGNHTADVLTKQVFFQSAGKRTADGSEFEKRTADGSEFESPKKKAKVE

SEQ ID NO: 1603 - protein, 2001 aa, synthetic construct
MPAAKRVKLDGGDKKYSIGLDIGTNSVGWAVITDEYKVPSKKFKVLGNTDRHSIKKNLIGALLFDSGETAEATRLKRTARRRYTRRKNRICYLQEIFSNEMAKVDDSFFHRLEESFLVEEDKKHERHPIFGNIVDEVAYHEKYPTIYHLRKKLVDSTDKADLRLIYLALAHMIKFRGHFLIEGDLNPDNSDVDKLFIQLVQTYNQLFEENPINASGVDAKAILSARLSKSRRLENLIAQLPGEKKNGLFGNLIALSLGLTPNFKSNFDLAEDAKLQLSKDTYDDDLDNLLAQIGDQYADLFLAAKNLSDAILLSDILRVNTEITKAPLSASMIKRYDEHHQDLTLLKALVRQQLPEKYKEIFFDQSKNGYAGYIDGGASQEEFYKFIKPILEKMDGTEELLVKLNREDLLRKQRTFDNGSIPHQIHLGELHAILRRQEDFYPFLKDNREKIEKILTFRIPYYVGPLARGNSRFAWMTRKSEETITPWNFEEVVDKGASAQSFIERMTNFDKNLPNEKVLPKHSLLYEYFTVYNELTKVKYVTEGMRKPAFLSGEQKKAIVDLLFKTNRKVTVKQLKEDYFKKIECFDSVEISGVEDRFNASLGTYHDLLKIIKDKDFLDNEENEDILEDIVLTLTLFEDREMIEERLKTYAHLFDDKVMKQLKRRRYTGWGRLSRKLINGIRDKQSGKTILDFLKSDGFANRNFMQLIHDDSLTFKEDIQKAQVSGQGDSLHEHIANLAGSPAIKKGILQTVKVVDELVKVMGRHKPENIVIEMARENQTTQKGQKNSRERMKRIEEGIKELGSQILKEHPVENTQLQNEKLYLYYLQNGRDMYVDQELDINRLSDYDVDHIVPQSFLKDDSIDNKVLTRSDKARGKSDNVPSEEVVKKMKNYWRQLLNAKLITQRKFDNLTKAERGGLSELDKAGFIKRQLVETRQITKHVAQILDSRMNTKYDENDKLIREVKVITLKSKLVSDFRKDFQFYKVREINNYHHAHDAYLNAVVGTALIKKYPKLESEFVYGDYKVYDVRKMIAKSEQEIGKATAKYFFYSNIMNFFKTEITLANGEIRKRPLIETNGETGEIVWDKGRDFATVRKVLSMPQVNIVKKTEVQTGGFSKESILPKRNSDKLIARKKDWDPKKYGGFDSPTVAYSVLVVAKVEKGKSKKLKSVKELLGITIMERSSFEKNPIDFLEAKGYKEVKKDLIIKLPKYSLFELENGRKRMLASAGELQKGNELALPSKYVNFLYLASHYEKLKGSPEDNEQKQLFVEQHKHYLDEIIEQISEFSKRVILADANLDKVLSAYNKHRDKPIREQAENIIHLFTLTNLGAPAAFKYFDTTIDRKRYTSTKEVLDATLIHQSITGLYETRIDLSQLGGDGGGSSGSSGGPLGTSDSPVTHADPIDWKSEEPVWVDQWPLTQEKLSAAQQLVQEQLRLGHIEPSTSAWNSPIFVIKKKSGKWRLLQDLRKVNETMMHMGALQPGLPTPSPIPDKSYIIVIDLKDCFYTIPLAPQDCKRFAFSLPSVNFKEPMQRYQWRVLPQGMTNSPTLCQKFVATAIAPVRQRFPQLYLVHYMDDILLAHTDEHLLYQAFSILKQHLSLNGLVIADEKIQTHFPYNYLGFSLYPRVYNTQLVKLQTDHLKTLNDFQKLLGDINWIRPYLKLPTYTLQPLFDILKGDSDPASPRTLSLEGRTALQSIEEAIRQQQITYCDYQRSWGLYILPTPRAPTGVLYQDKPLRWIYLSATPTKHLLPYYELVAKIIAKGRHEAIQYFGMEPPFICVPYALEQQDWLFQFSDNWSIAFANYPGQITHHYPSDKLLQFASSHAFIFPKIVRRQPIPEATLIFTDGSSNGTAALIINHQTYYAQTSFSSAQVVELFAVHQALLTVPTSFNLFTDSSYVVGALQMIETVPIIGTTSPEVLNLFTLIQQVLHCRQHPCFFGHIRAHSTLPGALVQGNHTADVLTKQVFFQSAGKRTADGSEFEKRTADGSEFESPKKKAKVE

SEQ ID NO: 1604 - protein, 2216 aa, synthetic construct
MPAAKRVKLDGGDKKYSIGLDIGTNSVGWAVITDEYKVPSKKFKVLGNTDRHSIKKNLIGALLFDSGETAEATRLKRTARRRYTRRKNRICYLQEIFSNEMAKVDDSFFHRLEESFLVEEDKKHERHPIFGNIVDEVAYHEKYPTIYHLRKKLVDSTDKADLRLIYLALAHMIKFRGHFLIEGDLNPDNSDVDKLFIQLVQTYNQLFEENPINASGVDAKAILSARLSKSRRLENLIAQLPGEKKNGLFGNLIALSLGLTPNFKSNFDLAEDAKLQLSKDTYDDDLDNLLAQIGDQYADLFLAAKNLSDAILLSDILRVNTEITKAPLSASMIKRYDEHHQDLTLLKALVRQQLPEKYKEIFFDQSKNGYAGYIDGGASQEEFYKFIKPILEKMDGTEELLVKLNREDLLRKQRTFDNGSIPHQIHLGELHAILRRQEDFYPFLKDNREKIEKILTFRIPYYVGPLARGNSRFAWMTRKSEETITPWNFEEVVDKGASAQSFIERMTNFDKNLPNEKVLPKHSLLYEYFTVYNELTKVKYVTEGMRKPAFLSGEQKKAIVDLLFKTNRKVTVKQLKEDYFKKIECFDSVEISGVEDRFNASLGTYHDLLKIIKDKDFLDNEENEDILEDIVLTLTLFEDREMIEERLKTYAHLFDDKVMKQLKRRRYTGWGRLSRKLINGIRDKQSGKTILDFLKSDGFANRNFMQLIHDDSLTFKEDIQKAQVSGQGDSLHEHIANLAGSPAIKKGILQTVKVVDELVKVMGRHKPENIVIEMARENQTTQKGQKNSRERMKRIEEGIKELGSQILKEHPVENTQLQNEKLYLYYLQNGRDMYVDQELDINRLSDYDVDHIVPQSFLKDDSIDNKVLTRSDKARGKSDNVPSEEVVKKMKNYWRQLLNAKLITQRKFDNLTKAERGGLSELDKAGFIKRQLVETRQITKHVAQILDSRMNTKYDENDKLIREVKVITLKSKLVSDFRKDFQFYKVREINNYHHAHDAYLNAVVGTALIKKYPKLESEFVYGDYKVYDVRKMIAKSEQEIGKATAKYFFYSNIMNFFKTEITLANGEIRKRPLIETNGETGEIVWDKGRDFATVRKVLSMPQVNIVKKTEVQTGGFSKESILPKRNSDKLIARKKDWDPKKYGGFDSPTVAYSVLVVAKVEKGKSKKLKSVKELLGITIMERSSFEKNPIDFLEAKGYKEVKKDLIIKLPKYSLFELENGRKRMLASAGELQKGNELALPSKYVNFLYLASHYEKLKGSPEDNEQKQLFVEQHKHYLDEIIEQISEFSKRVILADANLDKVLSAYNKHRDKPIREQAENIIHLFTLTNLGAPAAFKYFDTTIDRKRYTSTKEVLDATLIHQSITGLYETRIDLSQLGGDGGPAPGSSGGGGGTLGDQGSRGSDPLPEPRVTLTVEGIPTEFLVNTGAEHSVLTKPMGKMGSKRTVVAGATGSKVYPWTTKRLLKIGQKQVTHSFLVIPECPAPLLGRDLLTKLKAQIQFSTEGPQVTWEDRPAMCLVLNLEEEYRLHEKPVPPSIDPSWLQLFPMVWAEKAGMGLANQVPPVVVELKSDASPVAVRQYPMSKEAREGIRPHIQRFLDLGILVPCQSPWNTPLLPVKKPGTNDYRPVQDLREVNKRVQDIHPTVPNPYNLLSSLPPSHTWYSVLDLKDAFFCLKLHPNSQPLFAFEWRDPEKGNTGQLTWTRLPQGFKNSPTLFDEALHRDLASFRALNPQVVMLQYVDDLLVAAPTYRDCKEGTRRLLQELSKLGYRVSAKKAQLCREEVTYLGYLLKGGKRWLTPARKATVMKIPTPTTPRQVREFLGTAGFCRLWIPGFASLAAPLYPLTREKVPFTWTEAHQEAFGRIKEALLSAPALALPDLTKPFALYVDEKEGVARGVLTQTLGPWRRPVAYLSKKLDPVASGWPTCLKAIAAVALLLKDADKLTLGQNVLVIAPHNLESIVRQPPDRWMTNARMTHYQSLLLNERVSFAPPAILNPATLLPVESDDTPIHICSEILAEETGTRPDLRDQPLPGVPAWYTDGSSFIMDGRRQAGAAIVDNKRTVWASNLPEGTSAQKAELIALTQALRLAEGKSINIYTDSRYAFATAHVHGAIYKQRGLLTSAGKDIKNKEEILALLEAIHLPKRVAIIHCPGHQRGTDPVATGNRKADEAAKQAAQSTRILTETTKNAGKRTADGSEFEKRTADGSEFESPKKKAKVE

SEQ ID NO: 1605 - protein, 2218 aa, synthetic construct
MPAAKRVKLDGGDKKYSIGLDIGTNSVGWAVITDEYKVPSKKFKVLGNTDRHSIKKNLIGALLFDSGETAEATRLKRTARRRYTRRKNRICYLQEIFSNEMAKVDDSFFHRLEESFLVEEDKKHERHPIFGNIVDEVAYHEKYPTIYHLRKKLVDSTDKADLRLIYLALAHMIKFRGHFLIEGDLNPDNSDVDKLFIQLVQTYNQLFEENPINASGVDAKAILSARLSKSRRLENLIAQLPGEKKNGLFGNLIALSLGLTPNFKSNFDLAEDAKLQLSKDTYDDDLDNLLAQIGDQYADLFLAAKNLSDAILLSDILRVNTEITKAPLSASMIKRYDEHHQDLTLLKALVRQQLPEKYKEIFFDQSKNGYAGYIDGGASQEEFYKFIKPILEKMDGTEELLVKLNREDLLRKQRTFDNGSIPHQIHLGELHAILRRQEDFYPFLKDNREKIEKILTFRIPYYVGPLARGNSRFAWMTRKSEETITPWNFEEVVDKGASAQSFIERMTNFDKNLPNEKVLPKHSLLYEYFTVYNELTKVKYVTEGMRKPAFLSGEQKKAIVDLLFKTNRKVTVKQLKEDYFKKIECFDSVEISGVEDRFNASLGTYHDLLKIIKDKDFLDNEENEDILEDIVLTLTLFEDREMIEERLKTYAHLFDDKVMKQLKRRRYTGWGRLSRKLINGIRDKQSGKTILDFLKSDGFANRNFMQLIHDDSLTFKEDIQKAQVSGQGDSLHEHIANLAGSPAIKKGILQTVKVVDELVKVMGRHKPENIVIEMARENQTTQKGQKNSRERMKRIEEGIKELGSQILKEHPVENTQLQNEKLYLYYLQNGRDMYVDQELDINRLSDYDVDHIVPQSFLKDDSIDNKVLTRSDKARGKSDNVPSEEVVKKMKNYWRQLLNAKLITQRKFDNLTKAERGGLSELDKAGFIKRQLVETRQITKHVAQILDSRMNTKYDENDKLIREVKVITLKSKLVSDFRKDFQFYKVREINNYHHAHDAYLNAVVGTALIKKYPKLESEFVYGDYKVYDVRKMIAKSEQEIGKATAKYFFYSNIMNFFKTEITLANGEIRKRPLIETNGETGEIVWDKGRDFATVRKVLSMPQVNIVKKTEVQTGGFSKESILPKRNSDKLIARKKDWDPKKYGGFDSPTVAYSVLVVAKVEKGKSKKLKSVKELLGITIMERSSFEKNPIDFLEAKGYKEVKKDLIIKLPKYSLFELENGRKRMLASAGELQKGNELALPSKYVNFLYLASHYEKLKGSPEDNEQKQLFVEQHKHYLDEIIEQISEFSKRVILADANLDKVLSAYNKHRDKPIREQAENIIHLFTLTNLGAPAAFKYFDTTIDRKRYTSTKEVLDATLIHQSITGLYETRIDLSQLGGDGGPAPGGGEAAAKGGTLGDQGSRGSDPLPEPRVTLTVEGIPTEFLVNTGAEHSVLTKPMGKMGSKRTVVAGATGSKVYPWTTKRLLKIGQKQVTHSFLVIPECPAPLLGRDLLTKLKAQIQFSTEGPQVTWEDRPAMCLVLNLEEEYRLHEKPVPPSIDPSWLQLFPMVWAEKAGMGLANQVPPVVVELKSDASPVAVRQYPMSKEAREGIRPHIQRFLDLGILVPCQSPWNTPLLPVKKPGTNDYRPVQDLREVNKRVQDIHPTVPNPYNLLSSLPPSHTWYSVLDLKDAFFCLKLHPNSQPLFAFEWRDPEKGNTGQLTWTRLPQGFKNSPTLFDEALHRDLASFRALNPQVVMLQYVDDLLVAAPTYRDCKEGTRRLLQELSKLGYRVSAKKAQLCREEVTYLGYLLKGGKRWLTPARKATVMKIPTPTTPRQVREFLGTAGFCRLWIPGFASLAAPLYPLTREKVPFTWTEAHQEAFGRIKEALLSAPALALPDLTKPFALYVDEKEGVARGVLTQTLGPWRRPVAYLSKKLDPVASGWPTCLKAIAAVALLLKDADKLTLGQNVLVIAPHNLESIVRQPPDRWMTNARMTHYQSLLLNERVSFAPPAILNPATLLPVESDDTPIHICSEILAEETGTRPDLRDQPLPGVPAWYTDGSSFIMDGRRQAGAAIVDNKRTVWASNLPEGTSAQKAELIALTQALRLAEGKSINIYTDSRYAFATAHVHGAIYKQRGLLTSAGKDIKNKEEILALLEAIHLPKRVAIIHCPGHQRGTDPVATGNRKADEAAKQAAQSTRILTETTKNAGKRTADGSEFEKRTADGSEFESPKKKAKVE

SEQ ID NO: 1606 - protein, 2218 aa, synthetic construct
MPAAKRVKLDGGDKKYSIGLDIGTNSVGWAVITDEYKVPSKKFKVLGNTDRHSIKKNLIGALLFDSGETAEATRLKRTARRRYTRRKNRICYLQEIFSNEMAKVDDSFFHRLEESFLVEEDKKHERHPIFGNIVDEVAYHEKYPTIYHLRKKLVDSTDKADLRLIYLALAHMIKFRGHFLIEGDLNPDNSDVDKLFIQLVQTYNQLFEENPINASGVDAKAILSARLSKSRRLENLIAQLPGEKKNGLFGNLIALSLGLTPNFKSNFDLAEDAKLQLSKDTYDDDLDNLLAQIGDQYADLFLAAKNLSDAILLSDILRVNTEITKAPLSASMIKRYDEHHQDLTLLKALVRQQLPEKYKEIFFDQSKNGYAGYIDGGASQEEFYKFIKPILEKMDGTEELLVKLNREDLLRKQRTFDNGSIPHQIHLGELHAILRRQEDFYPFLKDNREKIEKILTFRIPYYVGPLARGNSRFAWMTRKSEETITPWNFEEVVDKGASAQSFIERMTNFDKNLPNEKVLPKHSLLYEYFTVYNELTKVKYVTEGMRKPAFLSGEQKKAIVDLLFKTNRKVTVKQLKEDYFKKIECFDSVEISGVEDRFNASLGTYHDLLKIIKDKDFLDNEENEDILEDIVLTLTLFEDREMIEERLKTYAHLFDDKVMKQLKRRRYTGWGRLSRKLINGIRDKQSGKTILDFLKSDGFANRNFMQLIHDDSLTFKEDIQKAQVSGQGDSLHEHIANLAGSPAIKKGILQTVKVVDELVKVMGRHKPENIVIEMARENQTTQKGQKNSRERMKRIEEGIKELGSQILKEHPVENTQLQNEKLYLYYLQNGRDMYVDQELDINRLSDYDVDHIVPQSFLKDDSIDNKVLTRSDKARGKSDNVPSEEVVKKMKNYWRQLLNAKLITQRKFDNLTKAERGGLSELDKAGFIKRQLVETRQITKHVAQILDSRMNTKYDENDKLIREVKVITLKSKLVSDFRKDFQFYKVREINNYHHAHDAYLNAVVGTALIKKYPKLESEFVYGDYKVYDVRKMIAKSEQEIGKATAKYFFYSNIMNFFKTEITLANGEIRKRPLIETNGETGEIVWDKGRDFATVRKVLSMPQVNIVKKTEVQTGGFSKESILPKRNSDKLIARKKDWDPKKYGGFDSPTVAYSVLVVAKVEKGKSKKLKSVKELLGITIMERSSFEKNPIDFLEAKGYKEVKKDLIIKLPKYSLFELENGRKRMLASAGELQKGNELALPSKYVNFLYLASHYEKLKGSPEDNEQKQLFVEQHKHYLDEIIEQISEFSKRVILADANLDKVLSAYNKHRDKPIREQAENIIHLFTLTNLGAPAAFKYFDTTIDRKRYTSTKEVLDATLIHQSITGLYETRIDLSQLGGDGGGGGGSSEAAAKGGTLGDQGSRGSDPLPEPRVTLTVEGIPTEFLVNTGAEHSVLTKPMGKMGSKRTVVAGATGSKVYPWTTKRLLKIGQKQVTHSFLVIPECPAPLLGRDLLTKLKAQIQFSTEGPQVTWEDRPAMCLVLNLEEEYRLHEKPVPPSIDPSWLQLFPMVWAEKAGMGLANQVPPVVVELKSDASPVAVRQYPMSKEAREGIRPHIQRFLDLGILVPCQSPWNTPLLPVKKPGTNDYRPVQDLREVNKRVQDIHPTVPNPYNLLSSLPPSHTWYSVLDLKDAFFCLKLHPNSQPLFAFEWRDPEKGNTGQLTWTRLPQGFKNSPTLFDEALHRDLASFRALNPQVVMLQYVDDLLVAAPTYRDCKEGTRRLLQELSKLGYRVSAKKAQLCREEVTYLGYLLKGGKRWLTPARKATVMKIPTPTTPRQVREFLGTAGFCRLWIPGFASLAAPLYPLTREKVPFTWTEAHQEAFGRIKEALLSAPALALPDLTKPFALYVDEKEGVARGVLTQTLGPWRRPVAYLSKKLDPVASGWPTCLKAIAAVALLLKDADKLTLGQNVLVIAPHNLESIVRQPPDRWMTNARMTHYQSLLLNERVSFAPPAILNPATLLPVESDDTPIHICSEILAEETGTRPDLRDQPLPGVPAWYTDGSSFIMDGRRQAGAAIVDNKRTVWASNLPEGTSAQKAELIALTQALRLAEGKSINIYTDSRYAFATAHVHGAIYKQRGLLTSAGKDIKNKEEILALLEAIHLPKRVAIIHCPGHQRGTDPVATGNRKADEAAKQAAQSTRILTETTKNAGKRTADGSEFEKRTADGSEFESPKKKAKVE

SEQ ID NO: 1607 - protein, 2213 aa, synthetic construct
MPAAKRVKLDGGDKKYSIGLDIGTNSVGWAVITDEYKVPSKKFKVLGNTDRHSIKKNLIGALLFDSGETAEATRLKRTARRRYTRRKNRICYLQEIFSNEMAKVDDSFFHRLEESFLVEEDKKHERHPIFGNIVDEVAYHEKYPTIYHLRKKLVDSTDKADLRLIYLALAHMIKFRGHFLIEGDLNPDNSDVDKLFIQLVQTYNQLFEENPINASGVDAKAILSARLSKSRRLENLIAQLPGEKKNGLFGNLIALSLGLTPNFKSNFDLAEDAKLQLSKDTYDDDLDNLLAQIGDQYADLFLAAKNLSDAILLSDILRVNTEITKAPLSASMIKRYDEHHQDLTLLKALVRQQLPEKYKEIFFDQSKNGYAGYIDGGASQEEFYKFIKPILEKMDGTEELLVKLNREDLLRKQRTFDNGSIPHQIHLGELHAILRRQEDFYPFLKDNREKIEKILTFRIPYYVGPLARGNSRFAWMTRKSEETITPWNFEEVVDKGASAQSFIERMTNFDKNLPNEKVLPKHSLLYEYFTVYNELTKVKYVTEGMRKPAFLSGEQKKAIVDLLFKTNRKVTVKQLKEDYFKKIECFDSVEISGVEDRFNASLGTYHDLLKIIKDKDFLDNEENEDILEDIVLTLTLFEDREMIEERLKTYAHLFDDKVMKQLKRRRYTGWGRLSRKLINGIRDKQSGKTILDFLKSDGFANRNFMQLIHDDSLTFKEDIQKAQVSGQGDSLHEHIANLAGSPAIKKGILQTVKVVDELVKVMGRHKPENIVIEMARENQTTQKGQKNSRERMKRIEEGIKELGSQILKEHPVENTQLQNEKLYLYYLQNGRDMYVDQELDINRLSDYDVDHIVPQSFLKDDSIDNKVLTRSDKARGKSDNVPSEEVVKKMKNYWRQLLNAKLITQRKFDNLTKAERGGLSELDKAGFIKRQLVETRQITKHVAQILDSRMNTKYDENDKLIREVKVITLKSKLVSDFRKDFQFYKVREINNYHHAHDAYLNAVVGTALIKKYPKLESEFVYGDYKVYDVRKMIAKSEQEIGKATAKYFFYSNIMNFFKTEITLANGEIRKRPLIETNGETGEIVWDKGRDFATVRKVLSMPQVNIVKKTEVQTGGFSKESILPKRNSDKLIARKKDWDPKKYGGFDSPTVAYSVLVVAKVEKGKSKKLKSVKELLGITIMERSSFEKNPIDFLEAKGYKEVKKDLIIKLPKYSLFELENGRKRMLASAGELQKGNELALPSKYVNFLYLASHYEKLKGSPEDNEQKQLFVEQHKHYLDEIIEQISEFSKRVILADANLDKVLSAYNKHRDKPIREQAENIIHLFTLTNLGAPAAFKYFDTTIDRKRYTSTKEVLDATLIHQSITGLYETRIDLSQLGGDGGGGSPAPGGTLGDQGSRGSDPLPEPRVTLTVEGIPTEFLVNTGAEHSVLTKPMGKMGSKRTVVAGATGSKVYPWTTKRLLKIGQKQVTHSFLVIPECPAPLLGRDLLTKLKAQIQFSTEGPQVTWEDRPAMCLVLNLEEEYRLHEKPVPPSIDPSWLQLFPMVWAEKAGMGLANQVPPVVVELKSDASPVAVRQYPMSKEAREGIRPHIQRFLDLGILVPCQSPWNTPLLPVKKPGTNDYRPVQDLREVNKRVQDIHPTVPNPYNLLSSLPPSHTWYSVLDLKDAFFCLKLHPNSQPLFAFEWRDPEKGNTGQLTWTRLPQGFKNSPTLFDEALHRDLASFRALNPQVVMLQYVDDLLVAAPTYRDCKEGTRRLLQELSKLGYRVSAKKAQLCREEVTYLGYLLKGGKRWLTPARKATVMKIPTPTTPRQVREFLGTAGFCRLWIPGFASLAAPLYPLTREKVPFTWTEAHQEAFGRIKEALLSAPALALPDLTKPFALYVDEKEGVARGVLTQTLGPWRRPVAYLSKKLDPVASGWPTCLKAIAAVALLLKDADKLTLGQNVLVIAPHNLESIVRQPPDRWMTNARMTHYQSLLLNERVSFAPPAILNPATLLPVESDDTPIHICSEILAEETGTRPDLRDQPLPGVPAWYTDGSSFIMDGRRQAGAAIVDNKRTVWASNLPEGTSAQKAELIALTQALRLAEGKSINIYTDSRYAFATAHVHGAIYKQRGLLTSAGKDIKNKEEILALLEAIHLPKRVAIIHCPGHQRGTDPVATGNRKADEAAKQAAQSTRILTETTKNAGKRTADGSEFEKRTADGSEFESPKKKAKVE

SEQ ID NO: 1608 - protein, 2216 aa, synthetic construct
MPAAKRVKLDGGDKKYSIGLDIGTNSVGWAVITDEYKVPSKKFKVLGNTDRHSIKKNLIGALLFDSGETAEATRLKRTARRRYTRRKNRICYLQEIFSNEMAKVDDSFFHRLEESFLVEEDKKHERHPIFGNIVDEVAYHEKYPTIYHLRKKLVDSTDKADLRLIYLALAHMIKFRGHFLIEGDLNPDNSDVDKLFIQLVQTYNQLFEENPINASGVDAKAILSARLSKSRRLENLIAQLPGEKKNGLFGNLIALSLGLTPNFKSNFDLAEDAKLQLSKDTYDDDLDNLLAQIGDQYADLFLAAKNLSDAILLSDILRVNTEITKAPLSASMIKRYDEHHQDLTLLKALVRQQLPEKYKEIFFDQSKNGYAGYIDGGASQEEFYKFIKPILEKMDGTEELLVKLNREDLLRKQRTFDNGSIPHQIHLGELHAILRRQEDFYPFLKDNREKIEKILTFRIPYYVGPLARGNSRFAWMTRKSEETITPWNFEEVVDKGASAQSFIERMTNFDKNLPNEKVLPKHSLLYEYFTVYNELTKVKYVTEGMRKPAFLSGEQKKAIVDLLFKTNRKVTVKQLKEDYFKKIECFDSVEISGVEDRFNASLGTYHDLLKIIKDKDFLDNEENEDILEDIVLTLTLFEDREMIEERLKTYAHLFDDKVMKQLKRRRYTGWGRLSRKLINGIRDKQSGKTILDFLKSDGFANRNFMQLIHDDSLTFKEDIQKAQVSGQGDSLHEHIANLAGSPAIKKGILQTVKVVDELVKVMGRHKPENIVIEMARENQTTQKGQKNSRERMKRIEEGIKELGSQILKEHPVENTQLQNEKLYLYYLQNGRDMYVDQELDINRLSDYDVDHIVPQSFLKDDSIDNKVLTRSDKARGKSDNVPSEEVVKKMKNYWRQLLNAKLITQRKFDNLTKAERGGLSELDKAGFIKRQLVETRQITKHVAQILDSRMNTKYDENDKLIREVKVITLKSKLVSDFRKDFQFYKVREINNYHHAHDAYLNAVVGTALIKKYPKLESEFVYGDYKVYDVRKMIAKSEQEIGKATAKYFFYSNIMNFFKTEITLANGEIRKRPLIETNGETGEIVWDKGRDFATVRKVLSMPQVNIVKKTEVQTGGFSKESILPKRNSDKLIARKKDWDPKKYGGFDSPTVAYSVLVVAKVEKGKSKKLKSVKELLGITIMERSSFEKNPIDFLEAKGYKEVKKDLIIKLPKYSLFELENGRKRMLASAGELQKGNELALPSKYVNFLYLASHYEKLKGSPEDNEQKQLFVEQHKHYLDEIIEQISEFSKRVILADANLDKVLSAYNKHRDKPIREQAENIIHLFTLTNLGAPAAFKYFDTTIDRKRYTSTKEVLDATLIHQSITGLYETRIDLSQLGGDGGGGSGGGGSSGGTLGDQGSRGSDPLPEPRVTLTVEGIPTEFLVNTGAEHSVLTKPMGKMGSKRTVVAGATGSKVYPWTTKRLLKIGQKQVTHSFLVIPECPAPLLGRDLLTKLKAQIQFSTEGPQVTWEDRPAMCLVLNLEEEYRLHEKPVPPSIDPSWLQLFPMVWAEKAGMGLANQVPPVVVELKSDASPVAVRQYPMSKEAREGIRPHIQRFLDLGILVPCQSPWNTPLLPVKKPGTNDYRPVQDLREVNKRVQDIHPTVPNPYNLLSSLPPSHTWYSVLDLKDAFFCLKLHPNSQPLFAFEWRDPEKGNTGQLTWTRLPQGFKNSPTLFDEALHRDLASFRALNPQVVMLQYVDDLLVAAPTYRDCKEGTRRLLQELSKLGYRVSAKKAQLCREEVTYLGYLLKGGKRWLTPARKATVMKIPTPTTPRQVREFLGTAGFCRLWIPGFASLAAPLYPLTREKVPFTWTEAHQEAFGRIKEALLSAPALALPDLTKPFALYVDEKEGVARGVLTQTLGPWRRPVAYLSKKLDPVASGWPTCLKAIAAVALLLKDADKLTLGQNVLVIAPHNLESIVRQPPDRWMTNARMTHYQSLLLNERVSFAPPAILNPATLLPVESDDTPIHICSEILAEETGTRPDLRDQPLPGVPAWYTDGSSFIMDGRRQAGAAIVDNKRTVWASNLPEGTSAQKAELIALTQALRLAEGKSINIYTDSRYAFATAHVHGAIYKQRGLLTSAGKDIKNKEEILALLEAIHLPKRVAIIHCPGHQRGTDPVATGNRKADEAAKQAAQSTRILTETTKNAGKRTADGSEFEKRTADGSEFESPKKKAKVE

SEQ ID NO: 1609 - protein, 2220 aa, synthetic construct
MPAAKRVKLDGGDKKYSIGLDIGTNSVGWAVITDEYKVPSKKFKVLGNTDRHSIKKNLIGALLFDSGETAEATRLKRTARRRYTRRKNRICYLQEIFSNEMAKVDDSFFHRLEESFLVEEDKKHERHPIFGNIVDEVAYHEKYPTIYHLRKKLVDSTDKADLRLIYLALAHMIKFRGHFLIEGDLNPDNSDVDKLFIQLVQTYNQLFEENPINASGVDAKAILSARLSKSRRLENLIAQLPGEKKNGLFGNLIALSLGLTPNFKSNFDLAEDAKLQLSKDTYDDDLDNLLAQIGDQYADLFLAAKNLSDAILLSDILRVNTEITKAPLSASMIKRYDEHHQDLTLLKALVRQQLPEKYKEIFFDQSKNGYAGYIDGGASQEEFYKFIKPILEKMDGTEELLVKLNREDLLRKQRTFDNGSIPHQIHLGELHAILRRQEDFYPFLKDNREKIEKILTFRIPYYVGPLARGNSRFAWMTRKSEETITPWNFEEVVDKGASAQSFIERMTNFDKNLPNEKVLPKHSLLYEYFTVYNELTKVKYVTEGMRKPAFLSGEQKKAIVDLLFKTNRKVTVKQLKEDYFKKIECFDSVEISGVEDRFNASLGTYHDLLKIIKDKDFLDNEENEDILEDIVLTLTLFEDREMIEERLKTYAHLFDDKVMKQLKRRRYTGWGRLSRKLINGIRDKQSGKTILDFLKSDGFANRNFMQLIHDDSLTFKEDIQKAQVSGQGDSLHEHIANLAGSPAIKKGILQTVKVVDELVKVMGRHKPENIVIEMARENQTTQKGQKNSRERMKRIEEGIKELGSQILKEHPVENTQLQNEKLYLYYLQNGRDMYVDQELDINRLSDYDVDHIVPQSFLKDDSIDNKVLTRSDKARGKSDNVPSEEVVKKMKNYWRQLLNAKLITQRKFDNLTKAERGGLSELDKAGFIKRQLVETRQITKHVAQILDSRMNTKYDENDKLIREVKVITLKSKLVSDFRKDFQFYKVREINNYHHAHDAYLNAVVGTALIKKYPKLESEFVYGDYKVYDVRKMIAKSEQEIGKATAKYFFYSNIMNFFKTEITLANGEIRKRPLIETNGETGEIVWDKGRDFATVRKVLSMPQVNIVKKTEVQTGGFSKESILPKRNSDKLIARKKDWDPKKYGGFDSPTVAYSVLVVAKVEKGKSKKLKSVKELLGITIMERSSFEKNPIDFLEAKGYKEVKKDLIIKLPKYSLFELENGRKRMLASAGELQKGNELALPSKYVNFLYLASHYEKLKGSPEDNEQKQLFVEQHKHYLDEIIEQISEFSKRVILADANLDKVLSAYNKHRDKPIREQAENIIHLFTLTNLGAPAAFKYFDTTIDRKRYTSTKEVLDATLIHQSITGLYETRIDLSQLGGDGGPAPAPAPAPAPAPGGTLGDQGSRGSDPLPEPRVTLTVEGIPTEFLVNTGAEHSVLTKPMGKMGSKRTVVAGATGSKVYPWTTKRLLKIGQKQVTHSFLVIPECPAPLLGRDLLTKLKAQIQFSTEGPQVTWEDRPAMCLVLNLEEEYRLHEKPVPPSIDPSWLQLFPMVWAEKAGMGLANQVPPVVVELKSDASPVAVRQYPMSKEAREGIRPHIQRFLDLGILVPCQSPWNTPLLPVKKPGTNDYRPVQDLREVNKRVQDIHPTVPNPYNLLSSLPPSHTWYSVLDLKDAFFCLKLHPNSQPLFAFEWRDPEKGNTGQLTWTRLPQGFKNSPTLFDEALHRDLASFRALNPQVVMLQYVDDLLVAAPTYRDCKEGTRRLLQELSKLGYRVSAKKAQLCREEVTYLGYLLKGGKRWLTPARKATVMKIPTPTTPRQVREFLGTAGFCRLWIPGFASLAAPLYPLTREKVPFTWTEAHQEAFGRIKEALLSAPALALPDLTKPFALYVDEKEGVARGVLTQTLGPWRRPVAYLSKKLDPVASGWPTCLKAIAAVALLLKDADKLTLGQNVLVIAPHNLESIVRQPPDRWMTNARMTHYQSLLLNERVSFAPPAILNPATLLPVESDDTPIHICSEILAEETGTRPDLRDQPLPGVPAWYTDGSSFIMDGRRQAGAAIVDNKRTVWASNLPEGTSAQKAELIALTQALRLAEGKSINIYTDSRYAFATAHVHGAIYKQRGLLTSAGKDIKNKEEILALLEAIHLPKRVAIIHCPGHQRGTDPVATGNRKADEAAKQAAQSTRILTETTKNAGKRTADGSEFEKRTADGSEFESPKKKAKVE

SEQ ID NO: 1610 - protein, 2127 aa, synthetic construct
MPAAKRVKLDGGDKKYSIGLDIGTNSVGWAVITDEYKVPSKKFKVLGNTDRHSIKKNLIGALLFDSGETAEATRLKRTARRRYTRRKNRICYLQEIFSNEMAKVDDSFFHRLEESFLVEEDKKHERHPIFGNIVDEVAYHEKYPTIYHLRKKLVDSTDKADLRLIYLALAHMIKFRGHFLIEGDLNPDNSDVDKLFIQLVQTYNQLFEENPINASGVDAKAILSARLSKSRRLENLIAQLPGEKKNGLFGNLIALSLGLTPNFKSNFDLAEDAKLQLSKDTYDDDLDNLLAQIGDQYADLFLAAKNLSDAILLSDILRVNTEITKAPLSASMIKRYDEHHQDLTLLKALVRQQLPEKYKEIFFDQSKNGYAGYIDGGASQEEFYKFIKPILEKMDGTEELLVKLNREDLLRKQRTFDNGSIPHQIHLGELHAILRRQEDFYPFLKDNREKIEKILTFRIPYYVGPLARGNSRFAWMTRKSEETITPWNFEEVVDKGASAQSFIERMTNFDKNLPNEKVLPKHSLLYEYFTVYNELTKVKYVTEGMRKPAFLSGEQKKAIVDLLFKTNRKVTVKQLKEDYFKKIECFDSVEISGVEDRFNASLGTYHDLLKIIKDKDFLDNEENEDILEDIVLTLTLFEDREMIEERLKTYAHLFDDKVMKQLKRRRYTGWGRLSRKLINGIRDKQSGKTILDFLKSDGFANRNFMQLIHDDSLTFKEDIQKAQVSGQGDSLHEHIANLAGSPAIKKGILQTVKVVDELVKVMGRHKPENIVIEMARENQTTQKGQKNSRERMKRIEEGIKELGSQILKEHPVENTQLQNEKLYLYYLQNGRDMYVDQELDINRLSDYDVDHIVPQSFLKDDSIDNKVLTRSDKARGKSDNVPSEEVVKKMKNYWRQLLNAKLITQRKFDNLTKAERGGLSELDKAGFIKRQLVETRQITKHVAQILDSRMNTKYDENDKLIREVKVITLKSKLVSDFRKDFQFYKVREINNYHHAHDAYLNAVVGTALIKKYPKLESEFVYGDYKVYDVRKMIAKSEQEIGKATAKYFFYSNIMNFFKTEITLANGEIRKRPLIETNGETGEIVWDKGRDFATVRKVLSMPQVNIVKKTEVQTGGFSKESILPKRNSDKLIARKKDWDPKKYGGFDSPTVAYSVLVVAKVEKGKSKKLKSVKELLGITIMERSSFEKNPIDFLEAKGYKEVKKDLIIKLPKYSLFELENGRKRMLASAGELQKGNELALPSKYVNFLYLASHYEKLKGSPEDNEQKQLFVEQHKHYLDEIIEQISEFSKRVILADANLDKVLSAYNKHRDKPIREQAENIIHLFTLTNLGAPAAFKYFDTTIDRKRYTSTKEVLDATLIHQSITGLYETRIDLSQLGGDGGEAAAKGGSPAPGGLLGRDLLTKLKAQIQFSTEGPQVTWEDRPAMCLVLNLEEEYRLHEKPVPPSIDPSWLQLFPMVWAEKAGMGLANQVPPVVVELKSDASPVAVRQYPMSKEAREGIRPHIQRFLDLGILVPCQSPWNTPLLPVKKPGTNDYRPVQDLREVNKRVQDIHPTVPNPYNLLSSLPPSHTWYSVLDLKDAFFCLKLHPNSQPLFAFEWRDPEKGNTGQLTWTRLPQGFKNSPTLFDEALHRDLASFRALNPQVVMLQYVDDLLVAAPTYRDCKEGTRRLLQELSKLGYRVSAKKAQLCREEVTYLGYLLKGGKRWLTPARKATVMKIPTPTTPRQVREFLGTAGFCRLWIPGFASLAAPLYPLTREKVPFTWTEAHQEAFGRIKEALLSAPALALPDLTKPFALYVDEKEGVARGVLTQTLGPWRRPVAYLSKKLDPVASGWPTCLKAIAAVALLLKDADKLTLGQNVLVIAPHNLESIVRQPPDRWMTNARMTHYQSLLLNERVSFAPPAILNPATLLPVESDDTPIHICSEILAEETGTRPDLRDQPLPGVPAWYTDGSSFIMDGRRQAGAAIVDNKRTVWASNLPEGTSAQKAELIALTQALRLAEGKSINIYTDSRYAFATAHVHGAIYKQRGLLTSAGKDIKNKEEILALLEAIHLPKRVAIIHCPGHQRGTDPVATGNRKADEAAKQAAQSTRILTETTKNAGKRTADGSEFEKRTADGSEFESPKKKAKVE

SEQ ID NO: 1611 - protein, 2125 aa, synthetic construct
MPAAKRVKLDGGDKKYSIGLDIGTNSVGWAVITDEYKVPSKKFKVLGNTDRHSIKKNLIGALLFDSGETAEATRLKRTARRRYTRRKNRICYLQEIFSNEMAKVDDSFFHRLEESFLVEEDKKHERHPIFGNIVDEVAYHEKYPTIYHLRKKLVDSTDKADLRLIYLALAHMIKFRGHFLIEGDLNPDNSDVDKLFIQLVQTYNQLFEENPINASGVDAKAILSARLSKSRRLENLIAQLPGEKKNGLFGNLIALSLGLTPNFKSNFDLAEDAKLQLSKDTYDDDLDNLLAQIGDQYADLFLAAKNLSDAILLSDILRVNTEITKAPLSASMIKRYDEHHQDLTLLKALVRQQLPEKYKEIFFDQSKNGYAGYIDGGASQEEFYKFIKPILEKMDGTEELLVKLNREDLLRKQRTFDNGSIPHQIHLGELHAILRRQEDFYPFLKDNREKIEKILTFRIPYYVGPLARGNSRFAWMTRKSEETITPWNFEEVVDKGASAQSFIERMTNFDKNLPNEKVLPKHSLLYEYFTVYNELTKVKYVTEGMRKPAFLSGEQKKAIVDLLFKTNRKVTVKQLKEDYFKKIECFDSVEISGVEDRFNASLGTYHDLLKIIKDKDFLDNEENEDILEDIVLTLTLFEDREMIEERLKTYAHLFDDKVMKQLKRRRYTGWGRLSRKLINGIRDKQSGKTILDFLKSDGFANRNFMQLIHDDSLTFKEDIQKAQVSGQGDSLHEHIANLAGSPAIKKGILQTVKVVDELVKVMGRHKPENIVIEMARENQTTQKGQKNSRERMKRIEEGIKELGSQILKEHPVENTQLQNEKLYLYYLQNGRDMYVDQELDINRLSDYDVDHIVPQSFLKDDSIDNKVLTRSDKARGKSDNVPSEEVVKKMKNYWRQLLNAKLITQRKFDNLTKAERGGLSELDKAGFIKRQLVETRQITKHVAQILDSRMNTKYDENDKLIREVKVITLKSKLVSDFRKDFQFYKVREINNYHHAHDAYLNAVVGTALIKKYPKLESEFVYGDYKVYDVRKMIAKSEQEIGKATAKYFFYSNIMNFFKTEITLANGEIRKRPLIETNGETGEIVWDKGRDFATVRKVLSMPQVNIVKKTEVQTGGFSKESILPKRNSDKLIARKKDWDPKKYGGFDSPTVAYSVLVVAKVEKGKSKKLKSVKELLGITIMERSSFEKNPIDFLEAKGYKEVKKDLIIKLPKYSLFELENGRKRMLASAGELQKGNELALPSKYVNFLYLASHYEKLKGSPEDNEQKQLFVEQHKHYLDEIIEQISEFSKRVILADANLDKVLSAYNKHRDKPIREQAENIIHLFTLTNLGAPAAFKYFDTTIDRKRYTSTKEVLDATLIHQSITGLYETRIDLSQLGGDGGGGGGGSGSSGGLLGRDLLTKLKAQIQFSTEGPQVTWEDRPAMCLVLNLEEEYRLHEKPVPPSIDPSWLQLFPMVWAEKAGMGLANQVPPVVVELKSDASPVAVRQYPMSKEAREGIRPHIQRFLDLGILVPCQSPWNTPLLPVKKPGTNDYRPVQDLREVNKRVQDIHPTVPNPYNLLSSLPPSHTWYSVLDLKDAFFCLKLHPNSQPLFAFEWRDPEKGNTGQLTWTRLPQGFKNSPTLFDEALHRDLASFRALNPQVVMLQYVDDLLVAAPTYRDCKEGTRRLLQELSKLGYRVSAKKAQLCREEVTYLGYLLKGGKRWLTPARKATVMKIPTPTTPRQVREFLGTAGFCRLWIPGFASLAAPLYPLTREKVPFTWTEAHQEAFGRIKEALLSAPALALPDLTKPFALYVDEKEGVARGVLTQTLGPWRRPVAYLSKKLDPVASGWPTCLKAIAAVALLLKDADKLTLGQNVLVIAPHNLESIVRQPPDRWMTNARMTHYQSLLLNERVSFAPPAILNPATLLPVESDDTPIHICSEILAEETGTRPDLRDQPLPGVPAWYTDGSSFIMDGRRQAGAAIVDNKRTVWASNLPEGTSAQKAELIALTQALRLAEGKSINIYTDSRYAFATAHVHGAIYKQRGLLTSAGKDIKNKEEILALLEAIHLPKRVAIIHCPGHQRGTDPVATGNRKADEAAKQAAQSTRILTETTKNAGKRTADGSEFEKRTADGSEFESPKKKAKVE

SEQ ID NO: 1612 - protein, 2127 aa, synthetic construct
MPAAKRVKLDGGDKKYSIGLDIGTNSVGWAVITDEYKVPSKKFKVLGNTDRHSIKKNLIGALLFDSGETAEATRLKRTARRRYTRRKNRICYLQEIFSNEMAKVDDSFFHRLEESFLVEEDKKHERHPIFGNIVDEVAYHEKYPTIYHLRKKLVDSTDKADLRLIYLALAHMIKFRGHFLIEGDLNPDNSDVDKLFIQLVQTYNQLFEENPINASGVDAKAILSARLSKSRRLENLIAQLPGEKKNGLFGNLIALSLGLTPNFKSNFDLAEDAKLQLSKDTYDDDLDNLLAQIGDQYADLFLAAKNLSDAILLSDILRVNTEITKAPLSASMIKRYDEHHQDLTLLKALVRQQLPEKYKEIFFDQSKNGYAGYIDGGASQEEFYKFIKPILEKMDGTEELLVKLNREDLLRKQRTFDNGSIPHQIHLGELHAILRRQEDFYPFLKDNREKIEKILTFRIPYYVGPLARGNSRFAWMTRKSEETITPWNFEEVVDKGASAQSFIERMTNFDKNLPNEKVLPKHSLLYEYFTVYNELTKVKYVTEGMRKPAFLSGEQKKAIVDLLFKTNRKVTVKQLKEDYFKKIECFDSVEISGVEDRFNASLGTYHDLLKIIKDKDFLDNEENEDILEDIVLTLTLFEDREMIEERLKTYAHLFDDKVMKQLKRRRYTGWGRLSRKLINGIRDKQSGKTILDFLKSDGFANRNFMQLIHDDSLTFKEDIQKAQVSGQGDSLHEHIANLAGSPAIKKGILQTVKVVDELVKVMGRHKPENIVIEMARENQTTQKGQKNSRERMKRIEEGIKELGSQILKEHPVENTQLQNEKLYLYYLQNGRDMYVDQELDINRLSDYDVDHIVPQSFLKDDSIDNKVLTRSDKARGKSDNVPSEEVVKKMKNYWRQLLNAKLITQRKFDNLTKAERGGLSELDKAGFIKRQLVETRQITKHVAQILDSRMNTKYDENDKLIREVKVITLKSKLVSDFRKDFQFYKVREINNYHHAHDAYLNAVVGTALIKKYPKLESEFVYGDYKVYDVRKMIAKSEQEIGKATAKYFFYSNIMNFFKTEITLANGEIRKRPLIETNGETGEIVWDKGRDFATVRKVLSMPQVNIVKKTEVQTGGFSKESILPKRNSDKLIARKKDWDPKKYGGFDSPTVAYSVLVVAKVEKGKSKKLKSVKELLGITIMERSSFEKNPIDFLEAKGYKEVKKDLIIKLPKYSLFELENGRKRMLASAGELQKGNELALPSKYVNFLYLASHYEKLKGSPEDNEQKQLFVEQHKHYLDEIIEQISEFSKRVILADANLDKVLSAYNKHRDKPIREQAENIIHLFTLTNLGAPAAFKYFDTTIDRKRYTSTKEVLDATLIHQSITGLYETRIDLSQLGGDGGEAAAKGGGPAPGGLLGRDLLTKLKAQIQFSTEGPQVTWEDRPAMCLVLNLEEEYRLHEKPVPPSIDPSWLQLFPMVWAEKAGMGLANQVPPVVVELKSDASPVAVRQYPMSKEAREGIRPHIQRFLDLGILVPCQSPWNTPLLPVKKPGTNDYRPVQDLREVNKRVQDIHPTVPNPYNLLSSLPPSHTWYSVLDLKDAFFCLKLHPNSQPLFAFEWRDPEKGNTGQLTWTRLPQGFKNSPTLFDEALHRDLASFRALNPQVVMLQYVDDLLVAAPTYRDCKEGTRRLLQELSKLGYRVSAKKAQLCREEVTYLGYLLKGGKRWLTPARKATVMKIPTPTTPRQVREFLGTAGFCRLWIPGFASLAAPLYPLTREKVPFTWTEAHQEAFGRIKEALLSAPALALPDLTKPFALYVDEKEGVARGVLTQTLGPWRRPVAYLSKKLDPVASGWPTCLKAIAAVALLLKDADKLTLGQNVLVIAPHNLESIVRQPPDRWMTNARMTHYQSLLLNERVSFAPPAILNPATLLPVESDDTPIHICSEILAEETGTRPDLRDQPLPGVPAWYTDGSSFIMDGRRQAGAAIVDNKRTVWASNLPEGTSAQKAELIALTQALRLAEGKSINIYTDSRYAFATAHVHGAIYKQRGLLTSAGKDIKNKEEILALLEAIHLPKRVAIIHCPGHQRGTDPVATGNRKADEAAKQAAQSTRILTETTKNAGKRTADGSEFEKRTADGSEFESPKKKAKVE

SEQ ID NO: 1613 - protein, 2127 aa, synthetic construct
MPAAKRVKLDGGDKKYSIGLDIGTNSVGWAVITDEYKVPSKKFKVLGNTDRHSIKKNLIGALLFDSGETAEATRLKRTARRRYTRRKNRICYLQEIFSNEMAKVDDSFFHRLEESFLVEEDKKHERHPIFGNIVDEVAYHEKYPTIYHLRKKLVDSTDKADLRLIYLALAHMIKFRGHFLIEGDLNPDNSDVDKLFIQLVQTYNQLFEENPINASGVDAKAILSARLSKSRRLENLIAQLPGEKKNGLFGNLIALSLGLTPNFKSNFDLAEDAKLQLSKDTYDDDLDNLLAQIGDQYADLFLAAKNLSDAILLSDILRVNTEITKAPLSASMIKRYDEHHQDLTLLKALVRQQLPEKYKEIFFDQSKNGYAGYIDGGASQEEFYKFIKPILEKMDGTEELLVKLNREDLLRKQRTFDNGSIPHQIHLGELHAILRRQEDFYPFLKDNREKIEKILTFRIPYYVGPLARGNSRFAWMTRKSEETITPWNFEEVVDKGASAQSFIERMTNFDKNLPNEKVLPKHSLLYEYFTVYNELTKVKYVTEGMRKPAFLSGEQKKAIVDLLFKTNRKVTVKQLKEDYFKKIECFDSVEISGVEDRFNASLGTYHDLLKIIKDKDFLDNEENEDILEDIVLTLTLFEDREMIEERLKTYAHLFDDKVMKQLKRRRYTGWGRLSRKLINGIRDKQSGKTILDFLKSDGFANRNFMQLIHDDSLTFKEDIQKAQVSGQGDSLHEHIANLAGSPAIKKGILQTVKVVDELVKVMGRHKPENIVIEMARENQTTQKGQKNSRERMKRIEEGIKELGSQILKEHPVENTQLQNEKLYLYYLQNGRDMYVDQELDINRLSDYDVDHIVPQSFLKDDSIDNKVLTRSDKARGKSDNVPSEEVVKKMKNYWRQLLNAKLITQRKFDNLTKAERGGLSELDKAGFIKRQLVETRQITKHVAQILDSRMNTKYDENDKLIREVKVITLKSKLVSDFRKDFQFYKVREINNYHHAHDAYLNAVVGTALIKKYPKLESEFVYGDYKVYDVRKMIAKSEQEIGKATAKYFFYSNIMNFFKTEITLANGEIRKRPLIETNGETGEIVWDKGRDFATVRKVLSMPQVNIVKKTEVQTGGFSKESILPKRNSDKLIARKKDWDPKKYGGFDSPTVAYSVLVVAKVEKGKSKKLKSVKELLGITIMERSSFEKNPIDFLEAKGYKEVKKDLIIKLPKYSLFELENGRKRMLASAGELQKGNELALPSKYVNFLYLASHYEKLKGSPEDNEQKQLFVEQHKHYLDEIIEQISEFSKRVILADANLDKVLSAYNKHRDKPIREQAENIIHLFTLTNLGAPAAFKYFDTTIDRKRYTSTKEVLDATLIHQSITGLYETRIDLSQLGGDGGEAAAKPAPGSSGGLLGRDLLTKLKAQIQFSTEGPQVTWEDRPAMCLVLNLEEEYRLHEKPVPPSIDPSWLQLFPMVWAEKAGMGLANQVPPVVVELKSDASPVAVRQYPMSKEAREGIRPHIQRFLDLGILVPCQSPWNTPLLPVKKPGTNDYRPVQDLREVNKRVQDIHPTVPNPYNLLSSLPPSHTWYSVLDLKDAFFCLKLHPNSQPLFAFEWRDPEKGNTGQLTWTRLPQGFKNSPTLFDEALHRDLASFRALNPQVVMLQYVDDLLVAAPTYRDCKEGTRRLLQELSKLGYRVSAKKAQLCREEVTYLGYLLKGGKRWLTPARKATVMKIPTPTTPRQVREFLGTAGFCRLWIPGFASLAAPLYPLTREKVPFTWTEAHQEAFGRIKEALLSAPALALPDLTKPFALYVDEKEGVARGVLTQTLGPWRRPVAYLSKKLDPVASGWPTCLKAIAAVALLLKDADKLTLGQNVLVIAPHNLESIVRQPPDRWMTNARMTHYQSLLLNERVSFAPPAILNPATLLPVESDDTPIHICSEILAEETGTRPDLRDQPLPGVPAWYTDGSSFIMDGRRQAGAAIVDNKRTVWASNLPEGTSAQKAELIALTQALRLAEGKSINIYTDSRYAFATAHVHGAIYKQRGLLTSAGKDIKNKEEILALLEAIHLPKRVAIIHCPGHQRGTDPVATGNRKADEAAKQAAQSTRILTETTKNAGKRTADGSEFEKRTADGSEFESPKKKAKVE

SEQ ID NO: 1614 - protein, 2127 aa, synthetic construct
MPAAKRVKLDGGDKKYSIGLDIGTNSVGWAVITDEYKVPSKKFKVLGNTDRHSIKKNLIGALLFDSGETAEATRLKRTARRRYTRRKNRICYLQEIFSNEMAKVDDSFFHRLEESFLVEEDKKHERHPIFGNIVDEVAYHEKYPTIYHLRKKLVDSTDKADLRLIYLALAHMIKFRGHFLIEGDLNPDNSDVDKLFIQLVQTYNQLFEENPINASGVDAKAILSARLSKSRRLENLIAQLPGEKKNGLFGNLIALSLGLTPNFKSNFDLAEDAKLQLSKDTYDDDLDNLLAQIGDQYADLFLAAKNLSDAILLSDILRVNTEITKAPLSASMIKRYDEHHQDLTLLKALVRQQLPEKYKEIFFDQSKNGYAGYIDGGASQEEFYKFIKPILEKMDGTEELLVKLNREDLLRKQRTFDNGSIPHQIHLGELHAILRRQEDFYPFLKDNREKIEKILTFRIPYYVGPLARGNSRFAWMTRKSEETITPWNFEEVVDKGASAQSFIERMTNFDKNLPNEKVLPKHSLLYEYFTVYNELTKVKYVTEGMRKPAFLSGEQKKAIVDLLFKTNRKVTVKQLKEDYFKKIECFDSVEISGVEDRFNASLGTYHDLLKIIKDKDFLDNEENEDILEDIVLTLTLFEDREMIEERLKTYAHLFDDKVMKQLKRRRYTGWGRLSRKLINGIRDKQSGKTILDFLKSDGFANRNFMQLIHDDSLTFKEDIQKAQVSGQGDSLHEHIANLAGSPAIKKGILQTVKVVDELVKVMGRHKPENIVIEMARENQTTQKGQKNSRERMKRIEEGIKELGSQILKEHPVENTQLQNEKLYLYYLQNGRDMYVDQELDINRLSDYDVDHIVPQSFLKDDSIDNKVLTRSDKARGKSDNVPSEEVVKKMKNYWRQLLNAKLITQRKFDNLTKAERGGLSELDKAGFIKRQLVETRQITKHVAQILDSRMNTKYDENDKLIREVKVITLKSKLVSDFRKDFQFYKVREINNYHHAHDAYLNAVVGTALIKKYPKLESEFVYGDYKVYDVRKMIAKSEQEIGKATAKYFFYSNIMNFFKTEITLANGEIRKRPLIETNGETGEIVWDKGRDFATVRKVLSMPQVNIVKKTEVQTGGFSKESILPKRNSDKLIARKKDWDPKKYGGFDSPTVAYSVLVVAKVEKGKSKKLKSVKELLGITIMERSSFEKNPIDFLEAKGYKEVKKDLIIKLPKYSLFELENGRKRMLASAGELQKGNELALPSKYVNFLYLASHYEKLKGSPEDNEQKQLFVEQHKHYLDEIIEQISEFSKRVILADANLDKVLSAYNKHRDKPIREQAENIIHLFTLTNLGAPAAFKYFDTTIDRKRYTSTKEVLDATLIHQSITGLYETRIDLSQLGGDGGPAPGGSEAAAKGGLLGRDLLTKLKAQIQFSTEGPQVTWEDRPAMCLVLNLEEEYRLHEKPVPPSIDPSWLQLFPMVWAEKAGMGLANQVPPVVVELKSDASPVAVRQYPMSKEAREGIRPHIQRFLDLGILVPCQSPWNTPLLPVKKPGTNDYRPVQDLREVNKRVQDIHPTVPNPYNLLSSLPPSHTWYSVLDLKDAFFCLKLHPNSQPLFAFEWRDPEKGNTGQLTWTRLPQGFKNSPTLFDEALHRDLASFRALNPQVVMLQYVDDLLVAAPTYRDCKEGTRRLLQELSKLGYRVSAKKAQLCREEVTYLGYLLKGGKRWLTPARKATVMKIPTPTTPRQVREFLGTAGFCRLWIPGFASLAAPLYPLTREKVPFTWTEAHQEAFGRIKEALLSAPALALPDLTKPFALYVDEKEGVARGVLTQTLGPWRRPVAYLSKKLDPVASGWPTCLKAIAAVALLLKDADKLTLGQNVLVIAPHNLESIVRQPPDRWMTNARMTHYQSLLLNERVSFAPPAILNPATLLPVESDDTPIHICSEILAEETGTRPDLRDQPLPGVPAWYTDGSSFIMDGRRQAGAAIVDNKRTVWASNLPEGTSAQKAELIALTQALRLAEGKSINIYTDSRYAFATAHVHGAIYKQRGLLTSAGKDIKNKEEILALLEAIHLPKRVAIIHCPGHQRGTDPVATGNRKADEAAKQAAQSTRILTETTKNAGKRTADGSEFEKRTADGSEFESPKKKAKVE

SEQ ID NO: 1615 - protein, 2134 aa, synthetic construct
MPAAKRVKLDGGDKKYSIGLDIGTNSVGWAVITDEYKVPSKKFKVLGNTDRHSIKKNLIGALLFDSGETAEATRLKRTARRRYTRRKNRICYLQEIFSNEMAKVDDSFFHRLEESFLVEEDKKHERHPIFGNIVDEVAYHEKYPTIYHLRKKLVDSTDKADLRLIYLALAHMIKFRGHFLIEGDLNPDNSDVDKLFIQLVQTYNQLFEENPINASGVDAKAILSARLSKSRRLENLIAQLPGEKKNGLFGNLIALSLGLTPNFKSNFDLAEDAKLQLSKDTYDDDLDNLLAQIGDQYADLFLAAKNLSDAILLSDILRVNTEITKAPLSASMIKRYDEHHQDLTLLKALVRQQLPEKYKEIFFDQSKNGYAGYIDGGASQEEFYKFIKPILEKMDGTEELLVKLNREDLLRKQRTFDNGSIPHQIHLGELHAILRRQEDFYPFLKDNREKIEKILTFRIPYYVGPLARGNSRFAWMTRKSEETITPWNFEEVVDKGASAQSFIERMTNFDKNLPNEKVLPKHSLLYEYFTVYNELTKVKYVTEGMRKPAFLSGEQKKAIVDLLFKTNRKVTVKQLKEDYFKKIECFDSVEISGVEDRFNASLGTYHDLLKIIKDKDFLDNEENEDILEDIVLTLTLFEDREMIEERLKTYAHLFDDKVMKQLKRRRYTGWGRLSRKLINGIRDKQSGKTILDFLKSDGFANRNFMQLIHDDSLTFKEDIQKAQVSGQGDSLHEHIANLAGSPAIKKGILQTVKVVDELVKVMGRHKPENIVIEMARENQTTQKGQKNSRERMKRIEEGIKELGSQILKEHPVENTQLQNEKLYLYYLQNGRDMYVDQELDINRLSDYDVDHIVPQSFLKDDSIDNKVLTRSDKARGKSDNVPSEEVVKKMKNYWRQLLNAKLITQRKFDNLTKAERGGLSELDKAGFIKRQLVETRQITKHVAQILDSRMNTKYDENDKLIREVKVITLKSKLVSDFRKDFQFYKVREINNYHHAHDAYLNAVVGTALIKKYPKLESEFVYGDYKVYDVRKMIAKSEQEIGKATAKYFFYSNIMNFFKTEITLANGEIRKRPLIETNGETGEIVWDKGRDFATVRKVLSMPQVNIVKKTEVQTGGFSKESILPKRNSDKLIARKKDWDPKKYGGFDSPTVAYSVLVVAKVEKGKSKKLKSVKELLGITIMERSSFEKNPIDFLEAKGYKEVKKDLIIKLPKYSLFELENGRKRMLASAGELQKGNELALPSKYVNFLYLASHYEKLKGSPEDNEQKQLFVEQHKHYLDEIIEQISEFSKRVILADANLDKVLSAYNKHRDKPIREQAENIIHLFTLTNLGAPAAFKYFDTTIDRKRYTSTKEVLDATLIHQSITGLYETRIDLSQLGGDGGGSSGSSGSSGSSGSSGSSGGLLGRDLLTKLKAQIQFSTEGPQVTWEDRPAMCLVLNLEEEYRLHEKPVPPSIDPSWLQLFPMVWAEKAGMGLANQVPPVVVELKSDASPVAVRQYPMSKEAREGIRPHIQRFLDLGILVPCQSPWNTPLLPVKKPGTNDYRPVQDLREVNKRVQDIHPTVPNPYNLLSSLPPSHTWYSVLDLKDAFFCLKLHPNSQPLFAFEWRDPEKGNTGQLTWTRLPQGFKNSPTLFDEALHRDLASFRALNPQVVMLQYVDDLLVAAPTYRDCKEGTRRLLQELSKLGYRVSAKKAQLCREEVTYLGYLLKGGKRWLTPARKATVMKIPTPTTPRQVREFLGTAGFCRLWIPGFASLAAPLYPLTREKVPFTWTEAHQEAFGRIKEALLSAPALALPDLTKPFALYVDEKEGVARGVLTQTLGPWRRPVAYLSKKLDPVASGWPTCLKAIAAVALLLKDADKLTLGQNVLVIAPHNLESIVRQPPDRWMTNARMTHYQSLLLNERVSFAPPAILNPATLLPVESDDTPIHICSEILAEETGTRPDLRDQPLPGVPAWYTDGSSFIMDGRRQAGAAIVDNKRTVWASNLPEGTSAQKAELIALTQALRLAEGKSINIYTDSRYAFATAHVHGAIYKQRGLLTSAGKDIKNKEEILALLEAIHLPKRVAIIHCPGHQRGTDPVATGNRKADEAAKQAAQSTRILTETTKNAGKRTADGSEFEKRTADGSEFESPKKKAKVE

SEQ ID NO: 1616 - protein, 2123 aa, synthetic construct
MPAAKRVKLDGGDKKYSIGLDIGTNSVGWAVITDEYKVPSKKFKVLGNTDRHSIKKNLIGALLFDSGETAEATRLKRTARRRYTRRKNRICYLQEIFSNEMAKVDDSFFHRLEESFLVEEDKKHERHPIFGNIVDEVAYHEKYPTIYHLRKKLVDSTDKADLRLIYLALAHMIKFRGHFLIEGDLNPDNSDVDKLFIQLVQTYNQLFEENPINASGVDAKAILSARLSKSRRLENLIAQLPGEKKNGLFGNLIALSLGLTPNFKSNFDLAEDAKLQLSKDTYDDDLDNLLAQIGDQYADLFLAAKNLSDAILLSDILRVNTEITKAPLSASMIKRYDEHHQDLTLLKALVRQQLPEKYKEIFFDQSKNGYAGYIDGGASQEEFYKFIKPILEKMDGTEELLVKLNREDLLRKQRTFDNGSIPHQIHLGELHAILRRQEDFYPFLKDNREKIEKILTFRIPYYVGPLARGNSRFAWMTRKSEETITPWNFEEVVDKGASAQSFIERMTNFDKNLPNEKVLPKHSLLYEYFTVYNELTKVKYVTEGMRKPAFLSGEQKKAIVDLLFKTNRKVTVKQLKEDYFKKIECFDSVEISGVEDRFNASLGTYHDLLKIIKDKDFLDNEENEDILEDIVLTLTLFEDREMIEERLKTYAHLFDDKVMKQLKRRRYTGWGRLSRKLINGIRDKQSGKTILDFLKSDGFANRNFMQLIHDDSLTFKEDIQKAQVSGQGDSLHEHIANLAGSPAIKKGILQTVKVVDELVKVMGRHKPENIVIEMARENQTTQKGQKNSRERMKRIEEGIKELGSQILKEHPVENTQLQNEKLYLYYLQNGRDMYVDQELDINRLSDYDVDHIVPQSFLKDDSIDNKVLTRSDKARGKSDNVPSEEVVKKMKNYWRQLLNAKLITQRKFDNLTKAERGGLSELDKAGFIKRQLVETRQITKHVAQILDSRMNTKYDENDKLIREVKVITLKSKLVSDFRKDFQFYKVREINNYHHAHDAYLNAVVGTALIKKYPKLESEFVYGDYKVYDVRKMIAKSEQEIGKATAKYFFYSNIMNFFKTEITLANGEIRKRPLIETNGETGEIVWDKGRDFATVRKVLSMPQVNIVKKTEVQTGGFSKESILPKRNSDKLIARKKDWDPKKYGGFDSPTVAYSVLVVAKVEKGKSKKLKSVKELLGITIMERSSFEKNPIDFLEAKGYKEVKKDLIIKLPKYSLFELENGRKRMLASAGELQKGNELALPSKYVNFLYLASHYEKLKGSPEDNEQKQLFVEQHKHYLDEIIEQISEFSKRVILADANLDKVLSAYNKHRDKPIREQAENIIHLFTLTNLGAPAAFKYFDTTIDRKRYTSTKEVLDATLIHQSITGLYETRIDLSQLGGDGGPAPAPAPGGLLGRDLLTKLKAQIQFSTEGPQVTWEDRPAMCLVLNLEEEYRLHEKPVPPSIDPSWLQLFPMVWAEKAGMGLANQVPPVVVELKSDASPVAVRQYPMSKEAREGIRPHIQRFLDLGILVPCQSPWNTPLLPVKKPGTNDYRPVQDLREVNKRVQDIHPTVPNPYNLLSSLPPSHTWYSVLDLKDAFFCLKLHPNSQPLFAFEWRDPEKGNTGQLTWTRLPQGFKNSPTLFNEALHRDLASFRALNPQVVMLQYVDDLLVAAPTYRDCKEGTRRLLQELSKLGYRVSAKKAQLCREEVTYLGYLLKGGKRWLTPARKATVMKIPTPTTPRQVREFLGTAGFCRLWIPGFASLAAPLYPLTRPKVPFTWTEAHQEAFGRIKEALLSAPALALPDLTKPFALYVDEKEGVARGVLTQTLGPWRRPVAYLSKKLDPVASGWPTCLKAIAAVALLLKDADKLTLGQNVLVIAPHNLESIVRQPPDRWMTNARMTHYQSLLLNERVSFAPPAILNPATLLPVESDDTPIHICSEILAEETGTRPDLRDQPLPGVPAWYTDGSSFIMDGRRQAGAAIVDNKRTVWASNLPEGTSAQKAELIALTQALRLAEGKSINIYTDSRYAFATAHVHGAIYKQRGWLTSAGKDIKNKEEILALLEAIHLPKRVAIIHCPGHQRGTDPVATGNRKADEAAKQAAQSTRILTETTKNAGKRTADGSEFEKRTADGSEFESPKKKAKVE

SEQ ID NO: 1617 - protein, 2131 aa, synthetic construct
MPAAKRVKLDGGDKKYSIGLDIGTNSVGWAVITDEYKVPSKKFKVLGNTDRHSIKKNLIGALLFDSGETAEATRLKRTARRRYTRRKNRICYLQEIFSNEMAKVDDSFFHRLEESFLVEEDKKHERHPIFGNIVDEVAYHEKYPTIYHLRKKLVDSTDKADLRLIYLALAHMIKFRGHFLIEGDLNPDNSDVDKLFIQLVQTYNQLFEENPINASGVDAKAILSARLSKSRRLENLIAQLPGEKKNGLFGNLIALSLGLTPNFKSNFDLAEDAKLQLSKDTYDDDLDNLLAQIGDQYADLFLAAKNLSDAILLSDILRVNTEITKAPLSASMIKRYDEHHQDLTLLKALVRQQLPEKYKEIFFDQSKNGYAGYIDGGASQEEFYKFIKPILEKMDGTEELLVKLNREDLLRKQRTFDNGSIPHQIHLGELHAILRRQEDFYPFLKDNREKIEKILTFRIPYYVGPLARGNSRFAWMTRKSEETITPWNFEEVVDKGASAQSFIERMTNFDKNLPNEKVLPKHSLLYEYFTVYNELTKVKYVTEGMRKPAFLSGEQKKAIVDLLFKTNRKVTVKQLKEDYFKKIECFDSVEISGVEDRFNASLGTYHDLLKIIKDKDFLDNEENEDILEDIVLTLTLFEDREMIEERLKTYAHLFDDKVMKQLKRRRYTGWGRLSRKLINGIRDKQSGKTILDFLKSDGFANRNFMQLIHDDSLTFKEDIQKAQVSGQGDSLHEHIANLAGSPAIKKGILQTVKVVDELVKVMGRHKPENIVIEMARENQTTQKGQKNSRERMKRIEEGIKELGSQILKEHPVENTQLQNEKLYLYYLQNGRDMYVDQELDINRLSDYDVDHIVPQSFLKDDSIDNKVLTRSDKARGKSDNVPSEEVVKKMKNYWRQLLNAKLITQRKFDNLTKAERGGLSELDKAGFIKRQLVETRQITKHVAQILDSRMNTKYDENDKLIREVKVITLKSKLVSDFRKDFQFYKVREINNYHHAHDAYLNAVVGTALIKKYPKLESEFVYGDYKVYDVRKMIAKSEQEIGKATAKYFFYSNIMNFFKTEITLANGEIRKRPLIETNGETGEIVWDKGRDFATVRKVLSMPQVNIVKKTEVQTGGFSKESILPKRNSDKLIARKKDWDPKKYGGFDSPTVAYSVLVVAKVEKGKSKKLKSVKELLGITIMERSSFEKNPIDFLEAKGYKEVKKDLIIKLPKYSLFELENGRKRMLASAGELQKGNELALPSKYVNFLYLASHYEKLKGSPEDNEQKQLFVEQHKHYLDEIIEQISEFSKRVILADANLDKVLSAYNKHRDKPIREQAENIIHLFTLTNLGAPAAFKYFDTTIDRKRYTSTKEVLDATLIHQSITGLYETRIDLSQLGGDGGGSSGSSGSSGSSGSSGGLLGRDLLTKLKAQIQFSTEGPQVTWEDRPAMCLVLNLEEEYRLHEKPVPPSIDPSWLQLFPMVWAEKAGMGLANQVPPVVVELKSDASPVAVRQYPMSKEAREGIRPHIQRFLDLGILVPCQSPWNTPLLPVKKPGTNDYRPVQDLREVNKRVQDIHPTVPNPYNLLSSLPPSHTWYSVLDLKDAFFCLKLHPNSQPLFAFEWRDPEKGNTGQLTWTRLPQGFKNSPTLFNEALHRDLASFRALNPQVVMLQYVDDLLVAAPTYRDCKEGTRRLLQELSKLGYRVSAKKAQLCREEVTYLGYLLKGGKRWLTPARKATVMKIPTPTTPRQVREFLGTAGFCRLWIPGFASLAAPLYPLTRPKVPFTWTEAHQEAFGRIKEALLSAPALALPDLTKPFALYVDEKEGVARGVLTQTLGPWRRPVAYLSKKLDPVASGWPTCLKAIAAVALLLKDADKLTLGQNVLVIAPHNLESIVRQPPDRWMTNARMTHYQSLLLNERVSFAPPAILNPATLLPVESDDTPIHICSEILAEETGTRPDLRDQPLPGVPAWYTDGSSFIMDGRRQAGAAIVDNKRTVWASNLPEGTSAQKAELIALTQALRLAEGKSINIYTDSRYAFATAHVHGAIYKQRGWLTSAGKDIKNKEEILALLEAIHLPKRVAIIHCPGHQRGTDPVATGNRKADEAAKQAAQSTRILTETTKNAGKRTADGSEFEKRTADGSEFESPKKKAKVE

SEQ ID NO: 1618 - protein, 2127 aa, synthetic construct
MPAAKRVKLDGGDKKYSIGLDIGTNSVGWAVITDEYKVPSKKFKVLGNTDRHSIKKNLIGALLFDSGETAEATRLKRTARRRYTRRKNRICYLQEIFSNEMAKVDDSFFHRLEESFLVEEDKKHERHPIFGNIVDEVAYHEKYPTIYHLRKKLVDSTDKADLRLIYLALAHMIKFRGHFLIEGDLNPDNSDVDKLFIQLVQTYNQLFEENPINASGVDAKAILSARLSKSRRLENLIAQLPGEKKNGLFGNLIALSLGLTPNFKSNFDLAEDAKLQLSKDTYDDDLDNLLAQIGDQYADLFLAAKNLSDAILLSDILRVNTEITKAPLSASMIKRYDEHHQDLTLLKALVRQQLPEKYKEIFFDQSKNGYAGYIDGGASQEEFYKFIKPILEKMDGTEELLVKLNREDLLRKQRTFDNGSIPHQIHLGELHAILRRQEDFYPFLKDNREKIEKILTFRIPYYVGPLARGNSRFAWMTRKSEETITPWNFEEVVDKGASAQSFIERMTNFDKNLPNEKVLPKHSLLYEYFTVYNELTKVKYVTEGMRKPAFLSGEQKKAIVDLLFKTNRKVTVKQLKEDYFKKIECFDSVEISGVEDRFNASLGTYHDLLKIIKDKDFLDNEENEDILEDIVLTLTLFEDREMIEERLKTYAHLFDDKVMKQLKRRRYTGWGRLSRKLINGIRDKQSGKTILDFLKSDGFANRNFMQLIHDDSLTFKEDIQKAQVSGQGDSLHEHIANLAGSPAIKKGILQTVKVVDELVKVMGRHKPENIVIEMARENQTTQKGQKNSRERMKRIEEGIKELGSQILKEHPVENTQLQNEKLYLYYLQNGRDMYVDQELDINRLSDYDVDHIVPQSFLKDDSIDNKVLTRSDKARGKSDNVPSEEVVKKMKNYWRQLLNAKLITQRKFDNLTKAERGGLSELDKAGFIKRQLVETRQITKHVAQILDSRMNTKYDENDKLIREVKVITLKSKLVSDFRKDFQFYKVREINNYHHAHDAYLNAVVGTALIKKYPKLESEFVYGDYKVYDVRKMIAKSEQEIGKATAKYFFYSNIMNFFKTEITLANGEIRKRPLIETNGETGEIVWDKGRDFATVRKVLSMPQVNIVKKTEVQTGGFSKESILPKRNSDKLIARKKDWDPKKYGGFDSPTVAYSVLVVAKVEKGKSKKLKSVKELLGITIMERSSFEKNPIDFLEAKGYKEVKKDLIIKLPKYSLFELENGRKRMLASAGELQKGNELALPSKYVNFLYLASHYEKLKGSPEDNEQKQLFVEQHKHYLDEIIEQISEFSKRVILADANLDKVLSAYNKHRDKPIREQAENIIHLFTLTNLGAPAAFKYFDTTIDRKRYTSTKEVLDATLIHQSITGLYETRIDLSQLGGDGGEAAAKPAPGSSGGLLGRDLLTKLKAQIQFSTEGPQVTWEDRPAMCLVLNLEEEYRLHEKPVPPSIDPSWLQLFPMVWAEKAGMGLANQVPPVVVELKSDASPVAVRQYPMSKEAREGIRPHIQRFLDLGILVPCQSPWNTPLLPVKKPGTNDYRPVQDLREVNKRVQDIHPTVPNPYNLLSSLPPSHTWYSVLDLKDAFFCLKLHPNSQPLFAFEWRDPEKGNTGQLTWTRLPQGFKNSPTLFNEALHRDLASFRALNPQVVMLQYVDDLLVAAPTYRDCKEGTRRLLQELSKLGYRVSAKKAQLCREEVTYLGYLLKGGKRWLTPARKATVMKIPTPTTPRQVREFLGTAGFCRLWIPGFASLAAPLYPLTRPKVPFTWTEAHQEAFGRIKEALLSAPALALPDLTKPFALYVDEKEGVARGVLTQTLGPWRRPVAYLSKKLDPVASGWPTCLKAIAAVALLLKDADKLTLGQNVLVIAPHNLESIVRQPPDRWMTNARMTHYQSLLLNERVSFAPPAILNPATLLPVESDDTPIHICSEILAEETGTRPDLRDQPLPGVPAWYTDGSSFIMDGRRQAGAAIVDNKRTVWASNLPEGTSAQKAELIALTQALRLAEGKSINIYTDSRYAFATAHVHGAIYKQRGWLTSAGKDIKNKEEILALLEAIHLPKRVAIIHCPGHQRGTDPVATGNRKADEAAKQAAQSTRILTETTKNAGKRTADGSEFEKRTADGSEFESPKKKAKVE

SEQ ID NO: 1619 - protein, 2127 aa, synthetic construct
MPAAKRVKLDGGDKKYSIGLDIGTNSVGWAVITDEYKVPSKKFKVLGNTDRHSIKKNLIGALLFDSGETAEATRLKRTARRRYTRRKNRICYLQEIFSNEMAKVDDSFFHRLEESFLVEEDKKHERHPIFGNIVDEVAYHEKYPTIYHLRKKLVDSTDKADLRLIYLALAHMIKFRGHFLIEGDLNPDNSDVDKLFIQLVQTYNQLFEENPINASGVDAKAILSARLSKSRRLENLIAQLPGEKKNGLFGNLIALSLGLTPNFKSNFDLAEDAKLQLSKDTYDDDLDNLLAQIGDQYADLFLAAKNLSDAILLSDILRVNTEITKAPLSASMIKRYDEHHQDLTLLKALVRQQLPEKYKEIFFDQSKNGYAGYIDGGASQEEFYKFIKPILEKMDGTEELLVKLNREDLLRKQRTFDNGSIPHQIHLGELHAILRRQEDFYPFLKDNREKIEKILTFRIPYYVGPLARGNSRFAWMTRKSEETITPWNFEEVVDKGASAQSFIERMTNFDKNLPNEKVLPKHSLLYEYFTVYNELTKVKYVTEGMRKPAFLSGEQKKAIVDLLFKTNRKVTVKQLKEDYFKKIECFDSVEISGVEDRFNASLGTYHDLLKIIKDKDFLDNEENEDILEDIVLTLTLFEDREMIEERLKTYAHLFDDKVMKQLKRRRYTGWGRLSRKLINGIRDKQSGKTILDFLKSDGFANRNFMQLIHDDSLTFKEDIQKAQVSGQGDSLHEHIANLAGSPAIKKGILQTVKVVDELVKVMGRHKPENIVIEMARENQTTQKGQKNSRERMKRIEEGIKELGSQILKEHPVENTQLQNEKLYLYYLQNGRDMYVDQELDINRLSDYDVDHIVPQSFLKDDSIDNKVLTRSDKARGKSDNVPSEEVVKKMKNYWRQLLNAKLITQRKFDNLTKAERGGLSELDKAGFIKRQLVETRQITKHVAQILDSRMNTKYDENDKLIREVKVITLKSKLVSDFRKDFQFYKVREINNYHHAHDAYLNAVVGTALIKKYPKLESEFVYGDYKVYDVRKMIAKSEQEIGKATAKYFFYSNIMNFFKTEITLANGEIRKRPLIETNGETGEIVWDKGRDFATVRKVLSMPQVNIVKKTEVQTGGFSKESILPKRNSDKLIARKKDWDPKKYGGFDSPTVAYSVLVVAKVEKGKSKKLKSVKELLGITIMERSSFEKNPIDFLEAKGYKEVKKDLIIKLPKYSLFELENGRKRMLASAGELQKGNELALPSKYVNFLYLASHYEKLKGSPEDNEQKQLFVEQHKHYLDEIIEQISEFSKRVILADANLDKVLSAYNKHRDKPIREQAENIIHLFTLTNLGAPAAFKYFDTTIDRKRYTSTKEVLDATLIHQSITGLYETRIDLSQLGGDGGPAPAPAPAPAPGGLLGRDLLTKLKAQIQFSTEGPQVTWEDRPAMCLVLNLEEEYRLHEKPVPPSIDPSWLQLFPMVWAEKAGMGLANQVPPVVVELKSDASPVAVRQYPMSKEAREGIRPHIQRFLDLGILVPCQSPWNTPLLPVKKPGTNDYRPVQDLREVNKRVQDIHPTVPNPYNLLSSLPPSHTWYSVLDLKDAFFCLKLHPNSQPLFAFEWRDPEKGNTGQLTWTRLPQGFKNSPTLFNEALHRDLASFRALNPQVVMLQYVDDLLVAAPTYRDCKEGTRRLLQELSKLGYRVSAKKAQLCREEVTYLGYLLKGGKRWLTPARKATVMKIPTPTTPRQVREFLGTAGFCRLWIPGFASLAAPLYPLTRPKVPFTWTEAHQEAFGRIKEALLSAPALALPDLTKPFALYVDEKEGVARGVLTQTLGPWRRPVAYLSKKLDPVASGWPTCLKAIAAVALLLKDADKLTLGQNVLVIAPHNLESIVRQPPDRWMTNARMTHYQSLLLNERVSFAPPAILNPATLLPVESDDTPIHICSEILAEETGTRPDLRDQPLPGVPAWYTDGSSFIMDGRRQAGAAIVDNKRTVWASNLPEGTSAQKAELIALTQALRLAEGKSINIYTDSRYAFATAHVHGAIYKQRGWLTSAGKDIKNKEEILALLEAIHLPKRVAIIHCPGHQRGTDPVATGNRKADEAAKQAAQSTRILTETTKNAGKRTADGSEFEKRTADGSEFESPKKKAKVE

SEQ ID NO: 1620 - protein, 2127 aa, synthetic construct
MPAAKRVKLDGGDKKYSIGLDIGTNSVGWAVITDEYKVPSKKFKVLGNTDRHSIKKNLIGALLFDSGETAEATRLKRTARRRYTRRKNRICYLQEIFSNEMAKVDDSFFHRLEESFLVEEDKKHERHPIFGNIVDEVAYHEKYPTIYHLRKKLVDSTDKADLRLIYLALAHMIKFRGHFLIEGDLNPDNSDVDKLFIQLVQTYNQLFEENPINASGVDAKAILSARLSKSRRLENLIAQLPGEKKNGLFGNLIALSLGLTPNFKSNFDLAEDAKLQLSKDTYDDDLDNLLAQIGDQYADLFLAAKNLSDAILLSDILRVNTEITKAPLSASMIKRYDEHHQDLTLLKALVRQQLPEKYKEIFFDQSKNGYAGYIDGGASQEEFYKFIKPILEKMDGTEELLVKLNREDLLRKQRTFDNGSIPHQIHLGELHAILRRQEDFYPFLKDNREKIEKILTFRIPYYVGPLARGNSRFAWMTRKSEETITPWNFEEVVDKGASAQSFIERMTNFDKNLPNEKVLPKHSLLYEYFTVYNELTKVKYVTEGMRKPAFLSGEQKKAIVDLLFKTNRKVTVKQLKEDYFKKIECFDSVEISGVEDRFNASLGTYHDLLKIIKDKDFLDNEENEDILEDIVLTLTLFEDREMIEERLKTYAHLFDDKVMKQLKRRRYTGWGRLSRKLINGIRDKQSGKTILDFLKSDGFANRNFMQLIHDDSLTFKEDIQKAQVSGQGDSLHEHIANLAGSPAIKKGILQTVKVVDELVKVMGRHKPENIVIEMARENQTTQKGQKNSRERMKRIEEGIKELGSQILKEHPVENTQLQNEKLYLYYLQNGRDMYVDQELDINRLSDYDVDHIVPQSFLKDDSIDNKVLTRSDKARGKSDNVPSEEVVKKMKNYWRQLLNAKLITQRKFDNLTKAERGGLSELDKAGFIKRQLVETRQITKHVAQILDSRMNTKYDENDKLIREVKVITLKSKLVSDFRKDFQFYKVREINNYHHAHDAYLNAVVGTALIKKYPKLESEFVYGDYKVYDVRKMIAKSEQEIGKATAKYFFYSNIMNFFKTEITLANGEIRKRPLIETNGETGEIVWDKGRDFATVRKVLSMPQVNIVKKTEVQTGGFSKESILPKRNSDKLIARKKDWDPKKYGGFDSPTVAYSVLVVAKVEKGKSKKLKSVKELLGITIMERSSFEKNPIDFLEAKGYKEVKKDLIIKLPKYSLFELENGRKRMLASAGELQKGNELALPSKYVNFLYLASHYEKLKGSPEDNEQKQLFVEQHKHYLDEIIEQISEFSKRVILADANLDKVLSAYNKHRDKPIREQAENIIHLFTLTNLGAPAAFKYFDTTIDRKRYTSTKEVLDATLIHQSITGLYETRIDLSQLGGDGGGGSPAPEAAAKGGLLGRDLLTKLKAQIQFSTEGPQVTWEDRPAMCLVLNLEEEYRLHEKPVPPSIDPSWLQLFPMVWAEKAGMGLANQVPPVVVELKSDASPVAVRQYPMSKEAREGIRPHIQRFLDLGILVPCQSPWNTPLLPVKKPGTNDYRPVQDLREVNKRVQDIHPTVPNPYNLLSSLPPSHTWYSVLDLKDAFFCLKLHPNSQPLFAFEWRDPEKGNTGQLTWTRLPQGFKNSPTLFNEALHRDLASFRALNPQVVMLQYVDDLLVAAPTYRDCKEGTRRLLQELSKLGYRVSAKKAQLCREEVTYLGYLLKGGKRWLTPARKATVMKIPTPTTPRQVREFLGTAGFCRLWIPGFASLAAPLYPLTRPKVPFTWTEAHQEAFGRIKEALLSAPALALPDLTKPFALYVDEKEGVARGVLTQTLGPWRRPVAYLSKKLDPVASGWPTCLKAIAAVALLLKDADKLTLGQNVLVIAPHNLESIVRQPPDRWMTNARMTHYQSLLLNERVSFAPPAILNPATLLPVESDDTPIHICSEILAEETGTRPDLRDQPLPGVPAWYTDGSSFIMDGRRQAGAAIVDNKRTVWASNLPEGTSAQKAELIALTQALRLAEGKSINIYTDSRYAFATAHVHGAIYKQRGWLTSAGKDIKNKEEILALLEAIHLPKRVAIIHCPGHQRGTDPVATGNRKADEAAKQAAQSTRILTETTKNAGKRTADGSEFEKRTADGSEFESPKKKAKVE

SEQ ID NO: 1621 - protein, 2146 aa, synthetic construct
MPAAKRVKLDGGDKKYSIGLDIGTNSVGWAVITDEYKVPSKKFKVLGNTDRHSIKKNLIGALLFDSGETAEATRLKRTARRRYTRRKNRICYLQEIFSNEMAKVDDSFFHRLEESFLVEEDKKHERHPIFGNIVDEVAYHEKYPTIYHLRKKLVDSTDKADLRLIYLALAHMIKFRGHFLIEGDLNPDNSDVDKLFIQLVQTYNQLFEENPINASGVDAKAILSARLSKSRRLENLIAQLPGEKKNGLFGNLIALSLGLTPNFKSNFDLAEDAKLQLSKDTYDDDLDNLLAQIGDQYADLFLAAKNLSDAILLSDILRVNTEITKAPLSASMIKRYDEHHQDLTLLKALVRQQLPEKYKEIFFDQSKNGYAGYIDGGASQEEFYKFIKPILEKMDGTEELLVKLNREDLLRKQRTFDNGSIPHQIHLGELHAILRRQEDFYPFLKDNREKIEKILTFRIPYYVGPLARGNSRFAWMTRKSEETITPWNFEEVVDKGASAQSFIERMTNFDKNLPNEKVLPKHSLLYEYFTVYNELTKVKYVTEGMRKPAFLSGEQKKAIVDLLFKTNRKVTVKQLKEDYFKKIECFDSVEISGVEDRFNASLGTYHDLLKIIKDKDFLDNEENEDILEDIVLTLTLFEDREMIEERLKTYAHLFDDKVMKQLKRRRYTGWGRLSRKLINGIRDKQSGKTILDFLKSDGFANRNFMQLIHDDSLTFKEDIQKAQVSGQGDSLHEHIANLAGSPAIKKGILQTVKVVDELVKVMGRHKPENIVIEMARENQTTQKGQKNSRERMKRIEEGIKELGSQILKEHPVENTQLQNEKLYLYYLQNGRDMYVDQELDINRLSDYDVDHIVPQSFLKDDSIDNKVLTRSDKARGKSDNVPSEEVVKKMKNYWRQLLNAKLITQRKFDNLTKAERGGLSELDKAGFIKRQLVETRQITKHVAQILDSRMNTKYDENDKLIREVKVITLKSKLVSDFRKDFQFYKVREINNYHHAHDAYLNAVVGTALIKKYPKLESEFVYGDYKVYDVRKMIAKSEQEIGKATAKYFFYSNIMNFFKTEITLANGEIRKRPLIETNGETGEIVWDKGRDFATVRKVLSMPQVNIVKKTEVQTGGFSKESILPKRNSDKLIARKKDWDPKKYGGFDSPTVAYSVLVVAKVEKGKSKKLKSVKELLGITIMERSSFEKNPIDFLEAKGYKEVKKDLIIKLPKYSLFELENGRKRMLASAGELQKGNELALPSKYVNFLYLASHYEKLKGSPEDNEQKQLFVEQHKHYLDEIIEQISEFSKRVILADANLDKVLSAYNKHRDKPIREQAENIIHLFTLTNLGAPAAFKYFDTTIDRKRYTSTKEVLDATLIHQSITGLYETRIDLSQLGGDGGEAAAKEAAAKEAAAKEAAAKEAAAKEAAAKGGLLGRDLLTKLKAQIQFSTEGPQVTWEDRPAMCLVLNLEEEYRLHEKPVPPSIDPSWLQLFPMVWAEKAGMGLANQVPPVVVELKSDASPVAVRQYPMSKEAREGIRPHIQRFLDLGILVPCQSPWNTPLLPVKKPGTNDYRPVQDLREVNKRVQDIHPTVPNPYNLLSSLPPSHTWYSVLDLKDAFFCLKLHPNSQPLFAFEWRDPEKGNTGQLTWTRLPQGFKNSPTLFNEALHRDLASFRALNPQVVMLQYVDDLLVAAPTYRDCKEGTRRLLQELSKLGYRVSAKKAQLCREEVTYLGYLLKGGKRWLTPARKATVMKIPTPTTPRQVREFLGTAGFCRLWIPGFASLAAPLYPLTRPKVPFTWTEAHQEAFGRIKEALLSAPALALPDLTKPFALYVDEKEGVARGVLTQTLGPWRRPVAYLSKKLDPVASGWPTCLKAIAAVALLLKDADKLTLGQNVLVIAPHNLESIVRQPPDRWMTNARMTHYQSLLLNERVSFAPPAILNPATLLPVESDDTPIHICSEILAEETGTRPDLRDQPLPGVPAWYTDGSSFIMDGRRQAGAAIVDNKRTVWASNLPEGTSAQKAELIALTQALRLAEGKSINIYTDSRYAFATAHVHGAIYKQRGWLTSAGKDIKNKEEILALLEAIHLPKRVAIIHCPGHQRGTDPVATGNRKADEAAKQAAQSTRILTETTKNAGKRTADGSEFEKRTADGSEFESPKKKAKVE

SEQ ID NO: 1622 - protein, 2162 aa, synthetic construct
MPAAKRVKLDGGDKKYSIGLDIGTNSVGWAVITDEYKVPSKKFKVLGNTDRHSIKKNLIGALLFDSGETAEATRLKRTARRRYTRRKNRICYLQEIFSNEMAKVDDSFFHRLEESFLVEEDKKHERHPIFGNIVDEVAYHEKYPTIYHLRKKLVDSTDKADLRLIYLALAHMIKFRGHFLIEGDLNPDNSDVDKLFIQLVQTYNQLFEENPINASGVDAKAILSARLSKSRRLENLIAQLPGEKKNGLFGNLIALSLGLTPNFKSNFDLAEDAKLQLSKDTYDDDLDNLLAQIGDQYADLFLAAKNLSDAILLSDILRVNTEITKAPLSASMIKRYDEHHQDLTLLKALVRQQLPEKYKEIFFDQSKNGYAGYIDGGASQEEFYKFIKPILEKMDGTEELLVKLNREDLLRKQRTFDNGSIPHQIHLGELHAILRRQEDFYPFLKDNREKIEKILTFRIPYYVGPLARGNSRFAWMTRKSEETITPWNFEEVVDKGASAQSFIERMTNFDKNLPNEKVLPKHSLLYEYFTVYNELTKVKYVTEGMRKPAFLSGEQKKAIVDLLFKTNRKVTVKQLKEDYFKKIECFDSVEISGVEDRFNASLGTYHDLLKIIKDKDFLDNEENEDILEDIVLTLTLFEDREMIEERLKTYAHLFDDKVMKQLKRRRYTGWGRLSRKLINGIRDKQSGKTILDFLKSDGFANRNFMQLIHDDSLTFKEDIQKAQVSGQGDSLHEHIANLAGSPAIKKGILQTVKVVDELVKVMGRHKPENIVIEMARENQTTQKGQKNSRERMKRIEEGIKELGSQILKEHPVENTQLQNEKLYLYYLQNGRDMYVDQELDINRLSDYDVDHIVPQSFLKDDSIDNKVLTRSDKARGKSDNVPSEEVVKKMKNYWRQLLNAKLITQRKFDNLTKAERGGLSELDKAGFIKRQLVETRQITKHVAQILDSRMNTKYDENDKLIREVKVITLKSKLVSDFRKDFQFYKVREINNYHHAHDAYLNAVVGTALIKKYPKLESEFVYGDYKVYDVRKMIAKSEQEIGKATAKYFFYSNIMNFFKTEITLANGEIRKRPLIETNGETGEIVWDKGRDFATVRKVLSMPQVNIVKKTEVQTGGFSKESILPKRNSDKLIARKKDWDPKKYGGFDSPTVAYSVLVVAKVEKGKSKKLKSVKELLGITIMERSSFEKNPIDFLEAKGYKEVKKDLIIKLPKYSLFELENGRKRMLASAGELQKGNELALPSKYVNFLYLASHYEKLKGSPEDNEQKQLFVEQHKHYLDEIIEQISEFSKRVILADANLDKVLSAYNKHRDKPIREQAENIIHLFTLTNLGAPAAFKYFDTTIDRKRYTSTKEVLDATLIHQSITGLYETRIDLSQLGGDGGAEAAAKEAAAKEAAAKEAAAKALEAEAAAKEAAAKEAAAKEAAAKAGGLLGRDLLTKLKAQIQFSTEGPQVTWEDRPAMCLVLNLEEEYRLHEKPVPPSIDPSWLQLFPMVWAEKAGMGLANQVPPVVVELKSDASPVAVRQYPMSKEAREGIRPHIQRFLDLGILVPCQSPWNTPLLPVKKPGTNDYRPVQDLREVNKRVQDIHPTVPNPYNLLSSLPPSHTWYSVLDLKDAFFCLKLHPNSQPLFAFEWRDPEKGNTGQLTWTRLPQGFKNSPTLFNEALHRDLASFRALNPQVVMLQYVDDLLVAAPTYRDCKEGTRRLLQELSKLGYRVSAKKAQLCREEVTYLGYLLKGGKRWLTPARKATVMKIPTPTTPRQVREFLGTAGFCRLWIPGFASLAAPLYPLTRPKVPFTWTEAHQEAFGRIKEALLSAPALALPDLTKPFALYVDEKEGVARGVLTQTLGPWRRPVAYLSKKLDPVASGWPTCLKAIAAVALLLKDADKLTLGQNVLVIAPHNLESIVRQPPDRWMTNARMTHYQSLLLNERVSFAPPAILNPATLLPVESDDTPIHICSEILAEETGTRPDLRDQPLPGVPAWYTDGSSFIMDGRRQAGAAIVDNKRTVWASNLPEGTSAQKAELIALTQALRLAEGKSINIYTDSRYAFATAHVHGAIYKQRGWLTSAGKDIKNKEEILALLEAIHLPKRVAIIHCPGHQRGTDPVATGNRKADEAAKQAAQSTRILTETTKNAGKRTADGSEFEKRTADGSEFESPKKKAKVE

SEQ ID NO: 1623 - protein, 2127 aa, synthetic construct
MPAAKRVKLDGGDKKYSIGLDIGTNSVGWAVITDEYKVPSKKFKVLGNTDRHSIKKNLIGALLFDSGETAEATRLKRTARRRYTRRKNRICYLQEIFSNEMAKVDDSFFHRLEESFLVEEDKKHERHPIFGNIVDEVAYHEKYPTIYHLRKKLVDSTDKADLRLIYLALAHMIKFRGHFLIEGDLNPDNSDVDKLFIQLVQTYNQLFEENPINASGVDAKAILSARLSKSRRLENLIAQLPGEKKNGLFGNLIALSLGLTPNFKSNFDLAEDAKLQLSKDTYDDDLDNLLAQIGDQYADLFLAAKNLSDAILLSDILRVNTEITKAPLSASMIKRYDEHHQDLTLLKALVRQQLPEKYKEIFFDQSKNGYAGYIDGGASQEEFYKFIKPILEKMDGTEELLVKLNREDLLRKQRTFDNGSIPHQIHLGELHAILRRQEDFYPFLKDNREKIEKILTFRIPYYVGPLARGNSRFAWMTRKSEETITPWNFEEVVDKGASAQSFIERMTNFDKNLPNEKVLPKHSLLYEYFTVYNELTKVKYVTEGMRKPAFLSGEQKKAIVDLLFKTNRKVTVKQLKEDYFKKIECFDSVEISGVEDRFNASLGTYHDLLKIIKDKDFLDNEENEDILEDIVLTLTLFEDREMIEERLKTYAHLFDDKVMKQLKRRRYTGWGRLSRKLINGIRDKQSGKTILDFLKSDGFANRNFMQLIHDDSLTFKEDIQKAQVSGQGDSLHEHIANLAGSPAIKKGILQTVKVVDELVKVMGRHKPENIVIEMARENQTTQKGQKNSRERMKRIEEGIKELGSQILKEHPVENTQLQNEKLYLYYLQNGRDMYVDQELDINRLSDYDVDHIVPQSFLKDDSIDNKVLTRSDKARGKSDNVPSEEVVKKMKNYWRQLLNAKLITQRKFDNLTKAERGGLSELDKAGFIKRQLVETRQITKHVAQILDSRMNTKYDENDKLIREVKVITLKSKLVSDFRKDFQFYKVREINNYHHAHDAYLNAVVGTALIKKYPKLESEFVYGDYKVYDVRKMIAKSEQEIGKATAKYFFYSNIMNFFKTEITLANGEIRKRPLIETNGETGEIVWDKGRDFATVRKVLSMPQVNIVKKTEVQTGGFSKESILPKRNSDKLIARKKDWDPKKYGGFDSPTVAYSVLVVAKVEKGKSKKLKSVKELLGITIMERSSFEKNPIDFLEAKGYKEVKKDLIIKLPKYSLFELENGRKRMLASAGELQKGNELALPSKYVNFLYLASHYEKLKGSPEDNEQKQLFVEQHKHYLDEIIEQISEFSKRVILADANLDKVLSAYNKHRDKPIREQAENIIHLFTLTNLGAPAAFKYFDTTIDRKRYTSTKEVLDATLIHQSITGLYETRIDLSQLGGDGGGSSEAAAKGGSGGLLGRDLLTKLKAQIQFSTEGPQVTWEDRPAMCLVLNLEEEYRLHEKPVPPSIDPSWLQLFPMVWAEKAGMGLANQVPPVVVELKSDASPVAVRQYPMSKEAREGIRPHIQRFLDLGILVPCQSPWNTPLLPVKKPGTNDYRPVQDLREVNKRVQDIHPTVPNPYNLLSSLPPSHTWYSVLDLKDAFFCLKLHPNSQPLFAFEWRDPEKGNTGQLTWTRLPQGFKNSPTLFNEALHRDLASFRALNPQVVMLQYVDDLLVAAPTYRDCKEGTRRLLQELSKLGYRVSAKKAQLCREEVTYLGYLLKGGKRWLTPARKATVMKIPTPTTPRQVREFLGTAGFCRLWIPGFASLAAPLYPLTRPKVPFTWTEAHQEAFGRIKEALLSAPALALPDLTKPFALYVDEKEGVARGVLTQTLGPWRRPVAYLSKKLDPVASGWPTCLKAIAAVALLLKDADKLTLGQNVLVIAPHNLESIVRQPPDRWMTNARMTHYQSLLLNERVSFAPPAILNPATLLPVESDDTPIHICSEILAEETGTRPDLRDQPLPGVPAWYTDGSSFIMDGRRQAGAAIVDNKRTVWASNLPEGTSAQKAELIALTQALRLAEGKSINIYTDSRYAFATAHVHGAIYKQRGWLTSAGKDIKNKEEILALLEAIHLPKRVAIIHCPGHQRGTDPVATGNRKADEAAKQAAQSTRILTETTKNAGKRTADGSEFEKRTADGSEFESPKKKAKVE

SEQ ID NO: 1624 - protein, 2127 aa, synthetic construct
MPAAKRVKLDGGDKKYSIGLDIGTNSVGWAVITDEYKVPSKKFKVLGNTDRHSIKKNLIGALLFDSGETAEATRLKRTARRRYTRRKNRICYLQEIFSNEMAKVDDSFFHRLEESFLVEEDKKHERHPIFGNIVDEVAYHEKYPTIYHLRKKLVDSTDKADLRLIYLALAHMIKFRGHFLIEGDLNPDNSDVDKLFIQLVQTYNQLFEENPINASGVDAKAILSARLSKSRRLENLIAQLPGEKKNGLFGNLIALSLGLTPNFKSNFDLAEDAKLQLSKDTYDDDLDNLLAQIGDQYADLFLAAKNLSDAILLSDILRVNTEITKAPLSASMIKRYDEHHQDLTLLKALVRQQLPEKYKEIFFDQSKNGYAGYIDGGASQEEFYKFIKPILEKMDGTEELLVKLNREDLLRKQRTFDNGSIPHQIHLGELHAILRRQEDFYPFLKDNREKIEKILTFRIPYYVGPLARGNSRFAWMTRKSEETITPWNFEEVVDKGASAQSFIERMTNFDKNLPNEKVLPKHSLLYEYFTVYNELTKVKYVTEGMRKPAFLSGEQKKAIVDLLFKTNRKVTVKQLKEDYFKKIECFDSVEISGVEDRFNASLGTYHDLLKIIKDKDFLDNEENEDILEDIVLTLTLFEDREMIEERLKTYAHLFDDKVMKQLKRRRYTGWGRLSRKLINGIRDKQSGKTILDFLKSDGFANRNFMQLIHDDSLTFKEDIQKAQVSGQGDSLHEHIANLAGSPAIKKGILQTVKVVDELVKVMGRHKPENIVIEMARENQTTQKGQKNSRERMKRIEEGIKELGSQILKEHPVENTQLQNEKLYLYYLQNGRDMYVDQELDINRLSDYDVDHIVPQSFLKDDSIDNKVLTRSDKARGKSDNVPSEEVVKKMKNYWRQLLNAKLITQRKFDNLTKAERGGLSELDKAGFIKRQLVETRQITKHVAQILDSRMNTKYDENDKLIREVKVITLKSKLVSDFRKDFQFYKVREINNYHHAHDAYLNAVVGTALIKKYPKLESEFVYGDYKVYDVRKMIAKSEQEIGKATAKYFFYSNIMNFFKTEITLANGEIRKRPLIETNGETGEIVWDKGRDFATVRKVLSMPQVNIVKKTEVQTGGFSKESILPKRNSDKLIARKKDWDPKKYGGFDSPTVAYSVLVVAKVEKGKSKKLKSVKELLGITIMERSSFEKNPIDFLEAKGYKEVKKDLIIKLPKYSLFELENGRKRMLASAGELQKGNELALPSKYVNFLYLASHYEKLKGSPEDNEQKQLFVEQHKHYLDEIIEQISEFSKRVILADANLDKVLSAYNKHRDKPIREQAENIIHLFTLTNLGAPAAFKYFDTTIDRKRYTSTKEVLDATLIHQSITGLYETRIDLSQLGGDGGEAAAKGSSPAPGGLLGRDLLTKLKAQIQFSTEGPQVTWEDRPAMCLVLNLEEEYRLHEKPVPPSIDPSWLQLFPMVWAEKAGMGLANQVPPVVVELKSDASPVAVRQYPMSKEAREGIRPHIQRFLDLGILVPCQSPWNTPLLPVKKPGTNDYRPVQDLREVNKRVQDIHPTVPNPYNLLSSLPPSHTWYSVLDLKDAFFCLKLHPNSQPLFAFEWRDPEKGNTGQLTWTRLPQGFKNSPTLFNEALHRDLASFRALNPQVVMLQYVDDLLVAAPTYRDCKEGTRRLLQELSKLGYRVSAKKAQLCREEVTYLGYLLKGGKRWLTPARKATVMKIPTPTTPRQVREFLGTAGFCRLWIPGFASLAAPLYPLTRPKVPFTWTEAHQEAFGRIKEALLSAPALALPDLTKPFALYVDEKEGVARGVLTQTLGPWRRPVAYLSKKLDPVASGWPTCLKAIAAVALLLKDADKLTLGQNVLVIAPHNLESIVRQPPDRWMTNARMTHYQSLLLNERVSFAPPAILNPATLLPVESDDTPIHICSEILAEETGTRPDLRDQPLPGVPAWYTDGSSFIMDGRRQAGAAIVDNKRTVWASNLPEGTSAQKAELIALTQALRLAEGKSINIYTDSRYAFATAHVHGAIYKQRGWLTSAGKDIKNKEEILALLEAIHLPKRVAIIHCPGHQRGTDPVATGNRKADEAAKQAAQSTRILTETTKNAGKRTADGSEFEKRTADGSEFESPKKKAKVE

SEQ ID NO: 1625 - protein, 2122 aa, synthetic construct
MPAAKRVKLDGGDKKYSIGLDIGTNSVGWAVITDEYKVPSKKFKVLGNTDRHSIKKNLIGALLFDSGETAEATRLKRTARRRYTRRKNRICYLQEIFSNEMAKVDDSFFHRLEESFLVEEDKKHERHPIFGNIVDEVAYHEKYPTIYHLRKKLVDSTDKADLRLIYLALAHMIKFRGHFLIEGDLNPDNSDVDKLFIQLVQTYNQLFEENPINASGVDAKAILSARLSKSRRLENLIAQLPGEKKNGLFGNLIALSLGLTPNFKSNFDLAEDAKLQLSKDTYDDDLDNLLAQIGDQYADLFLAAKNLSDAILLSDILRVNTEITKAPLSASMIKRYDEHHQDLTLLKALVRQQLPEKYKEIFFDQSKNGYAGYIDGGASQEEFYKFIKPILEKMDGTEELLVKLNREDLLRKQRTFDNGSIPHQIHLGELHAILRRQEDFYPFLKDNREKIEKILTFRIPYYVGPLARGNSRFAWMTRKSEETITPWNFEEVVDKGASAQSFIERMTNFDKNLPNEKVLPKHSLLYEYFTVYNELTKVKYVTEGMRKPAFLSGEQKKAIVDLLFKTNRKVTVKQLKEDYFKKIECFDSVEISGVEDRFNASLGTYHDLLKIIKDKDFLDNEENEDILEDIVLTLTLFEDREMIEERLKTYAHLFDDKVMKQLKRRRYTGWGRLSRKLINGIRDKQSGKTILDFLKSDGFANRNFMQLIHDDSLTFKEDIQKAQVSGQGDSLHEHIANLAGSPAIKKGILQTVKVVDELVKVMGRHKPENIVIEMARENQTTQKGQKNSRERMKRIEEGIKELGSQILKEHPVENTQLQNEKLYLYYLQNGRDMYVDQELDINRLSDYDVDHIVPQSFLKDDSIDNKVLTRSDKARGKSDNVPSEEVVKKMKNYWRQLLNAKLITQRKFDNLTKAERGGLSELDKAGFIKRQLVETRQITKHVAQILDSRMNTKYDENDKLIREVKVITLKSKLVSDFRKDFQFYKVREINNYHHAHDAYLNAVVGTALIKKYPKLESEFVYGDYKVYDVRKMIAKSEQEIGKATAKYFFYSNIMNFFKTEITLANGEIRKRPLIETNGETGEIVWDKGRDFATVRKVLSMPQVNIVKKTEVQTGGFSKESILPKRNSDKLIARKKDWDPKKYGGFDSPTVAYSVLVVAKVEKGKSKKLKSVKELLGITIMERSSFEKNPIDFLEAKGYKEVKKDLIIKLPKYSLFELENGRKRMLASAGELQKGNELALPSKYVNFLYLASHYEKLKGSPEDNEQKQLFVEQHKHYLDEIIEQISEFSKRVILADANLDKVLSAYNKHRDKPIREQAENIIHLFTLTNLGAPAAFKYFDTTIDRKRYTSTKEVLDATLIHQSITGLYETRIDLSQLGGDGGGSSGSSGGLLGRDLLTKLKAQIQFSTEGPQVTWEDRPAMCLVLNLEEEYRLHEKPVPPSIDPSWLQLFPMVWAEKAGMGLANQVPPVVVELKSDASPVAVRQYPMSKEAREGIRPHIQRFLDLGILVPCQSPWNTPLLPVKKPGTNDYRPVQDLREVNKRVQDIHPTVPNPYNLLSSLPPSHTWYSVLDLKDAFFCLKLHPNSQPLFAFEWRDPEKGNTGQLTWTRLPQGFKNSPTLFNEALHRDLASFRALNPQVVMLQYVDDLLVAAPTYRDCKEGTRRLLQELSKLGYRVSAKKAQLCREEVTYLGYLLKGGKRWLTPARKATVMKIPTPTTPRQVREFLGTAGFCRLWIPGFASLAAPLYPLTRPKVPFTWTEAHQEAFGRIKEALLSAPALALPDLTKPFALYVDEKEGVARGVLTQTLGPWRRPVAYLSKKLDPVASGWPTCLKAIAAVALLLKDADKLTLGQNVLVIAPHNLESIVRQPPDRWMTNARMTHYQSLLLNERVSFAPPAILNPATLLPVESDDTPIHICSEILAEETGTRPDLRDQPLPGVPAWYTDGSSFIMDGRRQAGAAIVDNKRTVWASNLPEGTSAQKAELIALTQALRLAEGKSINIYTDSRYAFATAHVHGAIYKQRGWLTSAGKDIKNKEEILALLEAIHLPKRVAIIHCPGHQRGTDPVATGNRKADEAAKQAAQSTRILTETTKNAGKRTADGSEFEKRTADGSEFESPKKKAKVE

SEQ ID NO: 1626 - protein, 2122 aa, synthetic construct
MPAAKRVKLDGGDKKYSIGLDIGTNSVGWAVITDEYKVPSKKFKVLGNTDRHSIKKNLIGALLFDSGETAEATRLKRTARRRYTRRKNRICYLQEIFSNEMAKVDDSFFHRLEESFLVEEDKKHERHPIFGNIVDEVAYHEKYPTIYHLRKKLVDSTDKADLRLIYLALAHMIKFRGHFLIEGDLNPDNSDVDKLFIQLVQTYNQLFEENPINASGVDAKAILSARLSKSRRLENLIAQLPGEKKNGLFGNLIALSLGLTPNFKSNFDLAEDAKLQLSKDTYDDDLDNLLAQIGDQYADLFLAAKNLSDAILLSDILRVNTEITKAPLSASMIKRYDEHHQDLTLLKALVRQQLPEKYKEIFFDQSKNGYAGYIDGGASQEEFYKFIKPILEKMDGTEELLVKLNREDLLRKQRTFDNGSIPHQIHLGELHAILRRQEDFYPFLKDNREKIEKILTFRIPYYVGPLARGNSRFAWMTRKSEETITPWNFEEVVDKGASAQSFIERMTNFDKNLPNEKVLPKHSLLYEYFTVYNELTKVKYVTEGMRKPAFLSGEQKKAIVDLLFKTNRKVTVKQLKEDYFKKIECFDSVEISGVEDRFNASLGTYHDLLKIIKDKDFLDNEENEDILEDIVLTLTLFEDREMIEERLKTYAHLFDDKVMKQLKRRRYTGWGRLSRKLINGIRDKQSGKTILDFLKSDGFANRNFMQLIHDDSLTFKEDIQKAQVSGQGDSLHEHIANLAGSPAIKKGILQTVKVVDELVKVMGRHKPENIVIEMARENQTTQKGQKNSRERMKRIEEGIKELGSQILKEHPVENTQLQNEKLYLYYLQNGRDMYVDQELDINRLSDYDVDHIVPQSFLKDDSIDNKVLTRSDKARGKSDNVPSEEVVKKMKNYWRQLLNAKLITQRKFDNLTKAERGGLSELDKAGFIKRQLVETRQITKHVAQILDSRMNTKYDENDKLIREVKVITLKSKLVSDFRKDFQFYKVREINNYHHAHDAYLNAVVGTALIKKYPKLESEFVYGDYKVYDVRKMIAKSEQEIGKATAKYFFYSNIMNFFKTEITLANGEIRKRPLIETNGETGEIVWDKGRDFATVRKVLSMPQVNIVKKTEVQTGGFSKESILPKRNSDKLIARKKDWDPKKYGGFDSPTVAYSVLVVAKVEKGKSKKLKSVKELLGITIMERSSFEKNPIDFLEAKGYKEVKKDLIIKLPKYSLFELENGRKRMLASAGELQKGNELALPSKYVNFLYLASHYEKLKGSPEDNEQKQLFVEQHKHYLDEIIEQISEFSKRVILADANLDKVLSAYNKHRDKPIREQAENIIHLFTLTNLGAPAAFKYFDTTIDRKRYTSTKEVLDATLIHQSITGLYETRIDLSQLGGDGGGGSGGGGGLLGRDLLTKLKAQIQFSTEGPQVTWEDRPAMCLVLNLEEEYRLHEKPVPPSIDPSWLQLFPMVWAEKAGMGLANQVPPVVVELKSDASPVAVRQYPMSKEAREGIRPHIQRFLDLGILVPCQSPWNTPLLPVKKPGTNDYRPVQDLREVNKRVQDIHPTVPNPYNLLSSLPPSHTWYSVLDLKDAFFCLKLHPNSQPLFAFEWRDPEKGNTGQLTWTRLPQGFKNSPTLFNEALHRDLASFRALNPQVVMLQYVDDLLVAAPTYRDCKEGTRRLLQELSKLGYRVSAKKAQLCREEVTYLGYLLKGGKRWLTPARKATVMKIPTPTTPRQVREFLGTAGFCRLWIPGFASLAAPLYPLTRPKVPFTWTEAHQEAFGRIKEALLSAPALALPDLTKPFALYVDEKEGVARGVLTQTLGPWRRPVAYLSKKLDPVASGWPTCLKAIAAVALLLKDADKLTLGQNVLVIAPHNLESIVRQPPDRWMTNARMTHYQSLLLNERVSFAPPAILNPATLLPVESDDTPIHICSEILAEETGTRPDLRDQPLPGVPAWYTDGSSFIMDGRRQAGAAIVDNKRTVWASNLPEGTSAQKAELIALTQALRLAEGKSINIYTDSRYAFATAHVHGAIYKQRGWLTSAGKDIKNKEEILALLEAIHLPKRVAIIHCPGHQRGTDPVATGNRKADEAAKQAAQSTRILTETTKNAGKRTADGSEFEKRTADGSEFESPKKKAKVE

SEQ ID NO: 1627 - protein, 2122 aa, synthetic construct
MPAAKRVKLDGGDKKYSIGLDIGTNSVGWAVITDEYKVPSKKFKVLGNTDRHSIKKNLIGALLFDSGETAEATRLKRTARRRYTRRKNRICYLQEIFSNEMAKVDDSFFHRLEESFLVEEDKKHERHPIFGNIVDEVAYHEKYPTIYHLRKKLVDSTDKADLRLIYLALAHMIKFRGHFLIEGDLNPDNSDVDKLFIQLVQTYNQLFEENPINASGVDAKAILSARLSKSRRLENLIAQLPGEKKNGLFGNLIALSLGLTPNFKSNFDLAEDAKLQLSKDTYDDDLDNLLAQIGDQYADLFLAAKNLSDAILLSDILRVNTEITKAPLSASMIKRYDEHHQDLTLLKALVRQQLPEKYKEIFFDQSKNGYAGYIDGGASQEEFYKFIKPILEKMDGTEELLVKLNREDLLRKQRTFDNGSIPHQIHLGELHAILRRQEDFYPFLKDNREKIEKILTFRIPYYVGPLARGNSRFAWMTRKSEETITPWNFEEVVDKGASAQSFIERMTNFDKNLPNEKVLPKHSLLYEYFTVYNELTKVKYVTEGMRKPAFLSGEQKKAIVDLLFKTNRKVTVKQLKEDYFKKIECFDSVEISGVEDRFNASLGTYHDLLKIIKDKDFLDNEENEDILEDIVLTLTLFEDREMIEERLKTYAHLFDDKVMKQLKRRRYTGWGRLSRKLINGIRDKQSGKTILDFLKSDGFANRNFMQLIHDDSLTFKEDIQKAQVSGQGDSLHEHIANLAGSPAIKKGILQTVKVVDELVKVMGRHKPENIVIEMARENQTTQKGQKNSRERMKRIEEGIKELGSQILKEHPVENTQLQNEKLYLYYLQNGRDMYVDQELDINRLSDYDVDHIVPQSFLKDDSIDNKVLTRSDKARGKSDNVPSEEVVKKMKNYWRQLLNAKLITQRKFDNLTKAERGGLSELDKAGFIKRQLVETRQITKHVAQILDSRMNTKYDENDKLIREVKVITLKSKLVSDFRKDFQFYKVREINNYHHAHDAYLNAVVGTALIKKYPKLESEFVYGDYKVYDVRKMIAKSEQEIGKATAKYFFYSNIMNFFKTEITLANGEIRKRPLIETNGETGEIVWDKGRDFATVRKVLSMPQVNIVKKTEVQTGGFSKESILPKRNSDKLIARKKDWDPKKYGGFDSPTVAYSVLVVAKVEKGKSKKLKSVKELLGITIMERSSFEKNPIDFLEAKGYKEVKKDLIIKLPKYSLFELENGRKRMLASAGELQKGNELALPSKYVNFLYLASHYEKLKGSPEDNEQKQLFVEQHKHYLDEIIEQISEFSKRVILADANLDKVLSAYNKHRDKPIREQAENIIHLFTLTNLGAPAAFKYFDTTIDRKRYTSTKEVLDATLIHQSITGLYETRIDLSQLGGDGGPAPGSSGGLLGRDLLTKLKAQIQFSTEGPQVTWEDRPAMCLVLNLEEEYRLHEKPVPPSIDPSWLQLFPMVWAEKAGMGLANQVPPVVVELKSDASPVAVRQYPMSKEAREGIRPHIQRFLDLGILVPCQSPWNTPLLPVKKPGTNDYRPVQDLREVNKRVQDIHPTVPNPYNLLSSLPPSHTWYSVLDLKDAFFCLKLHPNSQPLFAFEWRDPEKGNTGQLTWTRLPQGFKNSPTLFNEALHRDLASFRALNPQVVMLQYVDDLLVAAPTYRDCKEGTRRLLQELSKLGYRVSAKKAQLCREEVTYLGYLLKGGKRWLTPARKATVMKIPTPTTPRQVREFLGTAGFCRLWIPGFASLAAPLYPLTRPKVPFTWTEAHQEAFGRIKEALLSAPALALPDLTKPFALYVDEKEGVARGVLTQTLGPWRRPVAYLSKKLDPVASGWPTCLKAIAAVALLLKDADKLTLGQNVLVIAPHNLESIVRQPPDRWMTNARMTHYQSLLLNERVSFAPPAILNPATLLPVESDDTPIHICSEILAEETGTRPDLRDQPLPGVPAWYTDGSSFIMDGRRQAGAAIVDNKRTVWASNLPEGTSAQKAELIALTQALRLAEGKSINIYTDSRYAFATAHVHGAIYKQRGWLTSAGKDIKNKEEILALLEAIHLPKRVAIIHCPGHQRGTDPVATGNRKADEAAKQAAQSTRILTETTKNAGKRTADGSEFEKRTADGSEFESPKKKAKVE

SEQ ID NO: 1628 - protein, 2122 aa, synthetic construct
MPAAKRVKLDGGDKKYSIGLDIGTNSVGWAVITDEYKVPSKKFKVLGNTDRHSIKKNLIGALLFDSGETAEATRLKRTARRRYTRRKNRICYLQEIFSNEMAKVDDSFFHRLEESFLVEEDKKHERHPIFGNIVDEVAYHEKYPTIYHLRKKLVDSTDKADLRLIYLALAHMIKFRGHFLIEGDLNPDNSDVDKLFIQLVQTYNQLFEENPINASGVDAKAILSARLSKSRRLENLIAQLPGEKKNGLFGNLIALSLGLTPNFKSNFDLAEDAKLQLSKDTYDDDLDNLLAQIGDQYADLFLAAKNLSDAILLSDILRVNTEITKAPLSASMIKRYDEHHQDLTLLKALVRQQLPEKYKEIFFDQSKNGYAGYIDGGASQEEFYKFIKPILEKMDGTEELLVKLNREDLLRKQRTFDNGSIPHQIHLGELHAILRRQEDFYPFLKDNREKIEKILTFRIPYYVGPLARGNSRFAWMTRKSEETITPWNFEEVVDKGASAQSFIERMTNFDKNLPNEKVLPKHSLLYEYFTVYNELTKVKYVTEGMRKPAFLSGEQKKAIVDLLFKTNRKVTVKQLKEDYFKKIECFDSVEISGVEDRFNASLGTYHDLLKIIKDKDFLDNEENEDILEDIVLTLTLFEDREMIEERLKTYAHLFDDKVMKQLKRRRYTGWGRLSRKLINGIRDKQSGKTILDFLKSDGFANRNFMQLIHDDSLTFKEDIQKAQVSGQGDSLHEHIANLAGSPAIKKGILQTVKVVDELVKVMGRHKPENIVIEMARENQTTQKGQKNSRERMKRIEEGIKELGSQILKEHPVENTQLQNEKLYLYYLQNGRDMYVDQELDINRLSDYDVDHIVPQSFLKDDSIDNKVLTRSDKARGKSDNVPSEEVVKKMKNYWRQLLNAKLITQRKFDNLTKAERGGLSELDKAGFIKRQLVETRQITKHVAQILDSRMNTKYDENDKLIREVKVITLKSKLVSDFRKDFQFYKVREINNYHHAHDAYLNAVVGTALIKKYPKLESEFVYGDYKVYDVRKMIAKSEQEIGKATAKYFFYSNIMNFFKTEITLANGEIRKRPLIETNGETGEIVWDKGRDFATVRKVLSMPQVNIVKKTEVQTGGFSKESILPKRNSDKLIARKKDWDPKKYGGFDSPTVAYSVLVVAKVEKGKSKKLKSVKELLGITIMERSSFEKNPIDFLEAKGYKEVKKDLIIKLPKYSLFELENGRKRMLASAGELQKGNELALPSKYVNFLYLASHYEKLKGSPEDNEQKQLFVEQHKHYLDEIIEQISEFSKRVILADANLDKVLSAYNKHRDKPIREQAENIIHLFTLTNLGAPAAFKYFDTTIDRKRYTSTKEVLDATLIHQSITGLYETRIDLSQLGGDGGGGGGGGGGLLGRDLLTKLKAQIQFSTEGPQVTWEDRPAMCLVLNLEEEYRLHEKPVPPSIDPSWLQLFPMVWAEKAGMGLANQVPPVVVELKSDASPVAVRQYPMSKEAREGIRPHIQRFLDLGILVPCQSPWNTPLLPVKKPGTNDYRPVQDLREVNKRVQDIHPTVPNPYNLLSSLPPSHTWYSVLDLKDAFFCLKLHPNSQPLFAFEWRDPEKGNTGQLTWTRLPQGFKNSPTLFNEALHRDLASFRALNPQVVMLQYVDDLLVAAPTYRDCKEGTRRLLQELSKLGYRVSAKKAQLCREEVTYLGYLLKGGKRWLTPARKATVMKIPTPTTPRQVREFLGTAGFCRLWIPGFASLAAPLYPLTRPKVPFTWTEAHQEAFGRIKEALLSAPALALPDLTKPFALYVDEKEGVARGVLTQTLGPWRRPVAYLSKKLDPVASGWPTCLKAIAAVALLLKDADKLTLGQNVLVIAPHNLESIVRQPPDRWMTNARMTHYQSLLLNERVSFAPPAILNPATLLPVESDDTPIHICSEILAEETGTRPDLRDQPLPGVPAWYTDGSSFIMDGRRQAGAAIVDNKRTVWASNLPEGTSAQKAELIALTQALRLAEGKSINIYTDSRYAFATAHVHGAIYKQRGWLTSAGKDIKNKEEILALLEAIHLPKRVAIIHCPGHQRGTDPVATGNRKADEAAKQAAQSTRILTETTKNAGKRTADGSEFEKRTADGSEFESPKKKAKVE

SEQ ID NO: 1629 - protein, 2124 aa, synthetic construct
MPAAKRVKLDGGDKKYSIGLDIGTNSVGWAVITDEYKVPSKKFKVLGNTDRHSIKKNLIGALLFDSGETAEATRLKRTARRRYTRRKNRICYLQEIFSNEMAKVDDSFFHRLEESFLVEEDKKHERHPIFGNIVDEVAYHEKYPTIYHLRKKLVDSTDKADLRLIYLALAHMIKFRGHFLIEGDLNPDNSDVDKLFIQLVQTYNQLFEENPINASGVDAKAILSARLSKSRRLENLIAQLPGEKKNGLFGNLIALSLGLTPNFKSNFDLAEDAKLQLSKDTYDDDLDNLLAQIGDQYADLFLAAKNLSDAILLSDILRVNTEITKAPLSASMIKRYDEHHQDLTLLKALVRQQLPEKYKEIFFDQSKNGYAGYIDGGASQEEFYKFIKPILEKMDGTEELLVKLNREDLLRKQRTFDNGSIPHQIHLGELHAILRRQEDFYPFLKDNREKIEKILTFRIPYYVGPLARGNSRFAWMTRKSEETITPWNFEEVVDKGASAQSFIERMTNFDKNLPNEKVLPKHSLLYEYFTVYNELTKVKYVTEGMRKPAFLSGEQKKAIVDLLFKTNRKVTVKQLKEDYFKKIECFDSVEISGVEDRFNASLGTYHDLLKIIKDKDFLDNEENEDILEDIVLTLTLFEDREMIEERLKTYAHLFDDKVMKQLKRRRYTGWGRLSRKLINGIRDKQSGKTILDFLKSDGFANRNFMQLIHDDSLTFKEDIQKAQVSGQGDSLHEHIANLAGSPAIKKGILQTVKVVDELVKVMGRHKPENIVIEMARENQTTQKGQKNSRERMKRIEEGIKELGSQILKEHPVENTQLQNEKLYLYYLQNGRDMYVDQELDINRLSDYDVDHIVPQSFLKDDSIDNKVLTRSDKARGKSDNVPSEEVVKKMKNYWRQLLNAKLITQRKFDNLTKAERGGLSELDKAGFIKRQLVETRQITKHVAQILDSRMNTKYDENDKLIREVKVITLKSKLVSDFRKDFQFYKVREINNYHHAHDAYLNAVVGTALIKKYPKLESEFVYGDYKVYDVRKMIAKSEQEIGKATAKYFFYSNIMNFFKTEITLANGEIRKRPLIETNGETGEIVWDKGRDFATVRKVLSMPQVNIVKKTEVQTGGFSKESILPKRNSDKLIARKKDWDPKKYGGFDSPTVAYSVLVVAKVEKGKSKKLKSVKELLGITIMERSSFEKNPIDFLEAKGYKEVKKDLIIKLPKYSLFELENGRKRMLASAGELQKGNELALPSKYVNFLYLASHYEKLKGSPEDNEQKQLFVEQHKHYLDEIIEQISEFSKRVILADANLDKVLSAYNKHRDKPIREQAENIIHLFTLTNLGAPAAFKYFDTTIDRKRYTSTKEVLDATLIHQSITGLYETRIDLSQLGGDGGGGGEAAAKGGLLGRDLLTKLKAQIQFSTEGPQVTWEDRPAMCLVLNLEEEYRLHEKPVPPSIDPSWLQLFPMVWAEKAGMGLANQVPPVVVELKSDASPVAVRQYPMSKEAREGIRPHIQRFLDLGILVPCQSPWNTPLLPVKKPGTNDYRPVQDLREVNKRVQDIHPTVPNPYNLLSSLPPSHTWYSVLDLKDAFFCLKLHPNSQPLFAFEWRDPEKGNTGQLTWTRLPQGFKNSPTLFNEALHRDLASFRALNPQVVMLQYVDDLLVAAPTYRDCKEGTRRLLQELSKLGYRVSAKKAQLCREEVTYLGYLLKGGKRWLTPARKATVMKIPTPTTPRQVREFLGTAGFCRLWIPGFASLAAPLYPLTRPKVPFTWTEAHQEAFGRIKEALLSAPALALPDLTKPFALYVDEKEGVARGVLTQTLGPWRRPVAYLSKKLDPVASGWPTCLKAIAAVALLLKDADKLTLGQNVLVIAPHNLESIVRQPPDRWMTNARMTHYQSLLLNERVSFAPPAILNPATLLPVESDDTPIHICSEILAEETGTRPDLRDQPLPGVPAWYTDGSSFIMDGRRQAGAAIVDNKRTVWASNLPEGTSAQKAELIALTQALRLAEGKSINIYTDSRYAFATAHVHGAIYKQRGWLTSAGKDIKNKEEILALLEAIHLPKRVAIIHCPGHQRGTDPVATGNRKADEAAKQAAQSTRILTETTKNAGKRTADGSEFEKRTADGSEFESPKKKAKVE

SEQ ID NO: 1630 - protein, 2124 aa, synthetic construct
MPAAKRVKLDGGDKKYSIGLDIGTNSVGWAVITDEYKVPSKKFKVLGNTDRHSIKKNLIGALLFDSGETAEATRLKRTARRRYTRRKNRICYLQEIFSNEMAKVDDSFFHRLEESFLVEEDKKHERHPIFGNIVDEVAYHEKYPTIYHLRKKLVDSTDKADLRLIYLALAHMIKFRGHFLIEGDLNPDNSDVDKLFIQLVQTYNQLFEENPINASGVDAKAILSARLSKSRRLENLIAQLPGEKKNGLFGNLIALSLGLTPNFKSNFDLAEDAKLQLSKDTYDDDLDNLLAQIGDQYADLFLAAKNLSDAILLSDILRVNTEITKAPLSASMIKRYDEHHQDLTLLKALVRQQLPEKYKEIFFDQSKNGYAGYIDGGASQEEFYKFIKPILEKMDGTEELLVKLNREDLLRKQRTFDNGSIPHQIHLGELHAILRRQEDFYPFLKDNREKIEKILTFRIPYYVGPLARGNSRFAWMTRKSEETITPWNFEEVVDKGASAQSFIERMTNFDKNLPNEKVLPKHSLLYEYFTVYNELTKVKYVTEGMRKPAFLSGEQKKAIVDLLFKTNRKVTVKQLKEDYFKKIECFDSVEISGVEDRFNASLGTYHDLLKIIKDKDFLDNEENEDILEDIVLTLTLFEDREMIEERLKTYAHLFDDKVMKQLKRRRYTGWGRLSRKLINGIRDKQSGKTILDFLKSDGFANRNFMQLIHDDSLTFKEDIQKAQVSGQGDSLHEHIANLAGSPAIKKGILQTVKVVDELVKVMGRHKPENIVIEMARENQTTQKGQKNSRERMKRIEEGIKELGSQILKEHPVENTQLQNEKLYLYYLQNGRDMYVDQELDINRLSDYDVDHIVPQSFLKDDSIDNKVLTRSDKARGKSDNVPSEEVVKKMKNYWRQLLNAKLITQRKFDNLTKAERGGLSELDKAGFIKRQLVETRQITKHVAQILDSRMNTKYDENDKLIREVKVITLKSKLVSDFRKDFQFYKVREINNYHHAHDAYLNAVVGTALIKKYPKLESEFVYGDYKVYDVRKMIAKSEQEIGKATAKYFFYSNIMNFFKTEITLANGEIRKRPLIETNGETGEIVWDKGRDFATVRKVLSMPQVNIVKKTEVQTGGFSKESILPKRNSDKLIARKKDWDPKKYGGFDSPTVAYSVLVVAKVEKGKSKKLKSVKELLGITIMERSSFEKNPIDFLEAKGYKEVKKDLIIKLPKYSLFELENGRKRMLASAGELQKGNELALPSKYVNFLYLASHYEKLKGSPEDNEQKQLFVEQHKHYLDEIIEQISEFSKRVILADANLDKVLSAYNKHRDKPIREQAENIIHLFTLTNLGAPAAFKYFDTTIDRKRYTSTKEVLDATLIHQSITGLYETRIDLSQLGGDGGEAAAKGSSGGLLGRDLLTKLKAQIQFSTEGPQVTWEDRPAMCLVLNLEEEYRLHEKPVPPSIDPSWLQLFPMVWAEKAGMGLANQVPPVVVELKSDASPVAVRQYPMSKEAREGIRPHIQRFLDLGILVPCQSPWNTPLLPVKKPGTNDYRPVQDLREVNKRVQDIHPTVPNPYNLLSSLPPSHTWYSVLDLKDAFFCLKLHPNSQPLFAFEWRDPEKGNTGQLTWTRLPQGFKNSPTLFNEALHRDLASFRALNPQVVMLQYVDDLLVAAPTYRDCKEGTRRLLQELSKLGYRVSAKKAQLCREEVTYLGYLLKGGKRWLTPARKATVMKIPTPTTPRQVREFLGTAGFCRLWIPGFASLAAPLYPLTRPKVPFTWTEAHQEAFGRIKEALLSAPALALPDLTKPFALYVDEKEGVARGVLTQTLGPWRRPVAYLSKKLDPVASGWPTCLKAIAAVALLLKDADKLTLGQNVLVIAPHNLESIVRQPPDRWMTNARMTHYQSLLLNERVSFAPPAILNPATLLPVESDDTPIHICSEILAEETGTRPDLRDQPLPGVPAWYTDGSSFIMDGRRQAGAAIVDNKRTVWASNLPEGTSAQKAELIALTQALRLAEGKSINIYTDSRYAFATAHVHGAIYKQRGWLTSAGKDIKNKEEILALLEAIHLPKRVAIIHCPGHQRGTDPVATGNRKADEAAKQAAQSTRILTETTKNAGKRTADGSEFEKRTADGSEFESPKKKAKVE

SEQ ID NO: 1631 - protein, 2119 aa, synthetic construct
MPAAKRVKLDGGDKKYSIGLDIGTNSVGWAVITDEYKVPSKKFKVLGNTDRHSIKKNLIGALLFDSGETAEATRLKRTARRRYTRRKNRICYLQEIFSNEMAKVDDSFFHRLEESFLVEEDKKHERHPIFGNIVDEVAYHEKYPTIYHLRKKLVDSTDKADLRLIYLALAHMIKFRGHFLIEGDLNPDNSDVDKLFIQLVQTYNQLFEENPINASGVDAKAILSARLSKSRRLENLIAQLPGEKKNGLFGNLIALSLGLTPNFKSNFDLAEDAKLQLSKDTYDDDLDNLLAQIGDQYADLFLAAKNLSDAILLSDILRVNTEITKAPLSASMIKRYDEHHQDLTLLKALVRQQLPEKYKEIFFDQSKNGYAGYIDGGASQEEFYKFIKPILEKMDGTEELLVKLNREDLLRKQRTFDNGSIPHQIHLGELHAILRRQEDFYPFLKDNREKIEKILTFRIPYYVGPLARGNSRFAWMTRKSEETITPWNFEEVVDKGASAQSFIERMTNFDKNLPNEKVLPKHSLLYEYFTVYNELTKVKYVTEGMRKPAFLSGEQKKAIVDLLFKTNRKVTVKQLKEDYFKKIECFDSVEISGVEDRFNASLGTYHDLLKIIKDKDFLDNEENEDILEDIVLTLTLFEDREMIEERLKTYAHLFDDKVMKQLKRRRYTGWGRLSRKLINGIRDKQSGKTILDFLKSDGFANRNFMQLIHDDSLTFKEDIQKAQVSGQGDSLHEHIANLAGSPAIKKGILQTVKVVDELVKVMGRHKPENIVIEMARENQTTQKGQKNSRERMKRIEEGIKELGSQILKEHPVENTQLQNEKLYLYYLQNGRDMYVDQELDINRLSDYDVDHIVPQSFLKDDSIDNKVLTRSDKARGKSDNVPSEEVVKKMKNYWRQLLNAKLITQRKFDNLTKAERGGLSELDKAGFIKRQLVETRQITKHVAQILDSRMNTKYDENDKLIREVKVITLKSKLVSDFRKDFQFYKVREINNYHHAHDAYLNAVVGTALIKKYPKLESEFVYGDYKVYDVRKMIAKSEQEIGKATAKYFFYSNIMNFFKTEITLANGEIRKRPLIETNGETGEIVWDKGRDFATVRKVLSMPQVNIVKKTEVQTGGFSKESILPKRNSDKLIARKKDWDPKKYGGFDSPTVAYSVLVVAKVEKGKSKKLKSVKELLGITIMERSSFEKNPIDFLEAKGYKEVKKDLIIKLPKYSLFELENGRKRMLASAGELQKGNELALPSKYVNFLYLASHYEKLKGSPEDNEQKQLFVEQHKHYLDEIIEQISEFSKRVILADANLDKVLSAYNKHRDKPIREQAENIIHLFTLTNLGAPAAFKYFDTTIDRKRYTSTKEVLDATLIHQSITGLYETRIDLSQLGGDGGPAPGGLLGRDLLTKLKAQIQFSTEGPQVTWEDRPAMCLVLNLEEEYRLHEKPVPPSIDPSWLQLFPMVWAEKAGMGLANQVPPVVVELKSDASPVAVRQYPMSKEAREGIRPHIQRFLDLGILVPCQSPWNTPLLPVKKPGTNDYRPVQDLREVNKRVQDIHPTVPNPYNLLSSLPPSHTWYSVLDLKDAFFCLKLHPNSQPLFAFEWRDPEKGNTGQLTWTRLPQGFKNSPTLFNEALHRDLASFRALNPQVVMLQYVDDLLVAAPTYRDCKEGTRRLLQELSKLGYRVSAKKAQLCREEVTYLGYLLKGGKRWLTPARKATVMKIPTPTTPRQVREFLGTAGFCRLWIPGFASLAAPLYPLTRPKVPFTWTEAHQEAFGRIKEALLSAPALALPDLTKPFALYVDEKEGVARGVLTQTLGPWRRPVAYLSKKLDPVASGWPTCLKAIAAVALLLKDADKLTLGQNVLVIAPHNLESIVRQPPDRWMTNARMTHYQSLLLNERVSFAPPAILNPATLLPVESDDTPIHICSEILAEETGTRPDLRDQPLPGVPAWYTDGSSFIMDGRRQAGAAIVDNKRTVWASNLPEGTSAQKAELIALTQALRLAEGKSINIYTDSRYAFATAHVHGAIYKQRGWLTSAGKDIKNKEEILALLEAIHLPKRVAIIHCPGHQRGTDPVATGNRKADEAAKQAAQSTRILTETTKNAGKRTADGSEFEKRTADGSEFESPKKKAKVE

SEQ ID NO: 1632 - protein, 2141 aa, synthetic construct
MPAAKRVKLDGGDKKYSIGLDIGTNSVGWAVITDEYKVPSKKFKVLGNTDRHSIKKNLIGALLFDSGETAEATRLKRTARRRYTRRKNRICYLQEIFSNEMAKVDDSFFHRLEESFLVEEDKKHERHPIFGNIVDEVAYHEKYPTIYHLRKKLVDSTDKADLRLIYLALAHMIKFRGHFLIEGDLNPDNSDVDKLFIQLVQTYNQLFEENPINASGVDAKAILSARLSKSRRLENLIAQLPGEKKNGLFGNLIALSLGLTPNFKSNFDLAEDAKLQLSKDTYDDDLDNLLAQIGDQYADLFLAAKNLSDAILLSDILRVNTEITKAPLSASMIKRYDEHHQDLTLLKALVRQQLPEKYKEIFFDQSKNGYAGYIDGGASQEEFYKFIKPILEKMDGTEELLVKLNREDLLRKQRTFDNGSIPHQIHLGELHAILRRQEDFYPFLKDNREKIEKILTFRIPYYVGPLARGNSRFAWMTRKSEETITPWNFEEVVDKGASAQSFIERMTNFDKNLPNEKVLPKHSLLYEYFTVYNELTKVKYVTEGMRKPAFLSGEQKKAIVDLLFKTNRKVTVKQLKEDYFKKIECFDSVEISGVEDRFNASLGTYHDLLKIIKDKDFLDNEENEDILEDIVLTLTLFEDREMIEERLKTYAHLFDDKVMKQLKRRRYTGWGRLSRKLINGIRDKQSGKTILDFLKSDGFANRNFMQLIHDDSLTFKEDIQKAQVSGQGDSLHEHIANLAGSPAIKKGILQTVKVVDELVKVMGRHKPENIVIEMARENQTTQKGQKNSRERMKRIEEGIKELGSQILKEHPVENTQLQNEKLYLYYLQNGRDMYVDQELDINRLSDYDVDHIVPQSFLKDDSIDNKVLTRSDKARGKSDNVPSEEVVKKMKNYWRQLLNAKLITQRKFDNLTKAERGGLSELDKAGFIKRQLVETRQITKHVAQILDSRMNTKYDENDKLIREVKVITLKSKLVSDFRKDFQFYKVREINNYHHAHDAYLNAVVGTALIKKYPKLESEFVYGDYKVYDVRKMIAKSEQEIGKATAKYFFYSNIMNFFKTEITLANGEIRKRPLIETNGETGEIVWDKGRDFATVRKVLSMPQVNIVKKTEVQTGGFSKESILPKRNSDKLIARKKDWDPKKYGGFDSPTVAYSVLVVAKVEKGKSKKLKSVKELLGITIMERSSFEKNPIDFLEAKGYKEVKKDLIIKLPKYSLFELENGRKRMLASAGELQKGNELALPSKYVNFLYLASHYEKLKGSPEDNEQKQLFVEQHKHYLDEIIEQISEFSKRVILADANLDKVLSAYNKHRDKPIREQAENIIHLFTLTNLGAPAAFKYFDTTIDRKRYTSTKEVLDATLIHQSITGLYETRIDLSQLGGDGGEAAAKEAAAKEAAAKEAAAKEAAAKGGLLGRDLLTKLKAQIQFSTEGPQVTWEDRPAMCLVLNLEEEYRLHEKPVPPSIDPSWLQLFPMVWAEKAGMGLANQVPPVVVELKSDASPVAVRQYPMSKEAREGIRPHIQRFLDLGILVPCQSPWNTPLLPVKKPGTNDYRPVQDLREVNKRVQDIHPTVPNPYNLLSSLPPSHTWYSVLDLKDAFFCLKLHPNSQPLFAFEWRDPEKGNTGQLTWTRLPQGFKNSPTLFNEALHRDLASFRALNPQVVMLQYVDDLLVAAPTYRDCKEGTRRLLQELSKLGYRVSAKKAQLCREEVTYLGYLLKGGKRWLTPARKATVMKIPTPTTPRQVREFLGTAGFCRLWIPGFASLAAPLYPLTRPKVPFTWTEAHQEAFGRIKEALLSAPALALPDLTKPFALYVDEKEGVARGVLTQTLGPWRRPVAYLSKKLDPVASGWPTCLKAIAAVALLLKDADKLTLGQNVLVIAPHNLESIVRQPPDRWMTNARMTHYQSLLLNERVSFAPPAILNPATLLPVESDDTPIHICSEILAEETGTRPDLRDQPLPGVPAWYTDGSSFIMDGRRQAGAAIVDNKRTVWASNLPEGTSAQKAELIALTQALRLAEGKSINIYTDSRYAFATAHVHGAIYKQRGWLTSAGKDIKNKEEILALLEAIHLPKRVAIIHCPGHQRGTDPVATGNRKADEAAKQAAQSTRILTETTKNAGKRTADGSEFEKRTADGSEFESPKKKAKVE

SEQ ID NO: 1633 - protein, 2122 aa, synthetic construct
MPAAKRVKLDGGDKKYSIGLDIGTNSVGWAVITDEYKVPSKKFKVLGNTDRHSIKKNLIGALLFDSGETAEATRLKRTARRRYTRRKNRICYLQEIFSNEMAKVDDSFFHRLEESFLVEEDKKHERHPIFGNIVDEVAYHEKYPTIYHLRKKLVDSTDKADLRLIYLALAHMIKFRGHFLIEGDLNPDNSDVDKLFIQLVQTYNQLFEENPINASGVDAKAILSARLSKSRRLENLIAQLPGEKKNGLFGNLIALSLGLTPNFKSNFDLAEDAKLQLSKDTYDDDLDNLLAQIGDQYADLFLAAKNLSDAILLSDILRVNTEITKAPLSASMIKRYDEHHQDLTLLKALVRQQLPEKYKEIFFDQSKNGYAGYIDGGASQEEFYKFIKPILEKMDGTEELLVKLNREDLLRKQRTFDNGSIPHQIHLGELHAILRRQEDFYPFLKDNREKIEKILTFRIPYYVGPLARGNSRFAWMTRKSEETITPWNFEEVVDKGASAQSFIERMTNFDKNLPNEKVLPKHSLLYEYFTVYNELTKVKYVTEGMRKPAFLSGEQKKAIVDLLFKTNRKVTVKQLKEDYFKKIECFDSVEISGVEDRFNASLGTYHDLLKIIKDKDFLDNEENEDILEDIVLTLTLFEDREMIEERLKTYAHLFDDKVMKQLKRRRYTGWGRLSRKLINGIRDKQSGKTILDFLKSDGFANRNFMQLIHDDSLTFKEDIQKAQVSGQGDSLHEHIANLAGSPAIKKGILQTVKVVDELVKVMGRHKPENIVIEMARENQTTQKGQKNSRERMKRIEEGIKELGSQILKEHPVENTQLQNEKLYLYYLQNGRDMYVDQELDINRLSDYDVDHIVPQSFLKDDSIDNKVLTRSDKARGKSDNVPSEEVVKKMKNYWRQLLNAKLITQRKFDNLTKAERGGLSELDKAGFIKRQLVETRQITKHVAQILDSRMNTKYDENDKLIREVKVITLKSKLVSDFRKDFQFYKVREINNYHHAHDAYLNAVVGTALIKKYPKLESEFVYGDYKVYDVRKMIAKSEQEIGKATAKYFFYSNIMNFFKTEITLANGEIRKRPLIETNGETGEIVWDKGRDFATVRKVLSMPQVNIVKKTEVQTGGFSKESILPKRNSDKLIARKKDWDPKKYGGFDSPTVAYSVLVVAKVEKGKSKKLKSVKELLGITIMERSSFEKNPIDFLEAKGYKEVKKDLIIKLPKYSLFELENGRKRMLASAGELQKGNELALPSKYVNFLYLASHYEKLKGSPEDNEQKQLFVEQHKHYLDEIIEQISEFSKRVILADANLDKVLSAYNKHRDKPIREQAENIIHLFTLTNLGAPAAFKYFDTTIDRKRYTSTKEVLDATLIHQSITGLYETRIDLSQLGGDGGGGGPAPGGLLGRDLLTKLKAQIQFSTEGPQVTWEDRPAMCLVLNLEEEYRLHEKPVPPSIDPSWLQLFPMVWAEKAGMGLANQVPPVVVELKSDASPVAVRQYPMSKEAREGIRPHIQRFLDLGILVPCQSPWNTPLLPVKKPGTNDYRPVQDLREVNKRVQDIHPTVPNPYNLLSSLPPSHTWYSVLDLKDAFFCLKLHPNSQPLFAFEWRDPEKGNTGQLTWTRLPQGFKNSPTLFNEALHRDLASFRALNPQVVMLQYVDDLLVAAPTYRDCKEGTRRLLQELSKLGYRVSAKKAQLCREEVTYLGYLLKGGKRWLTPARKATVMKIPTPTTPRQVREFLGTAGFCRLWIPGFASLAAPLYPLTRPKVPFTWTEAHQEAFGRIKEALLSAPALALPDLTKPFALYVDEKEGVARGVLTQTLGPWRRPVAYLSKKLDPVASGWPTCLKAIAAVALLLKDADKLTLGQNVLVIAPHNLESIVRQPPDRWMTNARMTHYQSLLLNERVSFAPPAILNPATLLPVESDDTPIHICSEILAEETGTRPDLRDQPLPGVPAWYTDGSSFIMDGRRQAGAAIVDNKRTVWASNLPEGTSAQKAELIALTQALRLAEGKSINIYTDSRYAFATAHVHGAIYKQRGWLTSAGKDIKNKEEILALLEAIHLPKRVAIIHCPGHQRGTDPVATGNRKADEAAKQAAQSTRILTETTKNAGKRTADGSEFEKRTADGSEFESPKKKAKVE

SEQ ID NO: 1634 - protein, 2127 aa, synthetic construct
MPAAKRVKLDGGDKKYSIGLDIGTNSVGWAVITDEYKVPSKKFKVLGNTDRHSIKKNLIGALLFDSGETAEATRLKRTARRRYTRRKNRICYLQEIFSNEMAKVDDSFFHRLEESFLVEEDKKHERHPIFGNIVDEVAYHEKYPTIYHLRKKLVDSTDKADLRLIYLALAHMIKFRGHFLIEGDLNPDNSDVDKLFIQLVQTYNQLFEENPINASGVDAKAILSARLSKSRRLENLIAQLPGEKKNGLFGNLIALSLGLTPNFKSNFDLAEDAKLQLSKDTYDDDLDNLLAQIGDQYADLFLAAKNLSDAILLSDILRVNTEITKAPLSASMIKRYDEHHQDLTLLKALVRQQLPEKYKEIFFDQSKNGYAGYIDGGASQEEFYKFIKPILEKMDGTEELLVKLNREDLLRKQRTFDNGSIPHQIHLGELHAILRRQEDFYPFLKDNREKIEKILTFRIPYYVGPLARGNSRFAWMTRKSEETITPWNFEEVVDKGASAQSFIERMTNFDKNLPNEKVLPKHSLLYEYFTVYNELTKVKYVTEGMRKPAFLSGEQKKAIVDLLFKTNRKVTVKQLKEDYFKKIECFDSVEISGVEDRFNASLGTYHDLLKIIKDKDFLDNEENEDILEDIVLTLTLFEDREMIEERLKTYAHLFDDKVMKQLKRRRYTGWGRLSRKLINGIRDKQSGKTILDFLKSDGFANRNFMQLIHDDSLTFKEDIQKAQVSGQGDSLHEHIANLAGSPAIKKGILQTVKVVDELVKVMGRHKPENIVIEMARENQTTQKGQKNSRERMKRIEEGIKELGSQILKEHPVENTQLQNEKLYLYYLQNGRDMYVDQELDINRLSDYDVDHIVPQSFLKDDSIDNKVLTRSDKARGKSDNVPSEEVVKKMKNYWRQLLNAKLITQRKFDNLTKAERGGLSELDKAGFIKRQLVETRQITKHVAQILDSRMNTKYDENDKLIREVKVITLKSKLVSDFRKDFQFYKVREINNYHHAHDAYLNAVVGTALIKKYPKLESEFVYGDYKVYDVRKMIAKSEQEIGKATAKYFFYSNIMNFFKTEITLANGEIRKRPLIETNGETGEIVWDKGRDFATVRKVLSMPQVNIVKKTEVQTGGFSKESILPKRNSDKLIARKKDWDPKKYGGFDSPTVAYSVLVVAKVEKGKSKKLKSVKELLGITIMERSSFEKNPIDFLEAKGYKEVKKDLIIKLPKYSLFELENGRKRMLASAGELQKGNELALPSKYVNFLYLASHYEKLKGSPEDNEQKQLFVEQHKHYLDEIIEQISEFSKRVILADANLDKVLSAYNKHRDKPIREQAENIIHLFTLTNLGAPAAFKYFDTTIDRKRYTSTKEVLDATLIHQSITGLYETRIDLSQLGGDGGGSSEAAAKGGGGGLLGRDLLTKLKAQIQFSTEGPQVTWEDRPAMCLVLNLEEEYRLHEKPVPPSIDPSWLQLFPMVWAEKAGMGLANQVPPVVVELKSDASPVAVRQYPMSKEAREGIRPHIQRFLDLGILVPCQSPWNTPLLPVKKPGTNDYRPVQDLREVNKRVQDIHPTVPNPYNLLSSLPPSHTWYSVLDLKDAFFCLKLHPNSQPLFAFEWRDPEKGNTGQLTWTRLPQGFKNSPTLFNEALHRDLASFRALNPQVVMLQYVDDLLVAAPTYRDCKEGTRRLLQELSKLGYRVSAKKAQLCREEVTYLGYLLKGGKRWLTPARKATVMKIPTPTTPRQVREFLGTAGFCRLWIPGFASLAAPLYPLTRPKVPFTWTEAHQEAFGRIKEALLSAPALALPDLTKPFALYVDEKEGVARGVLTQTLGPWRRPVAYLSKKLDPVASGWPTCLKAIAAVALLLKDADKLTLGQNVLVIAPHNLESIVRQPPDRWMTNARMTHYQSLLLNERVSFAPPAILNPATLLPVESDDTPIHICSEILAEETGTRPDLRDQPLPGVPAWYTDGSSFIMDGRRQAGAAIVDNKRTVWASNLPEGTSAQKAELIALTQALRLAEGKSINIYTDSRYAFATAHVHGAIYKQRGWLTSAGKDIKNKEEILALLEAIHLPKRVAIIHCPGHQRGTDPVATGNRKADEAAKQAAQSTRILTETTKNAGKRTADGSEFEKRTADGSEFESPKKKAKVE

SEQ ID NO: 1635 - protein, 2131 aa, synthetic construct
MPAAKRVKLDGGDKKYSIGLDIGTNSVGWAVITDEYKVPSKKFKVLGNTDRHSIKKNLIGALLFDSGETAEATRLKRTARRRYTRRKNRICYLQEIFSNEMAKVDDSFFHRLEESFLVEEDKKHERHPIFGNIVDEVAYHEKYPTIYHLRKKLVDSTDKADLRLIYLALAHMIKFRGHFLIEGDLNPDNSDVDKLFIQLVQTYNQLFEENPINASGVDAKAILSARLSKSRRLENLIAQLPGEKKNGLFGNLIALSLGLTPNFKSNFDLAEDAKLQLSKDTYDDDLDNLLAQIGDQYADLFLAAKNLSDAILLSDILRVNTEITKAPLSASMIKRYDEHHQDLTLLKALVRQQLPEKYKEIFFDQSKNGYAGYIDGGASQEEFYKFIKPILEKMDGTEELLVKLNREDLLRKQRTFDNGSIPHQIHLGELHAILRRQEDFYPFLKDNREKIEKILTFRIPYYVGPLARGNSRFAWMTRKSEETITPWNFEEVVDKGASAQSFIERMTNFDKNLPNEKVLPKHSLLYEYFTVYNELTKVKYVTEGMRKPAFLSGEQKKAIVDLLFKTNRKVTVKQLKEDYFKKIECFDSVEISGVEDRFNASLGTYHDLLKIIKDKDFLDNEENEDILEDIVLTLTLFEDREMIEERLKTYAHLFDDKVMKQLKRRRYTGWGRLSRKLINGIRDKQSGKTILDFLKSDGFANRNFMQLIHDDSLTFKEDIQKAQVSGQGDSLHEHIANLAGSPAIKKGILQTVKVVDELVKVMGRHKPENIVIEMARENQTTQKGQKNSRERMKRIEEGIKELGSQILKEHPVENTQLQNEKLYLYYLQNGRDMYVDQELDINRLSDYDVDHIVPQSFLKDDSIDNKVLTRSDKARGKSDNVPSEEVVKKMKNYWRQLLNAKLITQRKFDNLTKAERGGLSELDKAGFIKRQLVETRQITKHVAQILDSRMNTKYDENDKLIREVKVITLKSKLVSDFRKDFQFYKVREINNYHHAHDAYLNAVVGTALIKKYPKLESEFVYGDYKVYDVRKMIAKSEQEIGKATAKYFFYSNIMNFFKTEITLANGEIRKRPLIETNGETGEIVWDKGRDFATVRKVLSMPQVNIVKKTEVQTGGFSKESILPKRNSDKLIARKKDWDPKKYGGFDSPTVAYSVLVVAKVEKGKSKKLKSVKELLGITIMERSSFEKNPIDFLEAKGYKEVKKDLIIKLPKYSLFELENGRKRMLASAGELQKGNELALPSKYVNFLYLASHYEKLKGSPEDNEQKQLFVEQHKHYLDEIIEQISEFSKRVILADANLDKVLSAYNKHRDKPIREQAENIIHLFTLTNLGAPAAFKYFDTTIDRKRYTSTKEVLDATLIHQSITGLYETRIDLSQLGGDGGGGGGSEAAAKGGGGSGGLLGRDLLTKLKAQIQFSTEGPQVTWEDRPAMCLVLNLEEEYRLHEKPVPPSIDPSWLQLFPMVWAEKAGMGLANQVPPVVVELKSDASPVAVRQYPMSKEAREGIRPHIQRFLDLGILVPCQSPWNTPLLPVKKPGTNDYRPVQDLREVNKRVQDIHPTVPNPYNLLSSLPPSHTWYSVLDLKDAFFCLKLHPNSQPLFAFEWRDPEKGNTGQLTWTRLPQGFKNSPTLFNEALHRDLASFRALNPQVVMLQYVDDLLVAAPTYRDCKEGTRRLLQELSKLGYRVSAKKAQLCREEVTYLGYLLKGGKRWLTPARKATVMKIPTPTTPRQVREFLGTAGFCRLWIPGFASLAAPLYPLTRPKVPFTWTEAHQEAFGRIKEALLSAPALALPDLTKPFALYVDEKEGVARGVLTQTLGPWRRPVAYLSKKLDPVASGWPTCLKAIAAVALLLKDADKLTLGQNVLVIAPHNLESIVRQPPDRWMTNARMTHYQSLLLNERVSFAPPAILNPATLLPVESDDTPIHICSEILAEETGTRPDLRDQPLPGVPAWYTDGSSFIMDGRRQAGAAIVDNKRTVWASNLPEGTSAQKAELIALTQALRLAEGKSINIYTDSRYAFATAHVHGAIYKQRGWLTSAGKDIKNKEEILALLEAIHLPKRVAIIHCPGHQRGTDPVATGNRKADEAAKQAAQSTRILTETTKNAGKRTADGSEFEKRTADGSEFESPKKKAKVE

SEQ ID NO: 1636 - protein, 2122 aa, synthetic construct
MPAAKRVKLDGGDKKYSIGLDIGTNSVGWAVITDEYKVPSKKFKVLGNTDRHSIKKNLIGALLFDSGETAEATRLKRTARRRYTRRKNRICYLQEIFSNEMAKVDDSFFHRLEESFLVEEDKKHERHPIFGNIVDEVAYHEKYPTIYHLRKKLVDSTDKADLRLIYLALAHMIKFRGHFLIEGDLNPDNSDVDKLFIQLVQTYNQLFEENPINASGVDAKAILSARLSKSRRLENLIAQLPGEKKNGLFGNLIALSLGLTPNFKSNFDLAEDAKLQLSKDTYDDDLDNLLAQIGDQYADLFLAAKNLSDAILLSDILRVNTEITKAPLSASMIKRYDEHHQDLTLLKALVRQQLPEKYKEIFFDQSKNGYAGYIDGGASQEEFYKFIKPILEKMDGTEELLVKLNREDLLRKQRTFDNGSIPHQIHLGELHAILRRQEDFYPFLKDNREKIEKILTFRIPYYVGPLARGNSRFAWMTRKSEETITPWNFEEVVDKGASAQSFIERMTNFDKNLPNEKVLPKHSLLYEYFTVYNELTKVKYVTEGMRKPAFLSGEQKKAIVDLLFKTNRKVTVKQLKEDYFKKIECFDSVEISGVEDRFNASLGTYHDLLKIIKDKDFLDNEENEDILEDIVLTLTLFEDREMIEERLKTYAHLFDDKVMKQLKRRRYTGWGRLSRKLINGIRDKQSGKTILDFLKSDGFANRNFMQLIHDDSLTFKEDIQKAQVSGQGDSLHEHIANLAGSPAIKKGILQTVKVVDELVKVMGRHKPENIVIEMARENQTTQKGQKNSRERMKRIEEGIKELGSQILKEHPVENTQLQNEKLYLYYLQNGRDMYVDQELDINRLSDYDVDHIVPQSFLKDDSIDNKVLTRSDKARGKSDNVPSEEVVKKMKNYWRQLLNAKLITQRKFDNLTKAERGGLSELDKAGFIKRQLVETRQITKHVAQILDSRMNTKYDENDKLIREVKVITLKSKLVSDFRKDFQFYKVREINNYHHAHDAYLNAVVGTALIKKYPKLESEFVYGDYKVYDVRKMIAKSEQEIGKATAKYFFYSNIMNFFKTEITLANGEIRKRPLIETNGETGEIVWDKGRDFATVRKVLSMPQVNIVKKTEVQTGGFSKESILPKRNSDKLIARKKDWDPKKYGGFDSPTVAYSVLVVAKVEKGKSKKLKSVKELLGITIMERSSFEKNPIDFLEAKGYKEVKKDLIIKLPKYSLFELENGRKRMLASAGELQKGNELALPSKYVNFLYLASHYEKLKGSPEDNEQKQLFVEQHKHYLDEIIEQISEFSKRVILADANLDKVLSAYNKHRDKPIREQAENIIHLFTLTNLGAPAAFKYFDTTIDRKRYTSTKEVLDATLIHQSITGLYETRIDLSQLGGDGGPAPGGSGGLLGRDLLTKLKAQIQFSTEGPQVTWEDRPAMCLVLNLEEEYRLHEKPVPPSIDPSWLQLFPMVWAEKAGMGLANQVPPVVVELKSDASPVAVRQYPMSKEAREGIRPHIQRFLDLGILVPCQSPWNTPLLPVKKPGTNDYRPVQDLREVNKRVQDIHPTVPNPYNLLSSLPPSHTWYSVLDLKDAFFCLKLHPNSQPLFAFEWRDPEKGNTGQLTWTRLPQGFKNSPTLFNEALHRDLASFRALNPQVVMLQYVDDLLVAAPTYRDCKEGTRRLLQELSKLGYRVSAKKAQLCREEVTYLGYLLKGGKRWLTPARKATVMKIPTPTTPRQVREFLGTAGFCRLWIPGFASLAAPLYPLTRPKVPFTWTEAHQEAFGRIKEALLSAPALALPDLTKPFALYVDEKEGVARGVLTQTLGPWRRPVAYLSKKLDPVASGWPTCLKAIAAVALLLKDADKLTLGQNVLVIAPHNLESIVRQPPDRWMTNARMTHYQSLLLNERVSFAPPAILNPATLLPVESDDTPIHICSEILAEETGTRPDLRDQPLPGVPAWYTDGSSFIMDGRRQAGAAIVDNKRTVWASNLPEGTSAQKAELIALTQALRLAEGKSINIYTDSRYAFATAHVHGAIYKQRGWLTSAGKDIKNKEEILALLEAIHLPKRVAIIHCPGHQRGTDPVATGNRKADEAAKQAAQSTRILTETTKNAGKRTADGSEFEKRTADGSEFESPKKKAKVE

SEQ ID NO: 1637 - protein, 2122 aa, synthetic construct
MPAAKRVKLDGGDKKYSIGLDIGTNSVGWAVITDEYKVPSKKFKVLGNTDRHSIKKNLIGALLFDSGETAEATRLKRTARRRYTRRKNRICYLQEIFSNEMAKVDDSFFHRLEESFLVEEDKKHERHPIFGNIVDEVAYHEKYPTIYHLRKKLVDSTDKADLRLIYLALAHMIKFRGHFLIEGDLNPDNSDVDKLFIQLVQTYNQLFEENPINASGVDAKAILSARLSKSRRLENLIAQLPGEKKNGLFGNLIALSLGLTPNFKSNFDLAEDAKLQLSKDTYDDDLDNLLAQIGDQYADLFLAAKNLSDAILLSDILRVNTEITKAPLSASMIKRYDEHHQDLTLLKALVRQQLPEKYKEIFFDQSKNGYAGYIDGGASQEEFYKFIKPILEKMDGTEELLVKLNREDLLRKQRTFDNGSIPHQIHLGELHAILRRQEDFYPFLKDNREKIEKILTFRIPYYVGPLARGNSRFAWMTRKSEETITPWNFEEVVDKGASAQSFIERMTNFDKNLPNEKVLPKHSLLYEYFTVYNELTKVKYVTEGMRKPAFLSGEQKKAIVDLLFKTNRKVTVKQLKEDYFKKIECFDSVEISGVEDRFNASLGTYHDLLKIIKDKDFLDNEENEDILEDIVLTLTLFEDREMIEERLKTYAHLFDDKVMKQLKRRRYTGWGRLSRKLINGIRDKQSGKTILDFLKSDGFANRNFMQLIHDDSLTFKEDIQKAQVSGQGDSLHEHIANLAGSPAIKKGILQTVKVVDELVKVMGRHKPENIVIEMARENQTTQKGQKNSRERMKRIEEGIKELGSQILKEHPVENTQLQNEKLYLYYLQNGRDMYVDQELDINRLSDYDVDHIVPQSFLKDDSIDNKVLTRSDKARGKSDNVPSEEVVKKMKNYWRQLLNAKLITQRKFDNLTKAERGGLSELDKAGFIKRQLVETRQITKHVAQILDSRMNTKYDENDKLIREVKVITLKSKLVSDFRKDFQFYKVREINNYHHAHDAYLNAVVGTALIKKYPKLESEFVYGDYKVYDVRKMIAKSEQEIGKATAKYFFYSNIMNFFKTEITLANGEIRKRPLIETNGETGEIVWDKGRDFATVRKVLSMPQVNIVKKTEVQTGGFSKESILPKRNSDKLIARKKDWDPKKYGGFDSPTVAYSVLVVAKVEKGKSKKLKSVKELLGITIMERSSFEKNPIDFLEAKGYKEVKKDLIIKLPKYSLFELENGRKRMLASAGELQKGNELALPSKYVNFLYLASHYEKLKGSPEDNEQKQLFVEQHKHYLDEIIEQISEFSKRVILADANLDKVLSAYNKHRDKPIREQAENIIHLFTLTNLGAPAAFKYFDTTIDRKRYTSTKEVLDATLIHQSITGLYETRIDLSQLGGDGGGGSGSSGGLLGRDLLTKLKAQIQFSTEGPQVTWEDRPAMCLVLNLEEEYRLHEKPVPPSIDPSWLQLFPMVWAEKAGMGLANQVPPVVVELKSDASPVAVRQYPMSKEAREGIRPHIQRFLDLGILVPCQSPWNTPLLPVKKPGTNDYRPVQDLREVNKRVQDIHPTVPNPYNLLSSLPPSHTWYSVLDLKDAFFCLKLHPNSQPLFAFEWRDPEKGNTGQLTWTRLPQGFKNSPTLFNEALHRDLASFRALNPQVVMLQYVDDLLVAAPTYRDCKEGTRRLLQELSKLGYRVSAKKAQLCREEVTYLGYLLKGGKRWLTPARKATVMKIPTPTTPRQVREFLGTAGFCRLWIPGFASLAAPLYPLTRPKVPFTWTEAHQEAFGRIKEALLSAPALALPDLTKPFALYVDEKEGVARGVLTQTLGPWRRPVAYLSKKLDPVASGWPTCLKAIAAVALLLKDADKLTLGQNVLVIAPHNLESIVRQPPDRWMTNARMTHYQSLLLNERVSFAPPAILNPATLLPVESDDTPIHICSEILAEETGTRPDLRDQPLPGVPAWYTDGSSFIMDGRRQAGAAIVDNKRTVWASNLPEGTSAQKAELIALTQALRLAEGKSINIYTDSRYAFATAHVHGAIYKQRGWLTSAGKDIKNKEEILALLEAIHLPKRVAIIHCPGHQRGTDPVATGNRKADEAAKQAAQSTRILTETTKNAGKRTADGSEFEKRTADGSEFESPKKKAKVE

SEQ ID NO: 1638 - protein, 2131 aa, synthetic construct
MPAAKRVKLDGGDKKYSIGLDIGTNSVGWAVITDEYKVPSKKFKVLGNTDRHSIKKNLIGALLFDSGETAEATRLKRTARRRYTRRKNRICYLQEIFSNEMAKVDDSFFHRLEESFLVEEDKKHERHPIFGNIVDEVAYHEKYPTIYHLRKKLVDSTDKADLRLIYLALAHMIKFRGHFLIEGDLNPDNSDVDKLFIQLVQTYNQLFEENPINASGVDAKAILSARLSKSRRLENLIAQLPGEKKNGLFGNLIALSLGLTPNFKSNFDLAEDAKLQLSKDTYDDDLDNLLAQIGDQYADLFLAAKNLSDAILLSDILRVNTEITKAPLSASMIKRYDEHHQDLTLLKALVRQQLPEKYKEIFFDQSKNGYAGYIDGGASQEEFYKFIKPILEKMDGTEELLVKLNREDLLRKQRTFDNGSIPHQIHLGELHAILRRQEDFYPFLKDNREKIEKILTFRIPYYVGPLARGNSRFAWMTRKSEETITPWNFEEVVDKGASAQSFIERMTNFDKNLPNEKVLPKHSLLYEYFTVYNELTKVKYVTEGMRKPAFLSGEQKKAIVDLLFKTNRKVTVKQLKEDYFKKIECFDSVEISGVEDRFNASLGTYHDLLKIIKDKDFLDNEENEDILEDIVLTLTLFEDREMIEERLKTYAHLFDDKVMKQLKRRRYTGWGRLSRKLINGIRDKQSGKTILDFLKSDGFANRNFMQLIHDDSLTFKEDIQKAQVSGQGDSLHEHIANLAGSPAIKKGILQTVKVVDELVKVMGRHKPENIVIEMARENQTTQKGQKNSRERMKRIEEGIKELGSQILKEHPVENTQLQNEKLYLYYLQNGRDMYVDQELDINRLSDYDVDHIVPQSFLKDDSIDNKVLTRSDKARGKSDNVPSEEVVKKMKNYWRQLLNAKLITQRKFDNLTKAERGGLSELDKAGFIKRQLVETRQITKHVAQILDSRMNTKYDENDKLIREVKVITLKSKLVSDFRKDFQFYKVREINNYHHAHDAYLNAVVGTALIKKYPKLESEFVYGDYKVYDVRKMIAKSEQEIGKATAKYFFYSNIMNFFKTEITLANGEIRKRPLIETNGETGEIVWDKGRDFATVRKVLSMPQVNIVKKTEVQTGGFSKESILPKRNSDKLIARKKDWDPKKYGGFDSPTVAYSVLVVAKVEKGKSKKLKSVKELLGITIMERSSFEKNPIDFLEAKGYKEVKKDLIIKLPKYSLFELENGRKRMLASAGELQKGNELALPSKYVNFLYLASHYEKLKGSPEDNEQKQLFVEQHKHYLDEIIEQISEFSKRVILADANLDKVLSAYNKHRDKPIREQAENIIHLFTLTNLGAPAAFKYFDTTIDRKRYTSTKEVLDATLIHQSITGLYETRIDLSQLGGDGGEAAAKGGGGSEAAAKGGLLGRDLLTKLKAQIQFSTEGPQVTWEDRPAMCLVLNLEEEYRLHEKPVPPSIDPSWLQLFPMVWAEKAGMGLANQVPPVVVELKSDASPVAVRQYPMSKEAREGIRPHIQRFLDLGILVPCQSPWNTPLLPVKKPGTNDYRPVQDLREVNKRVQDIHPTVPNPYNLLSSLPPSHTWYSVLDLKDAFFCLKLHPNSQPLFAFEWRDPEKGNTGQLTWTRLPQGFKNSPTLFNEALHRDLASFRALNPQVVMLQYVDDLLVAAPTYRDCKEGTRRLLQELSKLGYRVSAKKAQLCREEVTYLGYLLKGGKRWLTPARKATVMKIPTPTTPRQVREFLGTAGFCRLWIPGFASLAAPLYPLTRPKVPFTWTEAHQEAFGRIKEALLSAPALALPDLTKPFALYVDEKEGVARGVLTQTLGPWRRPVAYLSKKLDPVASGWPTCLKAIAAVALLLKDADKLTLGQNVLVIAPHNLESIVRQPPDRWMTNARMTHYQSLLLNERVSFAPPAILNPATLLPVESDDTPIHICSEILAEETGTRPDLRDQPLPGVPAWYTDGSSFIMDGRRQAGAAIVDNKRTVWASNLPEGTSAQKAELIALTQALRLAEGKSINIYTDSRYAFATAHVHGAIYKQRGWLTSAGKDIKNKEEILALLEAIHLPKRVAIIHCPGHQRGTDPVATGNRKADEAAKQAAQSTRILTETTKNAGKRTADGSEFEKRTADGSEFESPKKKAKVE

SEQ ID NO: 1639 - protein, 2127 aa, synthetic construct
MPAAKRVKLDGGDKKYSIGLDIGTNSVGWAVITDEYKVPSKKFKVLGNTDRHSIKKNLIGALLFDSGETAEATRLKRTARRRYTRRKNRICYLQEIFSNEMAKVDDSFFHRLEESFLVEEDKKHERHPIFGNIVDEVAYHEKYPTIYHLRKKLVDSTDKADLRLIYLALAHMIKFRGHFLIEGDLNPDNSDVDKLFIQLVQTYNQLFEENPINASGVDAKAILSARLSKSRRLENLIAQLPGEKKNGLFGNLIALSLGLTPNFKSNFDLAEDAKLQLSKDTYDDDLDNLLAQIGDQYADLFLAAKNLSDAILLSDILRVNTEITKAPLSASMIKRYDEHHQDLTLLKALVRQQLPEKYKEIFFDQSKNGYAGYIDGGASQEEFYKFIKPILEKMDGTEELLVKLNREDLLRKQRTFDNGSIPHQIHLGELHAILRRQEDFYPFLKDNREKIEKILTFRIPYYVGPLARGNSRFAWMTRKSEETITPWNFEEVVDKGASAQSFIERMTNFDKNLPNEKVLPKHSLLYEYFTVYNELTKVKYVTEGMRKPAFLSGEQKKAIVDLLFKTNRKVTVKQLKEDYFKKIECFDSVEISGVEDRFNASLGTYHDLLKIIKDKDFLDNEENEDILEDIVLTLTLFEDREMIEERLKTYAHLFDDKVMKQLKRRRYTGWGRLSRKLINGIRDKQSGKTILDFLKSDGFANRNFMQLIHDDSLTFKEDIQKAQVSGQGDSLHEHIANLAGSPAIKKGILQTVKVVDELVKVMGRHKPENIVIEMARENQTTQKGQKNSRERMKRIEEGIKELGSQILKEHPVENTQLQNEKLYLYYLQNGRDMYVDQELDINRLSDYDVDHIVPQSFLKDDSIDNKVLTRSDKARGKSDNVPSEEVVKKMKNYWRQLLNAKLITQRKFDNLTKAERGGLSELDKAGFIKRQLVETRQITKHVAQILDSRMNTKYDENDKLIREVKVITLKSKLVSDFRKDFQFYKVREINNYHHAHDAYLNAVVGTALIKKYPKLESEFVYGDYKVYDVRKMIAKSEQEIGKATAKYFFYSNIMNFFKTEITLANGEIRKRPLIETNGETGEIVWDKGRDFATVRKVLSMPQVNIVKKTEVQTGGFSKESILPKRNSDKLIARKKDWDPKKYGGFDSPTVAYSVLVVAKVEKGKSKKLKSVKELLGITIMERSSFEKNPIDFLEAKGYKEVKKDLIIKLPKYSLFELENGRKRMLASAGELQKGNELALPSKYVNFLYLASHYEKLKGSPEDNEQKQLFVEQHKHYLDEIIEQISEFSKRVILADANLDKVLSAYNKHRDKPIREQAENIIHLFTLTNLGAPAAFKYFDTTIDRKRYTSTKEVLDATLIHQSITGLYETRIDLSQLGGDGGGGGGSSEAAAKGGLLGRDLLTKLKAQIQFSTEGPQVTWEDRPAMCLVLNLEEEYRLHEKPVPPSIDPSWLQLFPMVWAEKAGMGLANQVPPVVVELKSDASPVAVRQYPMSKEAREGIRPHIQRFLDLGILVPCQSPWNTPLLPVKKPGTNDYRPVQDLREVNKRVQDIHPTVPNPYNLLSSLPPSHTWYSVLDLKDAFFCLKLHPNSQPLFAFEWRDPEKGNTGQLTWTRLPQGFKNSPTLFNEALHRDLASFRALNPQVVMLQYVDDLLVAAPTYRDCKEGTRRLLQELSKLGYRVSAKKAQLCREEVTYLGYLLKGGKRWLTPARKATVMKIPTPTTPRQVREFLGTAGFCRLWIPGFASLAAPLYPLTRPKVPFTWTEAHQEAFGRIKEALLSAPALALPDLTKPFALYVDEKEGVARGVLTQTLGPWRRPVAYLSKKLDPVASGWPTCLKAIAAVALLLKDADKLTLGQNVLVIAPHNLESIVRQPPDRWMTNARMTHYQSLLLNERVSFAPPAILNPATLLPVESDDTPIHICSEILAEETGTRPDLRDQPLPGVPAWYTDGSSFIMDGRRQAGAAIVDNKRTVWASNLPEGTSAQKAELIALTQALRLAEGKSINIYTDSRYAFATAHVHGAIYKQRGWLTSAGKDIKNKEEILALLEAIHLPKRVAIIHCPGHQRGTDPVATGNRKADEAAKQAAQSTRILTETTKNAGKRTADGSEFEKRTADGSEFESPKKKAKVE

SEQ ID NO: 1640 - protein, 2127 aa, synthetic construct
MPAAKRVKLDGGDKKYSIGLDIGTNSVGWAVITDEYKVPSKKFKVLGNTDRHSIKKNLIGALLFDSGETAEATRLKRTARRRYTRRKNRICYLQEIFSNEMAKVDDSFFHRLEESFLVEEDKKHERHPIFGNIVDEVAYHEKYPTIYHLRKKLVDSTDKADLRLIYLALAHMIKFRGHFLIEGDLNPDNSDVDKLFIQLVQTYNQLFEENPINASGVDAKAILSARLSKSRRLENLIAQLPGEKKNGLFGNLIALSLGLTPNFKSNFDLAEDAKLQLSKDTYDDDLDNLLAQIGDQYADLFLAAKNLSDAILLSDILRVNTEITKAPLSASMIKRYDEHHQDLTLLKALVRQQLPEKYKEIFFDQSKNGYAGYIDGGASQEEFYKFIKPILEKMDGTEELLVKLNREDLLRKQRTFDNGSIPHQIHLGELHAILRRQEDFYPFLKDNREKIEKILTFRIPYYVGPLARGNSRFAWMTRKSEETITPWNFEEVVDKGASAQSFIERMTNFDKNLPNEKVLPKHSLLYEYFTVYNELTKVKYVTEGMRKPAFLSGEQKKAIVDLLFKTNRKVTVKQLKEDYFKKIECFDSVEISGVEDRFNASLGTYHDLLKIIKDKDFLDNEENEDILEDIVLTLTLFEDREMIEERLKTYAHLFDDKVMKQLKRRRYTGWGRLSRKLINGIRDKQSGKTILDFLKSDGFANRNFMQLIHDDSLTFKEDIQKAQVSGQGDSLHEHIANLAGSPAIKKGILQTVKVVDELVKVMGRHKPENIVIEMARENQTTQKGQKNSRERMKRIEEGIKELGSQILKEHPVENTQLQNEKLYLYYLQNGRDMYVDQELDINRLSDYDVDHIVPQSFLKDDSIDNKVLTRSDKARGKSDNVPSEEVVKKMKNYWRQLLNAKLITQRKFDNLTKAERGGLSELDKAGFIKRQLVETRQITKHVAQILDSRMNTKYDENDKLIREVKVITLKSKLVSDFRKDFQFYKVREINNYHHAHDAYLNAVVGTALIKKYPKLESEFVYGDYKVYDVRKMIAKSEQEIGKATAKYFFYSNIMNFFKTEITLANGEIRKRPLIETNGETGEIVWDKGRDFATVRKVLSMPQVNIVKKTEVQTGGFSKESILPKRNSDKLIARKKDWDPKKYGGFDSPTVAYSVLVVAKVEKGKSKKLKSVKELLGITIMERSSFEKNPIDFLEAKGYKEVKKDLIIKLPKYSLFELENGRKRMLASAGELQKGNELALPSKYVNFLYLASHYEKLKGSPEDNEQKQLFVEQHKHYLDEIIEQISEFSKRVILADANLDKVLSAYNKHRDKPIREQAENIIHLFTLTNLGAPAAFKYFDTTIDRKRYTSTKEVLDATLIHQSITGLYETRIDLSQLGGDGGPAPGGSEAAAKGGLLGRDLLTKLKAQIQFSTEGPQVTWEDRPAMCLVLNLEEEYRLHEKPVPPSIDPSWLQLFPMVWAEKAGMGLANQVPPVVVELKSDASPVAVRQYPMSKEAREGIRPHIQRFLDLGILVPCQSPWNTPLLPVKKPGTNDYRPVQDLREVNKRVQDIHPTVPNPYNLLSSLPPSHTWYSVLDLKDAFFCLKLHPNSQPLFAFEWRDPEKGNTGQLTWTRLPQGFKNSPTLFNEALHRDLASFRALNPQVVMLQYVDDLLVAAPTYRDCKEGTRRLLQELSKLGYRVSAKKAQLCREEVTYLGYLLKGGKRWLTPARKATVMKIPTPTTPRQVREFLGTAGFCRLWIPGFASLAAPLYPLTRPKVPFTWTEAHQEAFGRIKEALLSAPALALPDLTKPFALYVDEKEGVARGVLTQTLGPWRRPVAYLSKKLDPVASGWPTCLKAIAAVALLLKDADKLTLGQNVLVIAPHNLESIVRQPPDRWMTNARMTHYQSLLLNERVSFAPPAILNPATLLPVESDDTPIHICSEILAEETGTRPDLRDQPLPGVPAWYTDGSSFIMDGRRQAGAAIVDNKRTVWASNLPEGTSAQKAELIALTQALRLAEGKSINIYTDSRYAFATAHVHGAIYKQRGWLTSAGKDIKNKEEILALLEAIHLPKRVAIIHCPGHQRGTDPVATGNRKADEAAKQAAQSTRILTETTKNAGKRTADGSEFEKRTADGSEFESPKKKAKVE

SEQ ID NO: 1641 - protein, 2127 aa, synthetic construct
MPAAKRVKLDGGDKKYSIGLDIGTNSVGWAVITDEYKVPSKKFKVLGNTDRHSIKKNLIGALLFDSGETAEATRLKRTARRRYTRRKNRICYLQEIFSNEMAKVDDSFFHRLEESFLVEEDKKHERHPIFGNIVDEVAYHEKYPTIYHLRKKLVDSTDKADLRLIYLALAHMIKFRGHFLIEGDLNPDNSDVDKLFIQLVQTYNQLFEENPINASGVDAKAILSARLSKSRRLENLIAQLPGEKKNGLFGNLIALSLGLTPNFKSNFDLAEDAKLQLSKDTYDDDLDNLLAQIGDQYADLFLAAKNLSDAILLSDILRVNTEITKAPLSASMIKRYDEHHQDLTLLKALVRQQLPEKYKEIFFDQSKNGYAGYIDGGASQEEFYKFIKPILEKMDGTEELLVKLNREDLLRKQRTFDNGSIPHQIHLGELHAILRRQEDFYPFLKDNREKIEKILTFRIPYYVGPLARGNSRFAWMTRKSEETITPWNFEEVVDKGASAQSFIERMTNFDKNLPNEKVLPKHSLLYEYFTVYNELTKVKYVTEGMRKPAFLSGEQKKAIVDLLFKTNRKVTVKQLKEDYFKKIECFDSVEISGVEDRFNASLGTYHDLLKIIKDKDFLDNEENEDILEDIVLTLTLFEDREMIEERLKTYAHLFDDKVMKQLKRRRYTGWGRLSRKLINGIRDKQSGKTILDFLKSDGFANRNFMQLIHDDSLTFKEDIQKAQVSGQGDSLHEHIANLAGSPAIKKGILQTVKVVDELVKVMGRHKPENIVIEMARENQTTQKGQKNSRERMKRIEEGIKELGSQILKEHPVENTQLQNEKLYLYYLQNGRDMYVDQELDINRLSDYDVDHIVPQSFLKDDSIDNKVLTRSDKARGKSDNVPSEEVVKKMKNYWRQLLNAKLITQRKFDNLTKAERGGLSELDKAGFIKRQLVETRQITKHVAQILDSRMNTKYDENDKLIREVKVITLKSKLVSDFRKDFQFYKVREINNYHHAHDAYLNAVVGTALIKKYPKLESEFVYGDYKVYDVRKMIAKSEQEIGKATAKYFFYSNIMNFFKTEITLANGEIRKRPLIETNGETGEIVWDKGRDFATVRKVLSMPQVNIVKKTEVQTGGFSKESILPKRNSDKLIARKKDWDPKKYGGFDSPTVAYSVLVVAKVEKGKSKKLKSVKELLGITIMERSSFEKNPIDFLEAKGYKEVKKDLIIKLPKYSLFELENGRKRMLASAGELQKGNELALPSKYVNFLYLASHYEKLKGSPEDNEQKQLFVEQHKHYLDEIIEQISEFSKRVILADANLDKVLSAYNKHRDKPIREQAENIIHLFTLTNLGAPAAFKYFDTTIDRKRYTSTKEVLDATLIHQSITGLYETRIDLSQLGGDGGPAPEAAAKGGSGGLLGRDLLTKLKAQIQFSTEGPQVTWEDRPAMCLVLNLEEEYRLHEKPVPPSIDPSWLQLFPMVWAEKAGMGLANQVPPVVVELKSDASPVAVRQYPMSKEAREGIRPHIQRFLDLGILVPCQSPWNTPLLPVKKPGTNDYRPVQDLREVNKRVQDIHPTVPNPYNLLSSLPPSHTWYSVLDLKDAFFCLKLHPNSQPLFAFEWRDPEKGNTGQLTWTRLPQGFKNSPTLFNEALHRDLASFRALNPQVVMLQYVDDLLVAAPTYRDCKEGTRRLLQELSKLGYRVSAKKAQLCREEVTYLGYLLKGGKRWLTPARKATVMKIPTPTTPRQVREFLGTAGFCRLWIPGFASLAAPLYPLTRPKVPFTWTEAHQEAFGRIKEALLSAPALALPDLTKPFALYVDEKEGVARGVLTQTLGPWRRPVAYLSKKLDPVASGWPTCLKAIAAVALLLKDADKLTLGQNVLVIAPHNLESIVRQPPDRWMTNARMTHYQSLLLNERVSFAPPAILNPATLLPVESDDTPIHICSEILAEETGTRPDLRDQPLPGVPAWYTDGSSFIMDGRRQAGAAIVDNKRTVWASNLPEGTSAQKAELIALTQALRLAEGKSINIYTDSRYAFATAHVHGAIYKQRGWLTSAGKDIKNKEEILALLEAIHLPKRVAIIHCPGHQRGTDPVATGNRKADEAAKQAAQSTRILTETTKNAGKRTADGSEFEKRTADGSEFESPKKKAKVE

SEQ ID NO: 1642 - protein, 2122 aa, synthetic construct
MPAAKRVKLDGGDKKYSIGLDIGTNSVGWAVITDEYKVPSKKFKVLGNTDRHSIKKNLIGALLFDSGETAEATRLKRTARRRYTRRKNRICYLQEIFSNEMAKVDDSFFHRLEESFLVEEDKKHERHPIFGNIVDEVAYHEKYPTIYHLRKKLVDSTDKADLRLIYLALAHMIKFRGHFLIEGDLNPDNSDVDKLFIQLVQTYNQLFEENPINASGVDAKAILSARLSKSRRLENLIAQLPGEKKNGLFGNLIALSLGLTPNFKSNFDLAEDAKLQLSKDTYDDDLDNLLAQIGDQYADLFLAAKNLSDAILLSDILRVNTEITKAPLSASMIKRYDEHHQDLTLLKALVRQQLPEKYKEIFFDQSKNGYAGYIDGGASQEEFYKFIKPILEKMDGTEELLVKLNREDLLRKQRTFDNGSIPHQIHLGELHAILRRQEDFYPFLKDNREKIEKILTFRIPYYVGPLARGNSRFAWMTRKSEETITPWNFEEVVDKGASAQSFIERMTNFDKNLPNEKVLPKHSLLYEYFTVYNELTKVKYVTEGMRKPAFLSGEQKKAIVDLLFKTNRKVTVKQLKEDYFKKIECFDSVEISGVEDRFNASLGTYHDLLKIIKDKDFLDNEENEDILEDIVLTLTLFEDREMIEERLKTYAHLFDDKVMKQLKRRRYTGWGRLSRKLINGIRDKQSGKTILDFLKSDGFANRNFMQLIHDDSLTFKEDIQKAQVSGQGDSLHEHIANLAGSPAIKKGILQTVKVVDELVKVMGRHKPENIVIEMARENQTTQKGQKNSRERMKRIEEGIKELGSQILKEHPVENTQLQNEKLYLYYLQNGRDMYVDQELDINRLSDYDVDHIVPQSFLKDDSIDNKVLTRSDKARGKSDNVPSEEVVKKMKNYWRQLLNAKLITQRKFDNLTKAERGGLSELDKAGFIKRQLVETRQITKHVAQILDSRMNTKYDENDKLIREVKVITLKSKLVSDFRKDFQFYKVREINNYHHAHDAYLNAVVGTALIKKYPKLESEFVYGDYKVYDVRKMIAKSEQEIGKATAKYFFYSNIMNFFKTEITLANGEIRKRPLIETNGETGEIVWDKGRDFATVRKVLSMPQVNIVKKTEVQTGGFSKESILPKRNSDKLIARKKDWDPKKYGGFDSPTVAYSVLVVAKVEKGKSKKLKSVKELLGITIMERSSFEKNPIDFLEAKGYKEVKKDLIIKLPKYSLFELENGRKRMLASAGELQKGNELALPSKYVNFLYLASHYEKLKGSPEDNEQKQLFVEQHKHYLDEIIEQISEFSKRVILADANLDKVLSAYNKHRDKPIREQAENIIHLFTLTNLGAPAAFKYFDTTIDRKRYTSTKEVLDATLIHQSITGLYETRIDLSQLGGDGGGGGGGSGGLLGRDLLTKLKAQIQFSTEGPQVTWEDRPAMCLVLNLEEEYRLHEKPVPPSIDPSWLQLFPMVWAEKAGMGLANQVPPVVVELKSDASPVAVRQYPMSKEAREGIRPHIQRFLDLGILVPCQSPWNTPLLPVKKPGTNDYRPVQDLREVNKRVQDIHPTVPNPYNLLSSLPPSHTWYSVLDLKDAFFCLKLHPNSQPLFAFEWRDPEKGNTGQLTWTRLPQGFKNSPTLFNEALHRDLASFRALNPQVVMLQYVDDLLVAAPTYRDCKEGTRRLLQELSKLGYRVSAKKAQLCREEVTYLGYLLKGGKRWLTPARKATVMKIPTPTTPRQVREFLGTAGFCRLWIPGFASLAAPLYPLTRPKVPFTWTEAHQEAFGRIKEALLSAPALALPDLTKPFALYVDEKEGVARGVLTQTLGPWRRPVAYLSKKLDPVASGWPTCLKAIAAVALLLKDADKLTLGQNVLVIAPHNLESIVRQPPDRWMTNARMTHYQSLLLNERVSFAPPAILNPATLLPVESDDTPIHICSEILAEETGTRPDLRDQPLPGVPAWYTDGSSFIMDGRRQAGAAIVDNKRTVWASNLPEGTSAQKAELIALTQALRLAEGKSINIYTDSRYAFATAHVHGAIYKQRGWLTSAGKDIKNKEEILALLEAIHLPKRVAIIHCPGHQRGTDPVATGNRKADEAAKQAAQSTRILTETTKNAGKRTADGSEFEKRTADGSEFESPKKKAKVE

SEQ ID NO: 1643 - protein, 2121 aa, synthetic construct
MPAAKRVKLDGGDKKYSIGLDIGTNSVGWAVITDEYKVPSKKFKVLGNTDRHSIKKNLIGALLFDSGETAEATRLKRTARRRYTRRKNRICYLQEIFSNEMAKVDDSFFHRLEESFLVEEDKKHERHPIFGNIVDEVAYHEKYPTIYHLRKKLVDSTDKADLRLIYLALAHMIKFRGHFLIEGDLNPDNSDVDKLFIQLVQTYNQLFEENPINASGVDAKAILSARLSKSRRLENLIAQLPGEKKNGLFGNLIALSLGLTPNFKSNFDLAEDAKLQLSKDTYDDDLDNLLAQIGDQYADLFLAAKNLSDAILLSDILRVNTEITKAPLSASMIKRYDEHHQDLTLLKALVRQQLPEKYKEIFFDQSKNGYAGYIDGGASQEEFYKFIKPILEKMDGTEELLVKLNREDLLRKQRTFDNGSIPHQIHLGELHAILRRQEDFYPFLKDNREKIEKILTFRIPYYVGPLARGNSRFAWMTRKSEETITPWNFEEVVDKGASAQSFIERMTNFDKNLPNEKVLPKHSLLYEYFTVYNELTKVKYVTEGMRKPAFLSGEQKKAIVDLLFKTNRKVTVKQLKEDYFKKIECFDSVEISGVEDRFNASLGTYHDLLKIIKDKDFLDNEENEDILEDIVLTLTLFEDREMIEERLKTYAHLFDDKVMKQLKRRRYTGWGRLSRKLINGIRDKQSGKTILDFLKSDGFANRNFMQLIHDDSLTFKEDIQKAQVSGQGDSLHEHIANLAGSPAIKKGILQTVKVVDELVKVMGRHKPENIVIEMARENQTTQKGQKNSRERMKRIEEGIKELGSQILKEHPVENTQLQNEKLYLYYLQNGRDMYVDQELDINRLSDYDVDHIVPQSFLKDDSIDNKVLTRSDKARGKSDNVPSEEVVKKMKNYWRQLLNAKLITQRKFDNLTKAERGGLSELDKAGFIKRQLVETRQITKHVAQILDSRMNTKYDENDKLIREVKVITLKSKLVSDFRKDFQFYKVREINNYHHAHDAYLNAVVGTALIKKYPKLESEFVYGDYKVYDVRKMIAKSEQEIGKATAKYFFYSNIMNFFKTEITLANGEIRKRPLIETNGETGEIVWDKGRDFATVRKVLSMPQVNIVKKTEVQTGGFSKESILPKRNSDKLIARKKDWDPKKYGGFDSPTVAYSVLVVAKVEKGKSKKLKSVKELLGITIMERSSFEKNPIDFLEAKGYKEVKKDLIIKLPKYSLFELENGRKRMLASAGELQKGNELALPSKYVNFLYLASHYEKLKGSPEDNEQKQLFVEQHKHYLDEIIEQISEFSKRVILADANLDKVLSAYNKHRDKPIREQAENIIHLFTLTNLGAPAAFKYFDTTIDRKRYTSTKEVLDATLIHQSITGLYETRIDLSQLGGDGGGGGGGGGLLGRDLLTKLKAQIQFSTEGPQVTWEDRPAMCLVLNLEEEYRLHEKPVPPSIDPSWLQLFPMVWAEKAGMGLANQVPPVVVELKSDASPVAVRQYPMSKEAREGIRPHIQRFLDLGILVPCQSPWNTPLLPVKKPGTNDYRPVQDLREVNKRVQDIHPTVPNPYNLLSSLPPSHTWYSVLDLKDAFFCLKLHPNSQPLFAFEWRDPEKGNTGQLTWTRLPQGFKNSPTLFNEALHRDLASFRALNPQVVMLQYVDDLLVAAPTYRDCKEGTRRLLQELSKLGYRVSAKKAQLCREEVTYLGYLLKGGKRWLTPARKATVMKIPTPTTPRQVREFLGTAGFCRLWIPGFASLAAPLYPLTRPKVPFTWTEAHQEAFGRIKEALLSAPALALPDLTKPFALYVDEKEGVARGVLTQTLGPWRRPVAYLSKKLDPVASGWPTCLKAIAAVALLLKDADKLTLGQNVLVIAPHNLESIVRQPPDRWMTNARMTHYQSLLLNERVSFAPPAILNPATLLPVESDDTPIHICSEILAEETGTRPDLRDQPLPGVPAWYTDGSSFIMDGRRQAGAAIVDNKRTVWASNLPEGTSAQKAELIALTQALRLAEGKSINIYTDSRYAFATAHVHGAIYKQRGWLTSAGKDIKNKEEILALLEAIHLPKRVAIIHCPGHQRGTDPVATGNRKADEAAKQAAQSTRILTETTKNAGKRTADGSEFEKRTADGSEFESPKKKAKVE

SEQ ID NO: 1644 - protein, 2127 aa, synthetic construct
MPAAKRVKLDGGDKKYSIGLDIGTNSVGWAVITDEYKVPSKKFKVLGNTDRHSIKKNLIGALLFDSGETAEATRLKRTARRRYTRRKNRICYLQEIFSNEMAKVDDSFFHRLEESFLVEEDKKHERHPIFGNIVDEVAYHEKYPTIYHLRKKLVDSTDKADLRLIYLALAHMIKFRGHFLIEGDLNPDNSDVDKLFIQLVQTYNQLFEENPINASGVDAKAILSARLSKSRRLENLIAQLPGEKKNGLFGNLIALSLGLTPNFKSNFDLAEDAKLQLSKDTYDDDLDNLLAQIGDQYADLFLAAKNLSDAILLSDILRVNTEITKAPLSASMIKRYDEHHQDLTLLKALVRQQLPEKYKEIFFDQSKNGYAGYIDGGASQEEFYKFIKPILEKMDGTEELLVKLNREDLLRKQRTFDNGSIPHQIHLGELHAILRRQEDFYPFLKDNREKIEKILTFRIPYYVGPLARGNSRFAWMTRKSEETITPWNFEEVVDKGASAQSFIERMTNFDKNLPNEKVLPKHSLLYEYFTVYNELTKVKYVTEGMRKPAFLSGEQKKAIVDLLFKTNRKVTVKQLKEDYFKKIECFDSVEISGVEDRFNASLGTYHDLLKIIKDKDFLDNEENEDILEDIVLTLTLFEDREMIEERLKTYAHLFDDKVMKQLKRRRYTGWGRLSRKLINGIRDKQSGKTILDFLKSDGFANRNFMQLIHDDSLTFKEDIQKAQVSGQGDSLHEHIANLAGSPAIKKGILQTVKVVDELVKVMGRHKPENIVIEMARENQTTQKGQKNSRERMKRIEEGIKELGSQILKEHPVENTQLQNEKLYLYYLQNGRDMYVDQELDINRLSDYDVDHIVPQSFLKDDSIDNKVLTRSDKARGKSDNVPSEEVVKKMKNYWRQLLNAKLITQRKFDNLTKAERGGLSELDKAGFIKRQLVETRQITKHVAQILDSRMNTKYDENDKLIREVKVITLKSKLVSDFRKDFQFYKVREINNYHHAHDAYLNAVVGTALIKKYPKLESEFVYGDYKVYDVRKMIAKSEQEIGKATAKYFFYSNIMNFFKTEITLANGEIRKRPLIETNGETGEIVWDKGRDFATVRKVLSMPQVNIVKKTEVQTGGFSKESILPKRNSDKLIARKKDWDPKKYGGFDSPTVAYSVLVVAKVEKGKSKKLKSVKELLGITIMERSSFEKNPIDFLEAKGYKEVKKDLIIKLPKYSLFELENGRKRMLASAGELQKGNELALPSKYVNFLYLASHYEKLKGSPEDNEQKQLFVEQHKHYLDEIIEQISEFSKRVILADANLDKVLSAYNKHRDKPIREQAENIIHLFTLTNLGAPAAFKYFDTTIDRKRYTSTKEVLDATLIHQSITGLYETRIDLSQLGGDGGGGSGSSEAAAKGGLLGRDLLTKLKAQIQFSTEGPQVTWEDRPAMCLVLNLEEEYRLHEKPVPPSIDPSWLQLFPMVWAEKAGMGLANQVPPVVVELKSDASPVAVRQYPMSKEAREGIRPHIQRFLDLGILVPCQSPWNTPLLPVKKPGTNDYRPVQDLREVNKRVQDIHPTVPNPYNLLSSLPPSHTWYSVLDLKDAFFCLKLHPNSQPLFAFEWRDPEKGNTGQLTWTRLPQGFKNSPTLFNEALHRDLASFRALNPQVVMLQYVDDLLVAAPTYRDCKEGTRRLLQELSKLGYRVSAKKAQLCREEVTYLGYLLKGGKRWLTPARKATVMKIPTPTTPRQVREFLGTAGFCRLWIPGFASLAAPLYPLTRPKVPFTWTEAHQEAFGRIKEALLSAPALALPDLTKPFALYVDEKEGVARGVLTQTLGPWRRPVAYLSKKLDPVASGWPTCLKAIAAVALLLKDADKLTLGQNVLVIAPHNLESIVRQPPDRWMTNARMTHYQSLLLNERVSFAPPAILNPATLLPVESDDTPIHICSEILAEETGTRPDLRDQPLPGVPAWYTDGSSFIMDGRRQAGAAIVDNKRTVWASNLPEGTSAQKAELIALTQALRLAEGKSINIYTDSRYAFATAHVHGAIYKQRGWLTSAGKDIKNKEEILALLEAIHLPKRVAIIHCPGHQRGTDPVATGNRKADEAAKQAAQSTRILTETTKNAGKRTADGSEFEKRTADGSEFESPKKKAKVE

SEQ ID NO: 1645 - protein, 2127 aa, synthetic construct
MPAAKRVKLDGGDKKYSIGLDIGTNSVGWAVITDEYKVPSKKFKVLGNTDRHSIKKNLIGALLFDSGETAEATRLKRTARRRYTRRKNRICYLQEIFSNEMAKVDDSFFHRLEESFLVEEDKKHERHPIFGNIVDEVAYHEKYPTIYHLRKKLVDSTDKADLRLIYLALAHMIKFRGHFLIEGDLNPDNSDVDKLFIQLVQTYNQLFEENPINASGVDAKAILSARLSKSRRLENLIAQLPGEKKNGLFGNLIALSLGLTPNFKSNFDLAEDAKLQLSKDTYDDDLDNLLAQIGDQYADLFLAAKNLSDAILLSDILRVNTEITKAPLSASMIKRYDEHHQDLTLLKALVRQQLPEKYKEIFFDQSKNGYAGYIDGGASQEEFYKFIKPILEKMDGTEELLVKLNREDLLRKQRTFDNGSIPHQIHLGELHAILRRQEDFYPFLKDNREKIEKILTFRIPYYVGPLARGNSRFAWMTRKSEETITPWNFEEVVDKGASAQSFIERMTNFDKNLPNEKVLPKHSLLYEYFTVYNELTKVKYVTEGMRKPAFLSGEQKKAIVDLLFKTNRKVTVKQLKEDYFKKIECFDSVEISGVEDRFNASLGTYHDLLKIIKDKDFLDNEENEDILEDIVLTLTLFEDREMIEERLKTYAHLFDDKVMKQLKRRRYTGWGRLSRKLINGIRDKQSGKTILDFLKSDGFANRNFMQLIHDDSLTFKEDIQKAQVSGQGDSLHEHIANLAGSPAIKKGILQTVKVVDELVKVMGRHKPENIVIEMARENQTTQKGQKNSRERMKRIEEGIKELGSQILKEHPVENTQLQNEKLYLYYLQNGRDMYVDQELDINRLSDYDVDHIVPQSFLKDDSIDNKVLTRSDKARGKSDNVPSEEVVKKMKNYWRQLLNAKLITQRKFDNLTKAERGGLSELDKAGFIKRQLVETRQITKHVAQILDSRMNTKYDENDKLIREVKVITLKSKLVSDFRKDFQFYKVREINNYHHAHDAYLNAVVGTALIKKYPKLESEFVYGDYKVYDVRKMIAKSEQEIGKATAKYFFYSNIMNFFKTEITLANGEIRKRPLIETNGETGEIVWDKGRDFATVRKVLSMPQVNIVKKTEVQTGGFSKESILPKRNSDKLIARKKDWDPKKYGGFDSPTVAYSVLVVAKVEKGKSKKLKSVKELLGITIMERSSFEKNPIDFLEAKGYKEVKKDLIIKLPKYSLFELENGRKRMLASAGELQKGNELALPSKYVNFLYLASHYEKLKGSPEDNEQKQLFVEQHKHYLDEIIEQISEFSKRVILADANLDKVLSAYNKHRDKPIREQAENIIHLFTLTNLGAPAAFKYFDTTIDRKRYTSTKEVLDATLIHQSITGLYETRIDLSQLGGDGGEAAAKGGSGSSGGLLGRDLLTKLKAQIQFSTEGPQVTWEDRPAMCLVLNLEEEYRLHEKPVPPSIDPSWLQLFPMVWAEKAGMGLANQVPPVVVELKSDASPVAVRQYPMSKEAREGIRPHIQRFLDLGILVPCQSPWNTPLLPVKKPGTNDYRPVQDLREVNKRVQDIHPTVPNPYNLLSSLPPSHTWYSVLDLKDAFFCLKLHPNSQPLFAFEWRDPEKGNTGQLTWTRLPQGFKNSPTLFNEALHRDLASFRALNPQVVMLQYVDDLLVAAPTYRDCKEGTRRLLQELSKLGYRVSAKKAQLCREEVTYLGYLLKGGKRWLTPARKATVMKIPTPTTPRQVREFLGTAGFCRLWIPGFASLAAPLYPLTRPKVPFTWTEAHQEAFGRIKEALLSAPALALPDLTKPFALYVDEKEGVARGVLTQTLGPWRRPVAYLSKKLDPVASGWPTCLKAIAAVALLLKDADKLTLGQNVLVIAPHNLESIVRQPPDRWMTNARMTHYQSLLLNERVSFAPPAILNPATLLPVESDDTPIHICSEILAEETGTRPDLRDQPLPGVPAWYTDGSSFIMDGRRQAGAAIVDNKRTVWASNLPEGTSAQKAELIALTQALRLAEGKSINIYTDSRYAFATAHVHGAIYKQRGWLTSAGKDIKNKEEILALLEAIHLPKRVAIIHCPGHQRGTDPVATGNRKADEAAKQAAQSTRILTETTKNAGKRTADGSEFEKRTADGSEFESPKKKAKVE

SEQ ID NO: 1646 - protein, 2127 aa, synthetic construct
MPAAKRVKLDGGDKKYSIGLDIGTNSVGWAVITDEYKVPSKKFKVLGNTDRHSIKKNLIGALLFDSGETAEATRLKRTARRRYTRRKNRICYLQEIFSNEMAKVDDSFFHRLEESFLVEEDKKHERHPIFGNIVDEVAYHEKYPTIYHLRKKLVDSTDKADLRLIYLALAHMIKFRGHFLIEGDLNPDNSDVDKLFIQLVQTYNQLFEENPINASGVDAKAILSARLSKSRRLENLIAQLPGEKKNGLFGNLIALSLGLTPNFKSNFDLAEDAKLQLSKDTYDDDLDNLLAQIGDQYADLFLAAKNLSDAILLSDILRVNTEITKAPLSASMIKRYDEHHQDLTLLKALVRQQLPEKYKEIFFDQSKNGYAGYIDGGASQEEFYKFIKPILEKMDGTEELLVKLNREDLLRKQRTFDNGSIPHQIHLGELHAILRRQEDFYPFLKDNREKIEKILTFRIPYYVGPLARGNSRFAWMTRKSEETITPWNFEEVVDKGASAQSFIERMTNFDKNLPNEKVLPKHSLLYEYFTVYNELTKVKYVTEGMRKPAFLSGEQKKAIVDLLFKTNRKVTVKQLKEDYFKKIECFDSVEISGVEDRFNASLGTYHDLLKIIKDKDFLDNEENEDILEDIVLTLTLFEDREMIEERLKTYAHLFDDKVMKQLKRRRYTGWGRLSRKLINGIRDKQSGKTILDFLKSDGFANRNFMQLIHDDSLTFKEDIQKAQVSGQGDSLHEHIANLAGSPAIKKGILQTVKVVDELVKVMGRHKPENIVIEMARENQTTQKGQKNSRERMKRIEEGIKELGSQILKEHPVENTQLQNEKLYLYYLQNGRDMYVDQELDINRLSDYDVDHIVPQSFLKDDSIDNKVLTRSDKARGKSDNVPSEEVVKKMKNYWRQLLNAKLITQRKFDNLTKAERGGLSELDKAGFIKRQLVETRQITKHVAQILDSRMNTKYDENDKLIREVKVITLKSKLVSDFRKDFQFYKVREINNYHHAHDAYLNAVVGTALIKKYPKLESEFVYGDYKVYDVRKMIAKSEQEIGKATAKYFFYSNIMNFFKTEITLANGEIRKRPLIETNGETGEIVWDKGRDFATVRKVLSMPQVNIVKKTEVQTGGFSKESILPKRNSDKLIARKKDWDPKKYGGFDSPTVAYSVLVVAKVEKGKSKKLKSVKELLGITIMERSSFEKNPIDFLEAKGYKEVKKDLIIKLPKYSLFELENGRKRMLASAGELQKGNELALPSKYVNFLYLASHYEKLKGSPEDNEQKQLFVEQHKHYLDEIIEQISEFSKRVILADANLDKVLSAYNKHRDKPIREQAENIIHLFTLTNLGAPAAFKYFDTTIDRKRYTSTKEVLDATLIHQSITGLYETRIDLSQLGGDGGEAAAKGGGGGSGGLLGRDLLTKLKAQIQFSTEGPQVTWEDRPAMCLVLNLEEEYRLHEKPVPPSIDPSWLQLFPMVWAEKAGMGLANQVPPVVVELKSDASPVAVRQYPMSKEAREGIRPHIQRFLDLGILVPCQSPWNTPLLPVKKPGTNDYRPVQDLREVNKRVQDIHPTVPNPYNLLSSLPPSHTWYSVLDLKDAFFCLKLHPNSQPLFAFEWRDPEKGNTGQLTWTRLPQGFKNSPTLFNEALHRDLASFRALNPQVVMLQYVDDLLVAAPTYRDCKEGTRRLLQELSKLGYRVSAKKAQLCREEVTYLGYLLKGGKRWLTPARKATVMKIPTPTTPRQVREFLGTAGFCRLWIPGFASLAAPLYPLTRPKVPFTWTEAHQEAFGRIKEALLSAPALALPDLTKPFALYVDEKEGVARGVLTQTLGPWRRPVAYLSKKLDPVASGWPTCLKAIAAVALLLKDADKLTLGQNVLVIAPHNLESIVRQPPDRWMTNARMTHYQSLLLNERVSFAPPAILNPATLLPVESDDTPIHICSEILAEETGTRPDLRDQPLPGVPAWYTDGSSFIMDGRRQAGAAIVDNKRTVWASNLPEGTSAQKAELIALTQALRLAEGKSINIYTDSRYAFATAHVHGAIYKQRGWLTSAGKDIKNKEEILALLEAIHLPKRVAIIHCPGHQRGTDPVATGNRKADEAAKQAAQSTRILTETTKNAGKRTADGSEFEKRTADGSEFESPKKKAKVE

SEQ ID NO: 1647 - protein, 2127 aa, synthetic construct
MPAAKRVKLDGGDKKYSIGLDIGTNSVGWAVITDEYKVPSKKFKVLGNTDRHSIKKNLIGALLFDSGETAEATRLKRTARRRYTRRKNRICYLQEIFSNEMAKVDDSFFHRLEESFLVEEDKKHERHPIFGNIVDEVAYHEKYPTIYHLRKKLVDSTDKADLRLIYLALAHMIKFRGHFLIEGDLNPDNSDVDKLFIQLVQTYNQLFEENPINASGVDAKAILSARLSKSRRLENLIAQLPGEKKNGLFGNLIALSLGLTPNFKSNFDLAEDAKLQLSKDTYDDDLDNLLAQIGDQYADLFLAAKNLSDAILLSDILRVNTEITKAPLSASMIKRYDEHHQDLTLLKALVRQQLPEKYKEIFFDQSKNGYAGYIDGGASQEEFYKFIKPILEKMDGTEELLVKLNREDLLRKQRTFDNGSIPHQIHLGELHAILRRQEDFYPFLKDNREKIEKILTFRIPYYVGPLARGNSRFAWMTRKSEETITPWNFEEVVDKGASAQSFIERMTNFDKNLPNEKVLPKHSLLYEYFTVYNELTKVKYVTEGMRKPAFLSGEQKKAIVDLLFKTNRKVTVKQLKEDYFKKIECFDSVEISGVEDRFNASLGTYHDLLKIIKDKDFLDNEENEDILEDIVLTLTLFEDREMIEERLKTYAHLFDDKVMKQLKRRRYTGWGRLSRKLINGIRDKQSGKTILDFLKSDGFANRNFMQLIHDDSLTFKEDIQKAQVSGQGDSLHEHIANLAGSPAIKKGILQTVKVVDELVKVMGRHKPENIVIEMARENQTTQKGQKNSRERMKRIEEGIKELGSQILKEHPVENTQLQNEKLYLYYLQNGRDMYVDQELDINRLSDYDVDHIVPQSFLKDDSIDNKVLTRSDKARGKSDNVPSEEVVKKMKNYWRQLLNAKLITQRKFDNLTKAERGGLSELDKAGFIKRQLVETRQITKHVAQILDSRMNTKYDENDKLIREVKVITLKSKLVSDFRKDFQFYKVREINNYHHAHDAYLNAVVGTALIKKYPKLESEFVYGDYKVYDVRKMIAKSEQEIGKATAKYFFYSNIMNFFKTEITLANGEIRKRPLIETNGETGEIVWDKGRDFATVRKVLSMPQVNIVKKTEVQTGGFSKESILPKRNSDKLIARKKDWDPKKYGGFDSPTVAYSVLVVAKVEKGKSKKLKSVKELLGITIMERSSFEKNPIDFLEAKGYKEVKKDLIIKLPKYSLFELENGRKRMLASAGELQKGNELALPSKYVNFLYLASHYEKLKGSPEDNEQKQLFVEQHKHYLDEIIEQISEFSKRVILADANLDKVLSAYNKHRDKPIREQAENIIHLFTLTNLGAPAAFKYFDTTIDRKRYTSTKEVLDATLIHQSITGLYETRIDLSQLGGDGGGGSEAAAKGGGGGLLGRDLLTKLKAQIQFSTEGPQVTWEDRPAMCLVLNLEEEYRLHEKPVPPSIDPSWLQLFPMVWAEKAGMGLANQVPPVVVELKSDASPVAVRQYPMSKEAREGIRPHIQRFLDLGILVPCQSPWNTPLLPVKKPGTNDYRPVQDLREVNKRVQDIHPTVPNPYNLLSSLPPSHTWYSVLDLKDAFFCLKLHPNSQPLFAFEWRDPEKGNTGQLTWTRLPQGFKNSPTLFNEALHRDLASFRALNPQVVMLQYVDDLLVAAPTYRDCKEGTRRLLQELSKLGYRVSAKKAQLCREEVTYLGYLLKGGKRWLTPARKATVMKIPTPTTPRQVREFLGTAGFCRLWIPGFASLAAPLYPLTRPKVPFTWTEAHQEAFGRIKEALLSAPALALPDLTKPFALYVDEKEGVARGVLTQTLGPWRRPVAYLSKKLDPVASGWPTCLKAIAAVALLLKDADKLTLGQNVLVIAPHNLESIVRQPPDRWMTNARMTHYQSLLLNERVSFAPPAILNPATLLPVESDDTPIHICSEILAEETGTRPDLRDQPLPGVPAWYTDGSSFIMDGRRQAGAAIVDNKRTVWASNLPEGTSAQKAELIALTQALRLAEGKSINIYTDSRYAFATAHVHGAIYKQRGWLTSAGKDIKNKEEILALLEAIHLPKRVAIIHCPGHQRGTDPVATGNRKADEAAKQAAQSTRILTETTKNAGKRTADGSEFEKRTADGSEFESPKKKAKVE

SEQ ID NO: 1648 - protein, 2125 aa, synthetic construct
MPAAKRVKLDGGDKKYSIGLDIGTNSVGWAVITDEYKVPSKKFKVLGNTDRHSIKKNLIGALLFDSGETAEATRLKRTARRRYTRRKNRICYLQEIFSNEMAKVDDSFFHRLEESFLVEEDKKHERHPIFGNIVDEVAYHEKYPTIYHLRKKLVDSTDKADLRLIYLALAHMIKFRGHFLIEGDLNPDNSDVDKLFIQLVQTYNQLFEENPINASGVDAKAILSARLSKSRRLENLIAQLPGEKKNGLFGNLIALSLGLTPNFKSNFDLAEDAKLQLSKDTYDDDLDNLLAQIGDQYADLFLAAKNLSDAILLSDILRVNTEITKAPLSASMIKRYDEHHQDLTLLKALVRQQLPEKYKEIFFDQSKNGYAGYIDGGASQEEFYKFIKPILEKMDGTEELLVKLNREDLLRKQRTFDNGSIPHQIHLGELHAILRRQEDFYPFLKDNREKIEKILTFRIPYYVGPLARGNSRFAWMTRKSEETITPWNFEEVVDKGASAQSFIERMTNFDKNLPNEKVLPKHSLLYEYFTVYNELTKVKYVTEGMRKPAFLSGEQKKAIVDLLFKTNRKVTVKQLKEDYFKKIECFDSVEISGVEDRFNASLGTYHDLLKIIKDKDFLDNEENEDILEDIVLTLTLFEDREMIEERLKTYAHLFDDKVMKQLKRRRYTGWGRLSRKLINGIRDKQSGKTILDFLKSDGFANRNFMQLIHDDSLTFKEDIQKAQVSGQGDSLHEHIANLAGSPAIKKGILQTVKVVDELVKVMGRHKPENIVIEMARENQTTQKGQKNSRERMKRIEEGIKELGSQILKEHPVENTQLQNEKLYLYYLQNGRDMYVDQELDINRLSDYDVDHIVPQSFLKDDSIDNKVLTRSDKARGKSDNVPSEEVVKKMKNYWRQLLNAKLITQRKFDNLTKAERGGLSELDKAGFIKRQLVETRQITKHVAQILDSRMNTKYDENDKLIREVKVITLKSKLVSDFRKDFQFYKVREINNYHHAHDAYLNAVVGTALIKKYPKLESEFVYGDYKVYDVRKMIAKSEQEIGKATAKYFFYSNIMNFFKTEITLANGEIRKRPLIETNGETGEIVWDKGRDFATVRKVLSMPQVNIVKKTEVQTGGFSKESILPKRNSDKLIARKKDWDPKKYGGFDSPTVAYSVLVVAKVEKGKSKKLKSVKELLGITIMERSSFEKNPIDFLEAKGYKEVKKDLIIKLPKYSLFELENGRKRMLASAGELQKGNELALPSKYVNFLYLASHYEKLKGSPEDNEQKQLFVEQHKHYLDEIIEQISEFSKRVILADANLDKVLSAYNKHRDKPIREQAENIIHLFTLTNLGAPAAFKYFDTTIDRKRYTSTKEVLDATLIHQSITGLYETRIDLSQLGGDGGGGSPAPGSSGGLLGRDLLTKLKAQIQFSTEGPQVTWEDRPAMCLVLNLEEEYRLHEKPVPPSIDPSWLQLFPMVWAEKAGMGLANQVPPVVVELKSDASPVAVRQYPMSKEAREGIRPHIQRFLDLGILVPCQSPWNTPLLPVKKPGTNDYRPVQDLREVNKRVQDIHPTVPNPYNLLSSLPPSHTWYSVLDLKDAFFCLKLHPNSQPLFAFEWRDPEKGNTGQLTWTRLPQGFKNSPTLFNEALHRDLASFRALNPQVVMLQYVDDLLVAAPTYRDCKEGTRRLLQELSKLGYRVSAKKAQLCREEVTYLGYLLKGGKRWLTPARKATVMKIPTPTTPRQVREFLGTAGFCRLWIPGFASLAAPLYPLTRPKVPFTWTEAHQEAFGRIKEALLSAPALALPDLTKPFALYVDEKEGVARGVLTQTLGPWRRPVAYLSKKLDPVASGWPTCLKAIAAVALLLKDADKLTLGQNVLVIAPHNLESIVRQPPDRWMTNARMTHYQSLLLNERVSFAPPAILNPATLLPVESDDTPIHICSEILAEETGTRPDLRDQPLPGVPAWYTDGSSFIMDGRRQAGAAIVDNKRTVWASNLPEGTSAQKAELIALTQALRLAEGKSINIYTDSRYAFATAHVHGAIYKQRGWLTSAGKDIKNKEEILALLEAIHLPKRVAIIHCPGHQRGTDPVATGNRKADEAAKQAAQSTRILTETTKNAGKRTADGSEFEKRTADGSEFESPKKKAKVE

SEQ ID NO: 1649 - protein, 2149 aa, synthetic construct
MPAAKRVKLDGGDKKYSIGLDIGTNSVGWAVITDEYKVPSKKFKVLGNTDRHSIKKNLIGALLFDSGETAEATRLKRTARRRYTRRKNRICYLQEIFSNEMAKVDDSFFHRLEESFLVEEDKKHERHPIFGNIVDEVAYHEKYPTIYHLRKKLVDSTDKADLRLIYLALAHMIKFRGHFLIEGDLNPDNSDVDKLFIQLVQTYNQLFEENPINASGVDAKAILSARLSKSRRLENLIAQLPGEKKNGLFGNLIALSLGLTPNFKSNFDLAEDAKLQLSKDTYDDDLDNLLAQIGDQYADLFLAAKNLSDAILLSDILRVNTEITKAPLSASMIKRYDEHHQDLTLLKALVRQQLPEKYKEIFFDQSKNGYAGYIDGGASQEEFYKFIKPILEKMDGTEELLVKLNREDLLRKQRTFDNGSIPHQIHLGELHAILRRQEDFYPFLKDNREKIEKILTFRIPYYVGPLARGNSRFAWMTRKSEETITPWNFEEVVDKGASAQSFIERMTNFDKNLPNEKVLPKHSLLYEYFTVYNELTKVKYVTEGMRKPAFLSGEQKKAIVDLLFKTNRKVTVKQLKEDYFKKIECFDSVEISGVEDRFNASLGTYHDLLKIIKDKDFLDNEENEDILEDIVLTLTLFEDREMIEERLKTYAHLFDDKVMKQLKRRRYTGWGRLSRKLINGIRDKQSGKTILDFLKSDGFANRNFMQLIHDDSLTFKEDIQKAQVSGQGDSLHEHIANLAGSPAIKKGILQTVKVVDELVKVMGRHKPENIVIEMARENQTTQKGQKNSRERMKRIEEGIKELGSQILKEHPVENTQLQNEKLYLYYLQNGRDMYVDQELDINRLSDYDVDHIVPQSFLKDDSIDNKVLTRSDKARGKSDNVPSEEVVKKMKNYWRQLLNAKLITQRKFDNLTKAERGGLSELDKAGFIKRQLVETRQITKHVAQILDSRMNTKYDENDKLIREVKVITLKSKLVSDFRKDFQFYKVREINNYHHAHDAYLNAVVGTALIKKYPKLESEFVYGDYKVYDVRKMIAKSEQEIGKATAKYFFYSNIMNFFKTEITLANGEIRKRPLIETNGETGEIVWDKGRDFATVRKVLSMPQVNIVKKTEVQTGGFSKESILPKRNSDKLIARKKDWDPKKYGGFDSPTVAYSVLVVAKVEKGKSKKLKSVKELLGITIMERSSFEKNPIDFLEAKGYKEVKKDLIIKLPKYSLFELENGRKRMLASAGELQKGNELALPSKYVNFLYLASHYEKLKGSPEDNEQKQLFVEQHKHYLDEIIEQISEFSKRVILADANLDKVLSAYNKHRDKPIREQAENIIHLFTLTNLGAPAAFKYFDTTIDRKRYTSTKEVLDATLIHQSITGLYETRIDLSQLGGDGGSGGSSGGSSGSETPGTSESATPESSGGSSGGSSGGLLGRDLLTKLKAQIQFSTEGPQVTWEDRPAMCLVLNLEEEYRLHEKPVPPSIDPSWLQLFPMVWAEKAGMGLANQVPPVVVELKSDASPVAVRQYPMSKEAREGIRPHIQRFLDLGILVPCQSPWNTPLLPVKKPGTNDYRPVQDLREVNKRVQDIHPTVPNPYNLLSSLPPSHTWYSVLDLKDAFFCLKLHPNSQPLFAFEWRDPEKGNTGQLTWTRLPQGFKNSPTLFNEALHRDLASFRALNPQVVMLQYVDDLLVAAPTYRDCKEGTRRLLQELSKLGYRVSAKKAQLCREEVTYLGYLLKGGKRWLTPARKATVMKIPTPTTPRQVREFLGTAGFCRLWIPGFASLAAPLYPLTRPKVPFTWTEAHQEAFGRIKEALLSAPALALPDLTKPFALYVDEKEGVARGVLTQTLGPWRRPVAYLSKKLDPVASGWPTCLKAIAAVALLLKDADKLTLGQNVLVIAPHNLESIVRQPPDRWMTNARMTHYQSLLLNERVSFAPPAILNPATLLPVESDDTPIHICSEILAEETGTRPDLRDQPLPGVPAWYTDGSSFIMDGRRQAGAAIVDNKRTVWASNLPEGTSAQKAELIALTQALRLAEGKSINIYTDSRYAFATAHVHGAIYKQRGWLTSAGKDIKNKEEILALLEAIHLPKRVAIIHCPGHQRGTDPVATGNRKADEAAKQAAQSTRILTETTKNAGKRTADGSEFEKRTADGSEFESPKKKAKVE

SEQ ID NO: 1650 - protein, 2121 aa, synthetic construct
MPAAKRVKLDGGDKKYSIGLDIGTNSVGWAVITDEYKVPSKKFKVLGNTDRHSIKKNLIGALLFDSGETAEATRLKRTARRRYTRRKNRICYLQEIFSNEMAKVDDSFFHRLEESFLVEEDKKHERHPIFGNIVDEVAYHEKYPTIYHLRKKLVDSTDKADLRLIYLALAHMIKFRGHFLIEGDLNPDNSDVDKLFIQLVQTYNQLFEENPINASGVDAKAILSARLSKSRRLENLIAQLPGEKKNGLFGNLIALSLGLTPNFKSNFDLAEDAKLQLSKDTYDDDLDNLLAQIGDQYADLFLAAKNLSDAILLSDILRVNTEITKAPLSASMIKRYDEHHQDLTLLKALVRQQLPEKYKEIFFDQSKNGYAGYIDGGASQEEFYKFIKPILEKMDGTEELLVKLNREDLLRKQRTFDNGSIPHQIHLGELHAILRRQEDFYPFLKDNREKIEKILTFRIPYYVGPLARGNSRFAWMTRKSEETITPWNFEEVVDKGASAQSFIERMTNFDKNLPNEKVLPKHSLLYEYFTVYNELTKVKYVTEGMRKPAFLSGEQKKAIVDLLFKTNRKVTVKQLKEDYFKKIECFDSVEISGVEDRFNASLGTYHDLLKIIKDKDFLDNEENEDILEDIVLTLTLFEDREMIEERLKTYAHLFDDKVMKQLKRRRYTGWGRLSRKLINGIRDKQSGKTILDFLKSDGFANRNFMQLIHDDSLTFKEDIQKAQVSGQGDSLHEHIANLAGSPAIKKGILQTVKVVDELVKVMGRHKPENIVIEMARENQTTQKGQKNSRERMKRIEEGIKELGSQILKEHPVENTQLQNEKLYLYYLQNGRDMYVDQELDINRLSDYDVDHIVPQSFLKDDSIDNKVLTRSDKARGKSDNVPSEEVVKKMKNYWRQLLNAKLITQRKFDNLTKAERGGLSELDKAGFIKRQLVETRQITKHVAQILDSRMNTKYDENDKLIREVKVITLKSKLVSDFRKDFQFYKVREINNYHHAHDAYLNAVVGTALIKKYPKLESEFVYGDYKVYDVRKMIAKSEQEIGKATAKYFFYSNIMNFFKTEITLANGEIRKRPLIETNGETGEIVWDKGRDFATVRKVLSMPQVNIVKKTEVQTGGFSKESILPKRNSDKLIARKKDWDPKKYGGFDSPTVAYSVLVVAKVEKGKSKKLKSVKELLGITIMERSSFEKNPIDFLEAKGYKEVKKDLIIKLPKYSLFELENGRKRMLASAGELQKGNELALPSKYVNFLYLASHYEKLKGSPEDNEQKQLFVEQHKHYLDEIIEQISEFSKRVILADANLDKVLSAYNKHRDKPIREQAENIIHLFTLTNLGAPAAFKYFDTTIDRKRYTSTKEVLDATLIHQSITGLYETRIDLSQLGGDGGGGGGSGGLLGRDLLTKLKAQIQFSTEGPQVTWEDRPAMCLVLNLEEEYRLHEKPVPPSIDPSWLQLFPMVWAEKAGMGLANQVPPVVVELKSDASPVAVRQYPMSKEAREGIRPHIQRFLDLGILVPCQSPWNTPLLPVKKPGTNDYRPVQDLREVNKRVQDIHPTVPNPYNLLSSLPPSHTWYSVLDLKDAFFCLKLHPNSQPLFAFEWRDPEKGNTGQLTWTRLPQGFKNSPTLFNEALHRDLASFRALNPQVVMLQYVDDLLVAAPTYRDCKEGTRRLLQELSKLGYRVSAKKAQLCREEVTYLGYLLKGGKRWLTPARKATVMKIPTPTTPRQVREFLGTAGFCRLWIPGFASLAAPLYPLTRPKVPFTWTEAHQEAFGRIKEALLSAPALALPDLTKPFALYVDEKEGVARGVLTQTLGPWRRPVAYLSKKLDPVASGWPTCLKAIAAVALLLKDADKLTLGQNVLVIAPHNLESIVRQPPDRWMTNARMTHYQSLLLNERVSFAPPAILNPATLLPVESDDTPIHICSEILAEETGTRPDLRDQPLPGVPAWYTDGSSFIMDGRRQAGAAIVDNKRTVWASNLPEGTSAQKAELIALTQALRLAEGKSINIYTDSRYAFATAHVHGAIYKQRGWLTSAGKDIKNKEEILALLEAIHLPKRVAIIHCPGHQRGTDPVATGNRKADEAAKQAAQSTRILTETTKNAGKRTADGSEFEKRTADGSEFESPKKKAKVE

SEQ ID NO: 1651 - protein, 2125 aa, synthetic construct
MPAAKRVKLDGGDKKYSIGLDIGTNSVGWAVITDEYKVPSKKFKVLGNTDRHSIKKNLIGALLFDSGETAEATRLKRTARRRYTRRKNRICYLQEIFSNEMAKVDDSFFHRLEESFLVEEDKKHERHPIFGNIVDEVAYHEKYPTIYHLRKKLVDSTDKADLRLIYLALAHMIKFRGHFLIEGDLNPDNSDVDKLFIQLVQTYNQLFEENPINASGVDAKAILSARLSKSRRLENLIAQLPGEKKNGLFGNLIALSLGLTPNFKSNFDLAEDAKLQLSKDTYDDDLDNLLAQIGDQYADLFLAAKNLSDAILLSDILRVNTEITKAPLSASMIKRYDEHHQDLTLLKALVRQQLPEKYKEIFFDQSKNGYAGYIDGGASQEEFYKFIKPILEKMDGTEELLVKLNREDLLRKQRTFDNGSIPHQIHLGELHAILRRQEDFYPFLKDNREKIEKILTFRIPYYVGPLARGNSRFAWMTRKSEETITPWNFEEVVDKGASAQSFIERMTNFDKNLPNEKVLPKHSLLYEYFTVYNELTKVKYVTEGMRKPAFLSGEQKKAIVDLLFKTNRKVTVKQLKEDYFKKIECFDSVEISGVEDRFNASLGTYHDLLKIIKDKDFLDNEENEDILEDIVLTLTLFEDREMIEERLKTYAHLFDDKVMKQLKRRRYTGWGRLSRKLINGIRDKQSGKTILDFLKSDGFANRNFMQLIHDDSLTFKEDIQKAQVSGQGDSLHEHIANLAGSPAIKKGILQTVKVVDELVKVMGRHKPENIVIEMARENQTTQKGQKNSRERMKRIEEGIKELGSQILKEHPVENTQLQNEKLYLYYLQNGRDMYVDQELDINRLSDYDVDHIVPQSFLKDDSIDNKVLTRSDKARGKSDNVPSEEVVKKMKNYWRQLLNAKLITQRKFDNLTKAERGGLSELDKAGFIKRQLVETRQITKHVAQILDSRMNTKYDENDKLIREVKVITLKSKLVSDFRKDFQFYKVREINNYHHAHDAYLNAVVGTALIKKYPKLESEFVYGDYKVYDVRKMIAKSEQEIGKATAKYFFYSNIMNFFKTEITLANGEIRKRPLIETNGETGEIVWDKGRDFATVRKVLSMPQVNIVKKTEVQTGGFSKESILPKRNSDKLIARKKDWDPKKYGGFDSPTVAYSVLVVAKVEKGKSKKLKSVKELLGITIMERSSFEKNPIDFLEAKGYKEVKKDLIIKLPKYSLFELENGRKRMLASAGELQKGNELALPSKYVNFLYLASHYEKLKGSPEDNEQKQLFVEQHKHYLDEIIEQISEFSKRVILADANLDKVLSAYNKHRDKPIREQAENIIHLFTLTNLGAPAAFKYFDTTIDRKRYTSTKEVLDATLIHQSITGLYETRIDLSQLGGDGGPAPGSSGGSGGLLGRDLLTKLKAQIQFSTEGPQVTWEDRPAMCLVLNLEEEYRLHEKPVPPSIDPSWLQLFPMVWAEKAGMGLANQVPPVVVELKSDASPVAVRQYPMSKEAREGIRPHIQRFLDLGILVPCQSPWNTPLLPVKKPGTNDYRPVQDLREVNKRVQDIHPTVPNPYNLLSSLPPSHTWYSVLDLKDAFFCLKLHPNSQPLFAFEWRDPEKGNTGQLTWTRLPQGFKNSPTLFNEALHRDLASFRALNPQVVMLQYVDDLLVAAPTYRDCKEGTRRLLQELSKLGYRVSAKKAQLCREEVTYLGYLLKGGKRWLTPARKATVMKIPTPTTPRQVREFLGTAGFCRLWIPGFASLAAPLYPLTRPKVPFTWTEAHQEAFGRIKEALLSAPALALPDLTKPFALYVDEKEGVARGVLTQTLGPWRRPVAYLSKKLDPVASGWPTCLKAIAAVALLLKDADKLTLGQNVLVIAPHNLESIVRQPPDRWMTNARMTHYQSLLLNERVSFAPPAILNPATLLPVESDDTPIHICSEILAEETGTRPDLRDQPLPGVPAWYTDGSSFIMDGRRQAGAAIVDNKRTVWASNLPEGTSAQKAELIALTQALRLAEGKSINIYTDSRYAFATAHVHGAIYKQRGWLTSAGKDIKNKEEILALLEAIHLPKRVAIIHCPGHQRGTDPVATGNRKADEAAKQAAQSTRILTETTKNAGKRTADGSEFEKRTADGSEFESPKKKAKVE

SEQ ID NO: 1652 - protein, 2125 aa, synthetic construct
MPAAKRVKLDGGDKKYSIGLDIGTNSVGWAVITDEYKVPSKKFKVLGNTDRHSIKKNLIGALLFDSGETAEATRLKRTARRRYTRRKNRICYLQEIFSNEMAKVDDSFFHRLEESFLVEEDKKHERHPIFGNIVDEVAYHEKYPTIYHLRKKLVDSTDKADLRLIYLALAHMIKFRGHFLIEGDLNPDNSDVDKLFIQLVQTYNQLFEENPINASGVDAKAILSARLSKSRRLENLIAQLPGEKKNGLFGNLIALSLGLTPNFKSNFDLAEDAKLQLSKDTYDDDLDNLLAQIGDQYADLFLAAKNLSDAILLSDILRVNTEITKAPLSASMIKRYDEHHQDLTLLKALVRQQLPEKYKEIFFDQSKNGYAGYIDGGASQEEFYKFIKPILEKMDGTEELLVKLNREDLLRKQRTFDNGSIPHQIHLGELHAILRRQEDFYPFLKDNREKIEKILTFRIPYYVGPLARGNSRFAWMTRKSEETITPWNFEEVVDKGASAQSFIERMTNFDKNLPNEKVLPKHSLLYEYFTVYNELTKVKYVTEGMRKPAFLSGEQKKAIVDLLFKTNRKVTVKQLKEDYFKKIECFDSVEISGVEDRFNASLGTYHDLLKIIKDKDFLDNEENEDILEDIVLTLTLFEDREMIEERLKTYAHLFDDKVMKQLKRRRYTGWGRLSRKLINGIRDKQSGKTILDFLKSDGFANRNFMQLIHDDSLTFKEDIQKAQVSGQGDSLHEHIANLAGSPAIKKGILQTVKVVDELVKVMGRHKPENIVIEMARENQTTQKGQKNSRERMKRIEEGIKELGSQILKEHPVENTQLQNEKLYLYYLQNGRDMYVDQELDINRLSDYDVDHIVPQSFLKDDSIDNKVLTRSDKARGKSDNVPSEEVVKKMKNYWRQLLNAKLITQRKFDNLTKAERGGLSELDKAGFIKRQLVETRQITKHVAQILDSRMNTKYDENDKLIREVKVITLKSKLVSDFRKDFQFYKVREINNYHHAHDAYLNAVVGTALIKKYPKLESEFVYGDYKVYDVRKMIAKSEQEIGKATAKYFFYSNIMNFFKTEITLANGEIRKRPLIETNGETGEIVWDKGRDFATVRKVLSMPQVNIVKKTEVQTGGFSKESILPKRNSDKLIARKKDWDPKKYGGFDSPTVAYSVLVVAKVEKGKSKKLKSVKELLGITIMERSSFEKNPIDFLEAKGYKEVKKDLIIKLPKYSLFELENGRKRMLASAGELQKGNELALPSKYVNFLYLASHYEKLKGSPEDNEQKQLFVEQHKHYLDEIIEQISEFSKRVILADANLDKVLSAYNKHRDKPIREQAENIIHLFTLTNLGAPAAFKYFDTTIDRKRYTSTKEVLDATLIHQSITGLYETRIDLSQLGGDGGPAPGGSGGGGGLLGRDLLTKLKAQIQFSTEGPQVTWEDRPAMCLVLNLEEEYRLHEKPVPPSIDPSWLQLFPMVWAEKAGMGLANQVPPVVVELKSDASPVAVRQYPMSKEAREGIRPHIQRFLDLGILVPCQSPWNTPLLPVKKPGTNDYRPVQDLREVNKRVQDIHPTVPNPYNLLSSLPPSHTWYSVLDLKDAFFCLKLHPNSQPLFAFEWRDPEKGNTGQLTWTRLPQGFKNSPTLFNEALHRDLASFRALNPQVVMLQYVDDLLVAAPTYRDCKEGTRRLLQELSKLGYRVSAKKAQLCREEVTYLGYLLKGGKRWLTPARKATVMKIPTPTTPRQVREFLGTAGFCRLWIPGFASLAAPLYPLTRPKVPFTWTEAHQEAFGRIKEALLSAPALALPDLTKPFALYVDEKEGVARGVLTQTLGPWRRPVAYLSKKLDPVASGWPTCLKAIAAVALLLKDADKLTLGQNVLVIAPHNLESIVRQPPDRWMTNARMTHYQSLLLNERVSFAPPAILNPATLLPVESDDTPIHICSEILAEETGTRPDLRDQPLPGVPAWYTDGSSFIMDGRRQAGAAIVDNKRTVWASNLPEGTSAQKAELIALTQALRLAEGKSINIYTDSRYAFATAHVHGAIYKQRGWLTSAGKDIKNKEEILALLEAIHLPKRVAIIHCPGHQRGTDPVATGNRKADEAAKQAAQSTRILTETTKNAGKRTADGSEFEKRTADGSEFESPKKKAKVE

SEQ ID NO: 1653 - protein, 2125 aa, synthetic construct
MPAAKRVKLDGGDKKYSIGLDIGTNSVGWAVITDEYKVPSKKFKVLGNTDRHSIKKNLIGALLFDSGETAEATRLKRTARRRYTRRKNRICYLQEIFSNEMAKVDDSFFHRLEESFLVEEDKKHERHPIFGNIVDEVAYHEKYPTIYHLRKKLVDSTDKADLRLIYLALAHMIKFRGHFLIEGDLNPDNSDVDKLFIQLVQTYNQLFEENPINASGVDAKAILSARLSKSRRLENLIAQLPGEKKNGLFGNLIALSLGLTPNFKSNFDLAEDAKLQLSKDTYDDDLDNLLAQIGDQYADLFLAAKNLSDAILLSDILRVNTEITKAPLSASMIKRYDEHHQDLTLLKALVRQQLPEKYKEIFFDQSKNGYAGYIDGGASQEEFYKFIKPILEKMDGTEELLVKLNREDLLRKQRTFDNGSIPHQIHLGELHAILRRQEDFYPFLKDNREKIEKILTFRIPYYVGPLARGNSRFAWMTRKSEETITPWNFEEVVDKGASAQSFIERMTNFDKNLPNEKVLPKHSLLYEYFTVYNELTKVKYVTEGMRKPAFLSGEQKKAIVDLLFKTNRKVTVKQLKEDYFKKIECFDSVEISGVEDRFNASLGTYHDLLKIIKDKDFLDNEENEDILEDIVLTLTLFEDREMIEERLKTYAHLFDDKVMKQLKRRRYTGWGRLSRKLINGIRDKQSGKTILDFLKSDGFANRNFMQLIHDDSLTFKEDIQKAQVSGQGDSLHEHIANLAGSPAIKKGILQTVKVVDELVKVMGRHKPENIVIEMARENQTTQKGQKNSRERMKRIEEGIKELGSQILKEHPVENTQLQNEKLYLYYLQNGRDMYVDQELDINRLSDYDVDHIVPQSFLKDDSIDNKVLTRSDKARGKSDNVPSEEVVKKMKNYWRQLLNAKLITQRKFDNLTKAERGGLSELDKAGFIKRQLVETRQITKHVAQILDSRMNTKYDENDKLIREVKVITLKSKLVSDFRKDFQFYKVREINNYHHAHDAYLNAVVGTALIKKYPKLESEFVYGDYKVYDVRKMIAKSEQEIGKATAKYFFYSNIMNFFKTEITLANGEIRKRPLIETNGETGEIVWDKGRDFATVRKVLSMPQVNIVKKTEVQTGGFSKESILPKRNSDKLIARKKDWDPKKYGGFDSPTVAYSVLVVAKVEKGKSKKLKSVKELLGITIMERSSFEKNPIDFLEAKGYKEVKKDLIIKLPKYSLFELENGRKRMLASAGELQKGNELALPSKYVNFLYLASHYEKLKGSPEDNEQKQLFVEQHKHYLDEIIEQISEFSKRVILADANLDKVLSAYNKHRDKPIREQAENIIHLFTLTNLGAPAAFKYFDTTIDRKRYTSTKEVLDATLIHQSITGLYETRIDLSQLGGDGGGGGGGSPAPGGLLGRDLLTKLKAQIQFSTEGPQVTWEDRPAMCLVLNLEEEYRLHEKPVPPSIDPSWLQLFPMVWAEKAGMGLANQVPPVVVELKSDASPVAVRQYPMSKEAREGIRPHIQRFLDLGILVPCQSPWNTPLLPVKKPGTNDYRPVQDLREVNKRVQDIHPTVPNPYNLLSSLPPSHTWYSVLDLKDAFFCLKLHPNSQPLFAFEWRDPEKGNTGQLTWTRLPQGFKNSPTLFNEALHRDLASFRALNPQVVMLQYVDDLLVAAPTYRDCKEGTRRLLQELSKLGYRVSAKKAQLCREEVTYLGYLLKGGKRWLTPARKATVMKIPTPTTPRQVREFLGTAGFCRLWIPGFASLAAPLYPLTRPKVPFTWTEAHQEAFGRIKEALLSAPALALPDLTKPFALYVDEKEGVARGVLTQTLGPWRRPVAYLSKKLDPVASGWPTCLKAIAAVALLLKDADKLTLGQNVLVIAPHNLESIVRQPPDRWMTNARMTHYQSLLLNERVSFAPPAILNPATLLPVESDDTPIHICSEILAEETGTRPDLRDQPLPGVPAWYTDGSSFIMDGRRQAGAAIVDNKRTVWASNLPEGTSAQKAELIALTQALRLAEGKSINIYTDSRYAFATAHVHGAIYKQRGWLTSAGKDIKNKEEILALLEAIHLPKRVAIIHCPGHQRGTDPVATGNRKADEAAKQAAQSTRILTETTKNAGKRTADGSEFEKRTADGSEFESPKKKAKVE

SEQ ID NO: 1654 - protein, 2127 aa, synthetic construct
MPAAKRVKLDGGDKKYSIGLDIGTNSVGWAVITDEYKVPSKKFKVLGNTDRHSIKKNLIGALLFDSGETAEATRLKRTARRRYTRRKNRICYLQEIFSNEMAKVDDSFFHRLEESFLVEEDKKHERHPIFGNIVDEVAYHEKYPTIYHLRKKLVDSTDKADLRLIYLALAHMIKFRGHFLIEGDLNPDNSDVDKLFIQLVQTYNQLFEENPINASGVDAKAILSARLSKSRRLENLIAQLPGEKKNGLFGNLIALSLGLTPNFKSNFDLAEDAKLQLSKDTYDDDLDNLLAQIGDQYADLFLAAKNLSDAILLSDILRVNTEITKAPLSASMIKRYDEHHQDLTLLKALVRQQLPEKYKEIFFDQSKNGYAGYIDGGASQEEFYKFIKPILEKMDGTEELLVKLNREDLLRKQRTFDNGSIPHQIHLGELHAILRRQEDFYPFLKDNREKIEKILTFRIPYYVGPLARGNSRFAWMTRKSEETITPWNFEEVVDKGASAQSFIERMTNFDKNLPNEKVLPKHSLLYEYFTVYNELTKVKYVTEGMRKPAFLSGEQKKAIVDLLFKTNRKVTVKQLKEDYFKKIECFDSVEISGVEDRFNASLGTYHDLLKIIKDKDFLDNEENEDILEDIVLTLTLFEDREMIEERLKTYAHLFDDKVMKQLKRRRYTGWGRLSRKLINGIRDKQSGKTILDFLKSDGFANRNFMQLIHDDSLTFKEDIQKAQVSGQGDSLHEHIANLAGSPAIKKGILQTVKVVDELVKVMGRHKPENIVIEMARENQTTQKGQKNSRERMKRIEEGIKELGSQILKEHPVENTQLQNEKLYLYYLQNGRDMYVDQELDINRLSDYDVDHIVPQSFLKDDSIDNKVLTRSDKARGKSDNVPSEEVVKKMKNYWRQLLNAKLITQRKFDNLTKAERGGLSELDKAGFIKRQLVETRQITKHVAQILDSRMNTKYDENDKLIREVKVITLKSKLVSDFRKDFQFYKVREINNYHHAHDAYLNAVVGTALIKKYPKLESEFVYGDYKVYDVRKMIAKSEQEIGKATAKYFFYSNIMNFFKTEITLANGEIRKRPLIETNGETGEIVWDKGRDFATVRKVLSMPQVNIVKKTEVQTGGFSKESILPKRNSDKLIARKKDWDPKKYGGFDSPTVAYSVLVVAKVEKGKSKKLKSVKELLGITIMERSSFEKNPIDFLEAKGYKEVKKDLIIKLPKYSLFELENGRKRMLASAGELQKGNELALPSKYVNFLYLASHYEKLKGSPEDNEQKQLFVEQHKHYLDEIIEQISEFSKRVILADANLDKVLSAYNKHRDKPIREQAENIIHLFTLTNLGAPAAFKYFDTTIDRKRYTSTKEVLDATLIHQSITGLYETRIDLSQLGGDGGGGSEAAAKPAPGGLLGRDLLTKLKAQIQFSTEGPQVTWEDRPAMCLVLNLEEEYRLHEKPVPPSIDPSWLQLFPMVWAEKAGMGLANQVPPVVVELKSDASPVAVRQYPMSKEAREGIRPHIQRFLDLGILVPCQSPWNTPLLPVKKPGTNDYRPVQDLREVNKRVQDIHPTVPNPYNLLSSLPPSHTWYSVLDLKDAFFCLKLHPNSQPLFAFEWRDPEKGNTGQLTWTRLPQGFKNSPTLFNEALHRDLASFRALNPQVVMLQYVDDLLVAAPTYRDCKEGTRRLLQELSKLGYRVSAKKAQLCREEVTYLGYLLKGGKRWLTPARKATVMKIPTPTTPRQVREFLGTAGFCRLWIPGFASLAAPLYPLTRPKVPFTWTEAHQEAFGRIKEALLSAPALALPDLTKPFALYVDEKEGVARGVLTQTLGPWRRPVAYLSKKLDPVASGWPTCLKAIAAVALLLKDADKLTLGQNVLVIAPHNLESIVRQPPDRWMTNARMTHYQSLLLNERVSFAPPAILNPATLLPVESDDTPIHICSEILAEETGTRPDLRDQPLPGVPAWYTDGSSFIMDGRRQAGAAIVDNKRTVWASNLPEGTSAQKAELIALTQALRLAEGKSINIYTDSRYAFATAHVHGAIYKQRGWLTSAGKDIKNKEEILALLEAIHLPKRVAIIHCPGHQRGTDPVATGNRKADEAAKQAAQSTRILTETTKNAGKRTADGSEFEKRTADGSEFESPKKKAKVE

SEQ ID NO: 1655 - protein, 2125 aa, synthetic construct
MPAAKRVKLDGGDKKYSIGLDIGTNSVGWAVITDEYKVPSKKFKVLGNTDRHSIKKNLIGALLFDSGETAEATRLKRTARRRYTRRKNRICYLQEIFSNEMAKVDDSFFHRLEESFLVEEDKKHERHPIFGNIVDEVAYHEKYPTIYHLRKKLVDSTDKADLRLIYLALAHMIKFRGHFLIEGDLNPDNSDVDKLFIQLVQTYNQLFEENPINASGVDAKAILSARLSKSRRLENLIAQLPGEKKNGLFGNLIALSLGLTPNFKSNFDLAEDAKLQLSKDTYDDDLDNLLAQIGDQYADLFLAAKNLSDAILLSDILRVNTEITKAPLSASMIKRYDEHHQDLTLLKALVRQQLPEKYKEIFFDQSKNGYAGYIDGGASQEEFYKFIKPILEKMDGTEELLVKLNREDLLRKQRTFDNGSIPHQIHLGELHAILRRQEDFYPFLKDNREKIEKILTFRIPYYVGPLARGNSRFAWMTRKSEETITPWNFEEVVDKGASAQSFIERMTNFDKNLPNEKVLPKHSLLYEYFTVYNELTKVKYVTEGMRKPAFLSGEQKKAIVDLLFKTNRKVTVKQLKEDYFKKIECFDSVEISGVEDRFNASLGTYHDLLKIIKDKDFLDNEENEDILEDIVLTLTLFEDREMIEERLKTYAHLFDDKVMKQLKRRRYTGWGRLSRKLINGIRDKQSGKTILDFLKSDGFANRNFMQLIHDDSLTFKEDIQKAQVSGQGDSLHEHIANLAGSPAIKKGILQTVKVVDELVKVMGRHKPENIVIEMARENQTTQKGQKNSRERMKRIEEGIKELGSQILKEHPVENTQLQNEKLYLYYLQNGRDMYVDQELDINRLSDYDVDHIVPQSFLKDDSIDNKVLTRSDKARGKSDNVPSEEVVKKMKNYWRQLLNAKLITQRKFDNLTKAERGGLSELDKAGFIKRQLVETRQITKHVAQILDSRMNTKYDENDKLIREVKVITLKSKLVSDFRKDFQFYKVREINNYHHAHDAYLNAVVGTALIKKYPKLESEFVYGDYKVYDVRKMIAKSEQEIGKATAKYFFYSNIMNFFKTEITLANGEIRKRPLIETNGETGEIVWDKGRDFATVRKVLSMPQVNIVKKTEVQTGGFSKESILPKRNSDKLIARKKDWDPKKYGGFDSPTVAYSVLVVAKVEKGKSKKLKSVKELLGITIMERSSFEKNPIDFLEAKGYKEVKKDLIIKLPKYSLFELENGRKRMLASAGELQKGNELALPSKYVNFLYLASHYEKLKGSPEDNEQKQLFVEQHKHYLDEIIEQISEFSKRVILADANLDKVLSAYNKHRDKPIREQAENIIHLFTLTNLGAPAAFKYFDTTIDRKRYTSTKEVLDATLIHQSITGLYETRIDLSQLGGDGGGGSGGSGGSGGLLGRDLLTKLKAQIQFSTEGPQVTWEDRPAMCLVLNLEEEYRLHEKPVPPSIDPSWLQLFPMVWAEKAGMGLANQVPPVVVELKSDASPVAVRQYPMSKEAREGIRPHIQRFLDLGILVPCQSPWNTPLLPVKKPGTNDYRPVQDLREVNKRVQDIHPTVPNPYNLLSSLPPSHTWYSVLDLKDAFFCLKLHPNSQPLFAFEWRDPEKGNTGQLTWTRLPQGFKNSPTLFNEALHRDLASFRALNPQVVMLQYVDDLLVAAPTYRDCKEGTRRLLQELSKLGYRVSAKKAQLCREEVTYLGYLLKGGKRWLTPARKATVMKIPTPTTPRQVREFLGTAGFCRLWIPGFASLAAPLYPLTRPKVPFTWTEAHQEAFGRIKEALLSAPALALPDLTKPFALYVDEKEGVARGVLTQTLGPWRRPVAYLSKKLDPVASGWPTCLKAIAAVALLLKDADKLTLGQNVLVIAPHNLESIVRQPPDRWMTNARMTHYQSLLLNERVSFAPPAILNPATLLPVESDDTPIHICSEILAEETGTRPDLRDQPLPGVPAWYTDGSSFIMDGRRQAGAAIVDNKRTVWASNLPEGTSAQKAELIALTQALRLAEGKSINIYTDSRYAFATAHVHGAIYKQRGWLTSAGKDIKNKEEILALLEAIHLPKRVAIIHCPGHQRGTDPVATGNRKADEAAKQAAQSTRILTETTKNAGKRTADGSEFEKRTADGSEFESPKKKAKVE

SEQ ID NO: 1656 - protein, 2127 aa, synthetic construct
MPAAKRVKLDGGDKKYSIGLDIGTNSVGWAVITDEYKVPSKKFKVLGNTDRHSIKKNLIGALLFDSGETAEATRLKRTARRRYTRRKNRICYLQEIFSNEMAKVDDSFFHRLEESFLVEEDKKHERHPIFGNIVDEVAYHEKYPTIYHLRKKLVDSTDKADLRLIYLALAHMIKFRGHFLIEGDLNPDNSDVDKLFIQLVQTYNQLFEENPINASGVDAKAILSARLSKSRRLENLIAQLPGEKKNGLFGNLIALSLGLTPNFKSNFDLAEDAKLQLSKDTYDDDLDNLLAQIGDQYADLFLAAKNLSDAILLSDILRVNTEITKAPLSASMIKRYDEHHQDLTLLKALVRQQLPEKYKEIFFDQSKNGYAGYIDGGASQEEFYKFIKPILEKMDGTEELLVKLNREDLLRKQRTFDNGSIPHQIHLGELHAILRRQEDFYPFLKDNREKIEKILTFRIPYYVGPLARGNSRFAWMTRKSEETITPWNFEEVVDKGASAQSFIERMTNFDKNLPNEKVLPKHSLLYEYFTVYNELTKVKYVTEGMRKPAFLSGEQKKAIVDLLFKTNRKVTVKQLKEDYFKKIECFDSVEISGVEDRFNASLGTYHDLLKIIKDKDFLDNEENEDILEDIVLTLTLFEDREMIEERLKTYAHLFDDKVMKQLKRRRYTGWGRLSRKLINGIRDKQSGKTILDFLKSDGFANRNFMQLIHDDSLTFKEDIQKAQVSGQGDSLHEHIANLAGSPAIKKGILQTVKVVDELVKVMGRHKPENIVIEMARENQTTQKGQKNSRERMKRIEEGIKELGSQILKEHPVENTQLQNEKLYLYYLQNGRDMYVDQELDINRLSDYDVDHIVPQSFLKDDSIDNKVLTRSDKARGKSDNVPSEEVVKKMKNYWRQLLNAKLITQRKFDNLTKAERGGLSELDKAGFIKRQLVETRQITKHVAQILDSRMNTKYDENDKLIREVKVITLKSKLVSDFRKDFQFYKVREINNYHHAHDAYLNAVVGTALIKKYPKLESEFVYGDYKVYDVRKMIAKSEQEIGKATAKYFFYSNIMNFFKTEITLANGEIRKRPLIETNGETGEIVWDKGRDFATVRKVLSMPQVNIVKKTEVQTGGFSKESILPKRNSDKLIARKKDWDPKKYGGFDSPTVAYSVLVVAKVEKGKSKKLKSVKELLGITIMERSSFEKNPIDFLEAKGYKEVKKDLIIKLPKYSLFELENGRKRMLASAGELQKGNELALPSKYVNFLYLASHYEKLKGSPEDNEQKQLFVEQHKHYLDEIIEQISEFSKRVILADANLDKVLSAYNKHRDKPIREQAENIIHLFTLTNLGAPAAFKYFDTTIDRKRYTSTKEVLDATLIHQSITGLYETRIDLSQLGGDGGPAPEAAAKGSSGGLLGRDLLTKLKAQIQFSTEGPQVTWEDRPAMCLVLNLEEEYRLHEKPVPPSIDPSWLQLFPMVWAEKAGMGLANQVPPVVVELKSDASPVAVRQYPMSKEAREGIRPHIQRFLDLGILVPCQSPWNTPLLPVKKPGTNDYRPVQDLREVNKRVQDIHPTVPNPYNLLSSLPPSHTWYSVLDLKDAFFCLKLHPNSQPLFAFEWRDPEKGNTGQLTWTRLPQGFKNSPTLFNEALHRDLASFRALNPQVVMLQYVDDLLVAAPTYRDCKEGTRRLLQELSKLGYRVSAKKAQLCREEVTYLGYLLKGGKRWLTPARKATVMKIPTPTTPRQVREFLGTAGFCRLWIPGFASLAAPLYPLTRPKVPFTWTEAHQEAFGRIKEALLSAPALALPDLTKPFALYVDEKEGVARGVLTQTLGPWRRPVAYLSKKLDPVASGWPTCLKAIAAVALLLKDADKLTLGQNVLVIAPHNLESIVRQPPDRWMTNARMTHYQSLLLNERVSFAPPAILNPATLLPVESDDTPIHICSEILAEETGTRPDLRDQPLPGVPAWYTDGSSFIMDGRRQAGAAIVDNKRTVWASNLPEGTSAQKAELIALTQALRLAEGKSINIYTDSRYAFATAHVHGAIYKQRGWLTSAGKDIKNKEEILALLEAIHLPKRVAIIHCPGHQRGTDPVATGNRKADEAAKQAAQSTRILTETTKNAGKRTADGSEFEKRTADGSEFESPKKKAKVE

SEQ ID NO: 1657 - protein, 2122 aa, synthetic construct
MPAAKRVKLDGGDKKYSIGLDIGTNSVGWAVITDEYKVPSKKFKVLGNTDRHSIKKNLIGALLFDSGETAEATRLKRTARRRYTRRKNRICYLQEIFSNEMAKVDDSFFHRLEESFLVEEDKKHERHPIFGNIVDEVAYHEKYPTIYHLRKKLVDSTDKADLRLIYLALAHMIKFRGHFLIEGDLNPDNSDVDKLFIQLVQTYNQLFEENPINASGVDAKAILSARLSKSRRLENLIAQLPGEKKNGLFGNLIALSLGLTPNFKSNFDLAEDAKLQLSKDTYDDDLDNLLAQIGDQYADLFLAAKNLSDAILLSDILRVNTEITKAPLSASMIKRYDEHHQDLTLLKALVRQQLPEKYKEIFFDQSKNGYAGYIDGGASQEEFYKFIKPILEKMDGTEELLVKLNREDLLRKQRTFDNGSIPHQIHLGELHAILRRQEDFYPFLKDNREKIEKILTFRIPYYVGPLARGNSRFAWMTRKSEETITPWNFEEVVDKGASAQSFIERMTNFDKNLPNEKVLPKHSLLYEYFTVYNELTKVKYVTEGMRKPAFLSGEQKKAIVDLLFKTNRKVTVKQLKEDYFKKIECFDSVEISGVEDRFNASLGTYHDLLKIIKDKDFLDNEENEDILEDIVLTLTLFEDREMIEERLKTYAHLFDDKVMKQLKRRRYTGWGRLSRKLINGIRDKQSGKTILDFLKSDGFANRNFMQLIHDDSLTFKEDIQKAQVSGQGDSLHEHIANLAGSPAIKKGILQTVKVVDELVKVMGRHKPENIVIEMARENQTTQKGQKNSRERMKRIEEGIKELGSQILKEHPVENTQLQNEKLYLYYLQNGRDMYVDQELDINRLSDYDVDHIVPQSFLKDDSIDNKVLTRSDKARGKSDNVPSEEVVKKMKNYWRQLLNAKLITQRKFDNLTKAERGGLSELDKAGFIKRQLVETRQITKHVAQILDSRMNTKYDENDKLIREVKVITLKSKLVSDFRKDFQFYKVREINNYHHAHDAYLNAVVGTALIKKYPKLESEFVYGDYKVYDVRKMIAKSEQEIGKATAKYFFYSNIMNFFKTEITLANGEIRKRPLIETNGETGEIVWDKGRDFATVRKVLSMPQVNIVKKTEVQTGGFSKESILPKRNSDKLIARKKDWDPKKYGGFDSPTVAYSVLVVAKVEKGKSKKLKSVKELLGITIMERSSFEKNPIDFLEAKGYKEVKKDLIIKLPKYSLFELENGRKRMLASAGELQKGNELALPSKYVNFLYLASHYEKLKGSPEDNEQKQLFVEQHKHYLDEIIEQISEFSKRVILADANLDKVLSAYNKHRDKPIREQAENIIHLFTLTNLGAPAAFKYFDTTIDRKRYTSTKEVLDATLIHQSITGLYETRIDLSQLGGDGGGGGGSSGGLLGRDLLTKLKAQIQFSTEGPQVTWEDRPAMCLVLNLEEEYRLHEKPVPPSIDPSWLQLFPMVWAEKAGMGLANQVPPVVVELKSDASPVAVRQYPMSKEAREGIRPHIQRFLDLGILVPCQSPWNTPLLPVKKPGTNDYRPVQDLREVNKRVQDIHPTVPNPYNLLSSLPPSHTWYSVLDLKDAFFCLKLHPNSQPLFAFEWRDPEKGNTGQLTWTRLPQGFKNSPTLFNEALHRDLASFRALNPQVVMLQYVDDLLVAAPTYRDCKEGTRRLLQELSKLGYRVSAKKAQLCREEVTYLGYLLKGGKRWLTPARKATVMKIPTPTTPRQVREFLGTAGFCRLWIPGFASLAAPLYPLTRPKVPFTWTEAHQEAFGRIKEALLSAPALALPDLTKPFALYVDEKEGVARGVLTQTLGPWRRPVAYLSKKLDPVASGWPTCLKAIAAVALLLKDADKLTLGQNVLVIAPHNLESIVRQPPDRWMTNARMTHYQSLLLNERVSFAPPAILNPATLLPVESDDTPIHICSEILAEETGTRPDLRDQPLPGVPAWYTDGSSFIMDGRRQAGAAIVDNKRTVWASNLPEGTSAQKAELIALTQALRLAEGKSINIYTDSRYAFATAHVHGAIYKQRGWLTSAGKDIKNKEEILALLEAIHLPKRVAIIHCPGHQRGTDPVATGNRKADEAAKQAAQSTRILTETTKNAGKRTADGSEFEKRTADGSEFESPKKKAKVE

SEQ ID NO: 1658 - protein, 2125 aa, synthetic construct
MPAAKRVKLDGGDKKYSIGLDIGTNSVGWAVITDEYKVPSKKFKVLGNTDRHSIKKNLIGALLFDSGETAEATRLKRTARRRYTRRKNRICYLQEIFSNEMAKVDDSFFHRLEESFLVEEDKKHERHPIFGNIVDEVAYHEKYPTIYHLRKKLVDSTDKADLRLIYLALAHMIKFRGHFLIEGDLNPDNSDVDKLFIQLVQTYNQLFEENPINASGVDAKAILSARLSKSRRLENLIAQLPGEKKNGLFGNLIALSLGLTPNFKSNFDLAEDAKLQLSKDTYDDDLDNLLAQIGDQYADLFLAAKNLSDAILLSDILRVNTEITKAPLSASMIKRYDEHHQDLTLLKALVRQQLPEKYKEIFFDQSKNGYAGYIDGGASQEEFYKFIKPILEKMDGTEELLVKLNREDLLRKQRTFDNGSIPHQIHLGELHAILRRQEDFYPFLKDNREKIEKILTFRIPYYVGPLARGNSRFAWMTRKSEETITPWNFEEVVDKGASAQSFIERMTNFDKNLPNEKVLPKHSLLYEYFTVYNELTKVKYVTEGMRKPAFLSGEQKKAIVDLLFKTNRKVTVKQLKEDYFKKIECFDSVEISGVEDRFNASLGTYHDLLKIIKDKDFLDNEENEDILEDIVLTLTLFEDREMIEERLKTYAHLFDDKVMKQLKRRRYTGWGRLSRKLINGIRDKQSGKTILDFLKSDGFANRNFMQLIHDDSLTFKEDIQKAQVSGQGDSLHEHIANLAGSPAIKKGILQTVKVVDELVKVMGRHKPENIVIEMARENQTTQKGQKNSRERMKRIEEGIKELGSQILKEHPVENTQLQNEKLYLYYLQNGRDMYVDQELDINRLSDYDVDHIVPQSFLKDDSIDNKVLTRSDKARGKSDNVPSEEVVKKMKNYWRQLLNAKLITQRKFDNLTKAERGGLSELDKAGFIKRQLVETRQITKHVAQILDSRMNTKYDENDKLIREVKVITLKSKLVSDFRKDFQFYKVREINNYHHAHDAYLNAVVGTALIKKYPKLESEFVYGDYKVYDVRKMIAKSEQEIGKATAKYFFYSNIMNFFKTEITLANGEIRKRPLIETNGETGEIVWDKGRDFATVRKVLSMPQVNIVKKTEVQTGGFSKESILPKRNSDKLIARKKDWDPKKYGGFDSPTVAYSVLVVAKVEKGKSKKLKSVKELLGITIMERSSFEKNPIDFLEAKGYKEVKKDLIIKLPKYSLFELENGRKRMLASAGELQKGNELALPSKYVNFLYLASHYEKLKGSPEDNEQKQLFVEQHKHYLDEIIEQISEFSKRVILADANLDKVLSAYNKHRDKPIREQAENIIHLFTLTNLGAPAAFKYFDTTIDRKRYTSTKEVLDATLIHQSITGLYETRIDLSQLGGDGGPAPGGSGSSGGLLGRDLLTKLKAQIQFSTEGPQVTWEDRPAMCLVLNLEEEYRLHEKPVPPSIDPSWLQLFPMVWAEKAGMGLANQVPPVVVELKSDASPVAVRQYPMSKEAREGIRPHIQRFLDLGILVPCQSPWNTPLLPVKKPGTNDYRPVQDLREVNKRVQDIHPTVPNPYNLLSSLPPSHTWYSVLDLKDAFFCLKLHPNSQPLFAFEWRDPEKGNTGQLTWTRLPQGFKNSPTLFNEALHRDLASFRALNPQVVMLQYVDDLLVAAPTYRDCKEGTRRLLQELSKLGYRVSAKKAQLCREEVTYLGYLLKGGKRWLTPARKATVMKIPTPTTPRQVREFLGTAGFCRLWIPGFASLAAPLYPLTRPKVPFTWTEAHQEAFGRIKEALLSAPALALPDLTKPFALYVDEKEGVARGVLTQTLGPWRRPVAYLSKKLDPVASGWPTCLKAIAAVALLLKDADKLTLGQNVLVIAPHNLESIVRQPPDRWMTNARMTHYQSLLLNERVSFAPPAILNPATLLPVESDDTPIHICSEILAEETGTRPDLRDQPLPGVPAWYTDGSSFIMDGRRQAGAAIVDNKRTVWASNLPEGTSAQKAELIALTQALRLAEGKSINIYTDSRYAFATAHVHGAIYKQRGWLTSAGKDIKNKEEILALLEAIHLPKRVAIIHCPGHQRGTDPVATGNRKADEAAKQAAQSTRILTETTKNAGKRTADGSEFEKRTADGSEFESPKKKAKVE

SEQ ID NO: 1659 - protein, 2127 aa, synthetic construct
MPAAKRVKLDGGDKKYSIGLDIGTNSVGWAVITDEYKVPSKKFKVLGNTDRHSIKKNLIGALLFDSGETAEATRLKRTARRRYTRRKNRICYLQEIFSNEMAKVDDSFFHRLEESFLVEEDKKHERHPIFGNIVDEVAYHEKYPTIYHLRKKLVDSTDKADLRLIYLALAHMIKFRGHFLIEGDLNPDNSDVDKLFIQLVQTYNQLFEENPINASGVDAKAILSARLSKSRRLENLIAQLPGEKKNGLFGNLIALSLGLTPNFKSNFDLAEDAKLQLSKDTYDDDLDNLLAQIGDQYADLFLAAKNLSDAILLSDILRVNTEITKAPLSASMIKRYDEHHQDLTLLKALVRQQLPEKYKEIFFDQSKNGYAGYIDGGASQEEFYKFIKPILEKMDGTEELLVKLNREDLLRKQRTFDNGSIPHQIHLGELHAILRRQEDFYPFLKDNREKIEKILTFRIPYYVGPLARGNSRFAWMTRKSEETITPWNFEEVVDKGASAQSFIERMTNFDKNLPNEKVLPKHSLLYEYFTVYNELTKVKYVTEGMRKPAFLSGEQKKAIVDLLFKTNRKVTVKQLKEDYFKKIECFDSVEISGVEDRFNASLGTYHDLLKIIKDKDFLDNEENEDILEDIVLTLTLFEDREMIEERLKTYAHLFDDKVMKQLKRRRYTGWGRLSRKLINGIRDKQSGKTILDFLKSDGFANRNFMQLIHDDSLTFKEDIQKAQVSGQGDSLHEHIANLAGSPAIKKGILQTVKVVDELVKVMGRHKPENIVIEMARENQTTQKGQKNSRERMKRIEEGIKELGSQILKEHPVENTQLQNEKLYLYYLQNGRDMYVDQELDINRLSDYDVDHIVPQSFLKDDSIDNKVLTRSDKARGKSDNVPSEEVVKKMKNYWRQLLNAKLITQRKFDNLTKAERGGLSELDKAGFIKRQLVETRQITKHVAQILDSRMNTKYDENDKLIREVKVITLKSKLVSDFRKDFQFYKVREINNYHHAHDAYLNAVVGTALIKKYPKLESEFVYGDYKVYDVRKMIAKSEQEIGKATAKYFFYSNIMNFFKTEITLANGEIRKRPLIETNGETGEIVWDKGRDFATVRKVLSMPQVNIVKKTEVQTGGFSKESILPKRNSDKLIARKKDWDPKKYGGFDSPTVAYSVLVVAKVEKGKSKKLKSVKELLGITIMERSSFEKNPIDFLEAKGYKEVKKDLIIKLPKYSLFELENGRKRMLASAGELQKGNELALPSKYVNFLYLASHYEKLKGSPEDNEQKQLFVEQHKHYLDEIIEQISEFSKRVILADANLDKVLSAYNKHRDKPIREQAENIIHLFTLTNLGAPAAFKYFDTTIDRKRYTSTKEVLDATLIHQSITGLYETRIDLSQLGGDGGGGSGGGEAAAKGGLLGRDLLTKLKAQIQFSTEGPQVTWEDRPAMCLVLNLEEEYRLHEKPVPPSIDPSWLQLFPMVWAEKAGMGLANQVPPVVVELKSDASPVAVRQYPMSKEAREGIRPHIQRFLDLGILVPCQSPWNTPLLPVKKPGTNDYRPVQDLREVNKRVQDIHPTVPNPYNLLSSLPPSHTWYSVLDLKDAFFCLKLHPNSQPLFAFEWRDPEKGNTGQLTWTRLPQGFKNSPTLFNEALHRDLASFRALNPQVVMLQYVDDLLVAAPTYRDCKEGTRRLLQELSKLGYRVSAKKAQLCREEVTYLGYLLKGGKRWLTPARKATVMKIPTPTTPRQVREFLGTAGFCRLWIPGFASLAAPLYPLTRPKVPFTWTEAHQEAFGRIKEALLSAPALALPDLTKPFALYVDEKEGVARGVLTQTLGPWRRPVAYLSKKLDPVASGWPTCLKAIAAVALLLKDADKLTLGQNVLVIAPHNLESIVRQPPDRWMTNARMTHYQSLLLNERVSFAPPAILNPATLLPVESDDTPIHICSEILAEETGTRPDLRDQPLPGVPAWYTDGSSFIMDGRRQAGAAIVDNKRTVWASNLPEGTSAQKAELIALTQALRLAEGKSINIYTDSRYAFATAHVHGAIYKQRGWLTSAGKDIKNKEEILALLEAIHLPKRVAIIHCPGHQRGTDPVATGNRKADEAAKQAAQSTRILTETTKNAGKRTADGSEFEKRTADGSEFESPKKKAKVE

SEQ ID NO: 1660 - protein, 2132 aa, synthetic construct
MPAAKRVKLDGGDKKYSIGLDIGTNSVGWAVITDEYKVPSKKFKVLGNTDRHSIKKNLIGALLFDSGETAEATRLKRTARRRYTRRKNRICYLQEIFSNEMAKVDDSFFHRLEESFLVEEDKKHERHPIFGNIVDEVAYHEKYPTIYHLRKKLVDSTDKADLRLIYLALAHMIKFRGHFLIEGDLNPDNSDVDKLFIQLVQTYNQLFEENPINASGVDAKAILSARLSKSRRLENLIAQLPGEKKNGLFGNLIALSLGLTPNFKSNFDLAEDAKLQLSKDTYDDDLDNLLAQIGDQYADLFLAAKNLSDAILLSDILRVNTEITKAPLSASMIKRYDEHHQDLTLLKALVRQQLPEKYKEIFFDQSKNGYAGYIDGGASQEEFYKFIKPILEKMDGTEELLVKLNREDLLRKQRTFDNGSIPHQIHLGELHAILRRQEDFYPFLKDNREKIEKILTFRIPYYVGPLARGNSRFAWMTRKSEETITPWNFEEVVDKGASAQSFIERMTNFDKNLPNEKVLPKHSLLYEYFTVYNELTKVKYVTEGMRKPAFLSGEQKKAIVDLLFKTNRKVTVKQLKEDYFKKIECFDSVEISGVEDRFNASLGTYHDLLKIIKDKDFLDNEENEDILEDIVLTLTLFEDREMIEERLKTYAHLFDDKVMKQLKRRRYTGWGRLSRKLINGIRDKQSGKTILDFLKSDGFANRNFMQLIHDDSLTFKEDIQKAQVSGQGDSLHEHIANLAGSPAIKKGILQTVKVVDELVKVMGRHKPENIVIEMARENQTTQKGQKNSRERMKRIEEGIKELGSQILKEHPVENTQLQNEKLYLYYLQNGRDMYVDQELDINRLSDYDVDHIVPQSFLKDDSIDNKVLTRSDKARGKSDNVPSEEVVKKMKNYWRQLLNAKLITQRKFDNLTKAERGGLSELDKAGFIKRQLVETRQITKHVAQILDSRMNTKYDENDKLIREVKVITLKSKLVSDFRKDFQFYKVREINNYHHAHDAYLNAVVGTALIKKYPKLESEFVYGDYKVYDVRKMIAKSEQEIGKATAKYFFYSNIMNFFKTEITLANGEIRKRPLIETNGETGEIVWDKGRDFATVRKVLSMPQVNIVKKTEVQTGGFSKESILPKRNSDKLIARKKDWDPKKYGGFDSPTVAYSVLVVAKVEKGKSKKLKSVKELLGITIMERSSFEKNPIDFLEAKGYKEVKKDLIIKLPKYSLFELENGRKRMLASAGELQKGNELALPSKYVNFLYLASHYEKLKGSPEDNEQKQLFVEQHKHYLDEIIEQISEFSKRVILADANLDKVLSAYNKHRDKPIREQAENIIHLFTLTNLGAPAAFKYFDTTIDRKRYTSTKEVLDATLIHQSITGLYETRIDLSQLGGDGGSGSETPGTSESATPESGGLLGRDLLTKLKAQIQFSTEGPQVTWEDRPAMCLVLNLEEEYRLHEKPVPPSIDPSWLQLFPMVWAEKAGMGLANQVPPVVVELKSDASPVAVRQYPMSKEAREGIRPHIQRFLDLGILVPCQSPWNTPLLPVKKPGTNDYRPVQDLREVNKRVQDIHPTVPNPYNLLSSLPPSHTWYSVLDLKDAFFCLKLHPNSQPLFAFEWRDPEKGNTGQLTWTRLPQGFKNSPTLFNEALHRDLASFRALNPQVVMLQYVDDLLVAAPTYRDCKEGTRRLLQELSKLGYRVSAKKAQLCREEVTYLGYLLKGGKRWLTPARKATVMKIPTPTTPRQVREFLGTAGFCRLWIPGFASLAAPLYPLTRPKVPFTWTEAHQEAFGRIKEALLSAPALALPDLTKPFALYVDEKEGVARGVLTQTLGPWRRPVAYLSKKLDPVASGWPTCLKAIAAVALLLKDADKLTLGQNVLVIAPHNLESIVRQPPDRWMTNARMTHYQSLLLNERVSFAPPAILNPATLLPVESDDTPIHICSEILAEETGTRPDLRDQPLPGVPAWYTDGSSFIMDGRRQAGAAIVDNKRTVWASNLPEGTSAQKAELIALTQALRLAEGKSINIYTDSRYAFATAHVHGAIYKQRGWLTSAGKDIKNKEEILALLEAIHLPKRVAIIHCPGHQRGTDPVATGNRKADEAAKQAAQSTRILTETTKNAGKRTADGSEFEKRTADGSEFESPKKKAKVE

SEQ ID NO: 1661 - protein, 2125 aa, synthetic construct
MPAAKRVKLDGGDKKYSIGLDIGTNSVGWAVITDEYKVPSKKFKVLGNTDRHSIKKNLIGALLFDSGETAEATRLKRTARRRYTRRKNRICYLQEIFSNEMAKVDDSFFHRLEESFLVEEDKKHERHPIFGNIVDEVAYHEKYPTIYHLRKKLVDSTDKADLRLIYLALAHMIKFRGHFLIEGDLNPDNSDVDKLFIQLVQTYNQLFEENPINASGVDAKAILSARLSKSRRLENLIAQLPGEKKNGLFGNLIALSLGLTPNFKSNFDLAEDAKLQLSKDTYDDDLDNLLAQIGDQYADLFLAAKNLSDAILLSDILRVNTEITKAPLSASMIKRYDEHHQDLTLLKALVRQQLPEKYKEIFFDQSKNGYAGYIDGGASQEEFYKFIKPILEKMDGTEELLVKLNREDLLRKQRTFDNGSIPHQIHLGELHAILRRQEDFYPFLKDNREKIEKILTFRIPYYVGPLARGNSRFAWMTRKSEETITPWNFEEVVDKGASAQSFIERMTNFDKNLPNEKVLPKHSLLYEYFTVYNELTKVKYVTEGMRKPAFLSGEQKKAIVDLLFKTNRKVTVKQLKEDYFKKIECFDSVEISGVEDRFNASLGTYHDLLKIIKDKDFLDNEENEDILEDIVLTLTLFEDREMIEERLKTYAHLFDDKVMKQLKRRRYTGWGRLSRKLINGIRDKQSGKTILDFLKSDGFANRNFMQLIHDDSLTFKEDIQKAQVSGQGDSLHEHIANLAGSPAIKKGILQTVKVVDELVKVMGRHKPENIVIEMARENQTTQKGQKNSRERMKRIEEGIKELGSQILKEHPVENTQLQNEKLYLYYLQNGRDMYVDQELDINRLSDYDVDHIVPQSFLKDDSIDNKVLTRSDKARGKSDNVPSEEVVKKMKNYWRQLLNAKLITQRKFDNLTKAERGGLSELDKAGFIKRQLVETRQITKHVAQILDSRMNTKYDENDKLIREVKVITLKSKLVSDFRKDFQFYKVREINNYHHAHDAYLNAVVGTALIKKYPKLESEFVYGDYKVYDVRKMIAKSEQEIGKATAKYFFYSNIMNFFKTEITLANGEIRKRPLIETNGETGEIVWDKGRDFATVRKVLSMPQVNIVKKTEVQTGGFSKESILPKRNSDKLIARKKDWDPKKYGGFDSPTVAYSVLVVAKVEKGKSKKLKSVKELLGITIMERSSFEKNPIDFLEAKGYKEVKKDLIIKLPKYSLFELENGRKRMLASAGELQKGNELALPSKYVNFLYLASHYEKLKGSPEDNEQKQLFVEQHKHYLDEIIEQISEFSKRVILADANLDKVLSAYNKHRDKPIREQAENIIHLFTLTNLGAPAAFKYFDTTIDRKRYTSTKEVLDATLIHQSITGLYETRIDLSQLGGDGGGSSGGSPAPGGLLGRDLLTKLKAQIQFSTEGPQVTWEDRPAMCLVLNLEEEYRLHEKPVPPSIDPSWLQLFPMVWAEKAGMGLANQVPPVVVELKSDASPVAVRQYPMSKEAREGIRPHIQRFLDLGILVPCQSPWNTPLLPVKKPGTNDYRPVQDLREVNKRVQDIHPTVPNPYNLLSSLPPSHTWYSVLDLKDAFFCLKLHPNSQPLFAFEWRDPEKGNTGQLTWTRLPQGFKNSPTLFNEALHRDLASFRALNPQVVMLQYVDDLLVAAPTYRDCKEGTRRLLQELSKLGYRVSAKKAQLCREEVTYLGYLLKGGKRWLTPARKATVMKIPTPTTPRQVREFLGTAGFCRLWIPGFASLAAPLYPLTRPKVPFTWTEAHQEAFGRIKEALLSAPALALPDLTKPFALYVDEKEGVARGVLTQTLGPWRRPVAYLSKKLDPVASGWPTCLKAIAAVALLLKDADKLTLGQNVLVIAPHNLESIVRQPPDRWMTNARMTHYQSLLLNERVSFAPPAILNPATLLPVESDDTPIHICSEILAEETGTRPDLRDQPLPGVPAWYTDGSSFIMDGRRQAGAAIVDNKRTVWASNLPEGTSAQKAELIALTQALRLAEGKSINIYTDSRYAFATAHVHGAIYKQRGWLTSAGKDIKNKEEILALLEAIHLPKRVAIIHCPGHQRGTDPVATGNRKADEAAKQAAQSTRILTETTKNAGKRTADGSEFEKRTADGSEFESPKKKAKVE

SEQ ID NO: 1662 - protein, 2146 aa, synthetic construct
MPAAKRVKLDGGDKKYSIGLDIGTNSVGWAVITDEYKVPSKKFKVLGNTDRHSIKKNLIGALLFDSGETAEATRLKRTARRRYTRRKNRICYLQEIFSNEMAKVDDSFFHRLEESFLVEEDKKHERHPIFGNIVDEVAYHEKYPTIYHLRKKLVDSTDKADLRLIYLALAHMIKFRGHFLIEGDLNPDNSDVDKLFIQLVQTYNQLFEENPINASGVDAKAILSARLSKSRRLENLIAQLPGEKKNGLFGNLIALSLGLTPNFKSNFDLAEDAKLQLSKDTYDDDLDNLLAQIGDQYADLFLAAKNLSDAILLSDILRVNTEITKAPLSASMIKRYDEHHQDLTLLKALVRQQLPEKYKEIFFDQSKNGYAGYIDGGASQEEFYKFIKPILEKMDGTEELLVKLNREDLLRKQRTFDNGSIPHQIHLGELHAILRRQEDFYPFLKDNREKIEKILTFRIPYYVGPLARGNSRFAWMTRKSEETITPWNFEEVVDKGASAQSFIERMTNFDKNLPNEKVLPKHSLLYEYFTVYNELTKVKYVTEGMRKPAFLSGEQKKAIVDLLFKTNRKVTVKQLKEDYFKKIECFDSVEISGVEDRFNASLGTYHDLLKIIKDKDFLDNEENEDILEDIVLTLTLFEDREMIEERLKTYAHLFDDKVMKQLKRRRYTGWGRLSRKLINGIRDKQSGKTILDFLKSDGFANRNFMQLIHDDSLTFKEDIQKAQVSGQGDSLHEHIANLAGSPAIKKGILQTVKVVDELVKVMGRHKPENIVIEMARENQTTQKGQKNSRERMKRIEEGIKELGSQILKEHPVENTQLQNEKLYLYYLQNGRDMYVDQELDINRLSDYDVDHIVPQSFLKDDSIDNKVLTRSDKARGKSDNVPSEEVVKKMKNYWRQLLNAKLITQRKFDNLTKAERGGLSELDKAGFIKRQLVETRQITKHVAQILDSRMNTKYDENDKLIREVKVITLKSKLVSDFRKDFQFYKVREINNYHHAHDAYLNAVVGTALIKKYPKLESEFVYGDYKVYDVRKMIAKSEQEIGKATAKYFFYSNIMNFFKTEITLANGEIRKRPLIETNGETGEIVWDKGRDFATVRKVLSMPQVNIVKKTEVQTGGFSKESILPKRNSDKLIARKKDWDPKKYGGFDSPTVAYSVLVVAKVEKGKSKKLKSVKELLGITIMERSSFEKNPIDFLEAKGYKEVKKDLIIKLPKYSLFELENGRKRMLASAGELQKGNELALPSKYVNFLYLASHYEKLKGSPEDNEQKQLFVEQHKHYLDEIIEQISEFSKRVILADANLDKVLSAYNKHRDKPIREQAENIIHLFTLTNLGAPAAFKYFDTTIDRKRYTSTKEVLDATLIHQSITGLYETRIDLSQLGGDGGGGGGSGGGGSGGGGSGGGGSGGGGSGGGGSGGLLGRDLLTKLKAQIQFSTEGPQVTWEDRPAMCLVLNLEEEYRLHEKPVPPSIDPSWLQLFPMVWAEKAGMGLANQVPPVVVELKSDASPVAVRQYPMSKEAREGIRPHIQRFLDLGILVPCQSPWNTPLLPVKKPGTNDYRPVQDLREVNKRVQDIHPTVPNPYNLLSSLPPSHTWYSVLDLKDAFFCLKLHPNSQPLFAFEWRDPEKGNTGQLTWTRLPQGFKNSPTLFNEALHRDLASFRALNPQVVMLQYVDDLLVAAPTYRDCKEGTRRLLQELSKLGYRVSAKKAQLCREEVTYLGYLLKGGKRWLTPARKATVMKIPTPTTPRQVREFLGKAGFCRLFIPGFASLAAPLYPLTRPKVPFTWTEAHQEAFGRIKEALLSAPALALPDLTKPFALYVDEKEGVARGVLTQTLGPWRRPVAYLSKKLDPVASGWPTCLKAIAAVALLLKDADKLTLGQNVLVIAPHNLESIVRQPPDRWMTNARMTHYQSLLLNERVSFAPPAILNPATLLPVESDDTPIHICSEILAEETGTRPDLRDQPLPGVPAWYTDGSSFIMDGRRQAGAAIVDNKRTVWASNLPEGTSAQKAELIALTQALRLAEGKSINIYTDSRYAFATAHVHGAIYKQRGWLTSAGKDIKNKEEILALLEAIHLPKRVAIIHCPGHQRGTDPVATGNRKADEAAKQAAQSTRILTETTKNAGKRTADGSEFEKRTADGSEFESPKKKAKVE

SEQ ID NO: 1663 - protein, 2127 aa, synthetic construct
MPAAKRVKLDGGDKKYSIGLDIGTNSVGWAVITDEYKVPSKKFKVLGNTDRHSIKKNLIGALLFDSGETAEATRLKRTARRRYTRRKNRICYLQEIFSNEMAKVDDSFFHRLEESFLVEEDKKHERHPIFGNIVDEVAYHEKYPTIYHLRKKLVDSTDKADLRLIYLALAHMIKFRGHFLIEGDLNPDNSDVDKLFIQLVQTYNQLFEENPINASGVDAKAILSARLSKSRRLENLIAQLPGEKKNGLFGNLIALSLGLTPNFKSNFDLAEDAKLQLSKDTYDDDLDNLLAQIGDQYADLFLAAKNLSDAILLSDILRVNTEITKAPLSASMIKRYDEHHQDLTLLKALVRQQLPEKYKEIFFDQSKNGYAGYIDGGASQEEFYKFIKPILEKMDGTEELLVKLNREDLLRKQRTFDNGSIPHQIHLGELHAILRRQEDFYPFLKDNREKIEKILTFRIPYYVGPLARGNSRFAWMTRKSEETITPWNFEEVVDKGASAQSFIERMTNFDKNLPNEKVLPKHSLLYEYFTVYNELTKVKYVTEGMRKPAFLSGEQKKAIVDLLFKTNRKVTVKQLKEDYFKKIECFDSVEISGVEDRFNASLGTYHDLLKIIKDKDFLDNEENEDILEDIVLTLTLFEDREMIEERLKTYAHLFDDKVMKQLKRRRYTGWGRLSRKLINGIRDKQSGKTILDFLKSDGFANRNFMQLIHDDSLTFKEDIQKAQVSGQGDSLHEHIANLAGSPAIKKGILQTVKVVDELVKVMGRHKPENIVIEMARENQTTQKGQKNSRERMKRIEEGIKELGSQILKEHPVENTQLQNEKLYLYYLQNGRDMYVDQELDINRLSDYDVDHIVPQSFLKDDSIDNKVLTRSDKARGKSDNVPSEEVVKKMKNYWRQLLNAKLITQRKFDNLTKAERGGLSELDKAGFIKRQLVETRQITKHVAQILDSRMNTKYDENDKLIREVKVITLKSKLVSDFRKDFQFYKVREINNYHHAHDAYLNAVVGTALIKKYPKLESEFVYGDYKVYDVRKMIAKSEQEIGKATAKYFFYSNIMNFFKTEITLANGEIRKRPLIETNGETGEIVWDKGRDFATVRKVLSMPQVNIVKKTEVQTGGFSKESILPKRNSDKLIARKKDWDPKKYGGFDSPTVAYSVLVVAKVEKGKSKKLKSVKELLGITIMERSSFEKNPIDFLEAKGYKEVKKDLIIKLPKYSLFELENGRKRMLASAGELQKGNELALPSKYVNFLYLASHYEKLKGSPEDNEQKQLFVEQHKHYLDEIIEQISEFSKRVILADANLDKVLSAYNKHRDKPIREQAENIIHLFTLTNLGAPAAFKYFDTTIDRKRYTSTKEVLDATLIHQSITGLYETRIDLSQLGGDGGPAPEAAAKGGGGGLLGRDLLTKLKAQIQFSTEGPQVTWEDRPAMCLVLNLEEEYRLHEKPVPPSIDPSWLQLFPMVWAEKAGMGLANQVPPVVVELKSDASPVAVRQYPMSKEAREGIRPHIQRFLDLGILVPCQSPWNTPLLPVKKPGTNDYRPVQDLREVNKRVQDIHPTVPNPYNLLSSLPPSHTWYSVLDLKDAFFCLKLHPNSQPLFAFEWRDPEKGNTGQLTWTRLPQGFKNSPTLFNEALHRDLASFRALNPQVVMLQYVDDLLVAAPTYRDCKEGTRRLLQELSKLGYRVSAKKAQLCREEVTYLGYLLKGGKRWLTPARKATVMKIPTPTTPRQVREFLGKAGFCRLFIPGFASLAAPLYPLTRPKVPFTWTEAHQEAFGRIKEALLSAPALALPDLTKPFALYVDEKEGVARGVLTQTLGPWRRPVAYLSKKLDPVASGWPTCLKAIAAVALLLKDADKLTLGQNVLVIAPHNLESIVRQPPDRWMTNARMTHYQSLLLNERVSFAPPAILNPATLLPVESDDTPIHICSEILAEETGTRPDLRDQPLPGVPAWYTDGSSFIMDGRRQAGAAIVDNKRTVWASNLPEGTSAQKAELIALTQALRLAEGKSINIYTDSRYAFATAHVHGAIYKQRGWLTSAGKDIKNKEEILALLEAIHLPKRVAIIHCPGHQRGTDPVATGNRKADEAAKQAAQSTRILTETTKNAGKRTADGSEFEKRTADGSEFESPKKKAKVE

SEQ ID NO: 1664 - protein, 2127 aa, synthetic construct
MPAAKRVKLDGGDKKYSIGLDIGTNSVGWAVITDEYKVPSKKFKVLGNTDRHSIKKNLIGALLFDSGETAEATRLKRTARRRYTRRKNRICYLQEIFSNEMAKVDDSFFHRLEESFLVEEDKKHERHPIFGNIVDEVAYHEKYPTIYHLRKKLVDSTDKADLRLIYLALAHMIKFRGHFLIEGDLNPDNSDVDKLFIQLVQTYNQLFEENPINASGVDAKAILSARLSKSRRLENLIAQLPGEKKNGLFGNLIALSLGLTPNFKSNFDLAEDAKLQLSKDTYDDDLDNLLAQIGDQYADLFLAAKNLSDAILLSDILRVNTEITKAPLSASMIKRYDEHHQDLTLLKALVRQQLPEKYKEIFFDQSKNGYAGYIDGGASQEEFYKFIKPILEKMDGTEELLVKLNREDLLRKQRTFDNGSIPHQIHLGELHAILRRQEDFYPFLKDNREKIEKILTFRIPYYVGPLARGNSRFAWMTRKSEETITPWNFEEVVDKGASAQSFIERMTNFDKNLPNEKVLPKHSLLYEYFTVYNELTKVKYVTEGMRKPAFLSGEQKKAIVDLLFKTNRKVTVKQLKEDYFKKIECFDSVEISGVEDRFNASLGTYHDLLKIIKDKDFLDNEENEDILEDIVLTLTLFEDREMIEERLKTYAHLFDDKVMKQLKRRRYTGWGRLSRKLINGIRDKQSGKTILDFLKSDGFANRNFMQLIHDDSLTFKEDIQKAQVSGQGDSLHEHIANLAGSPAIKKGILQTVKVVDELVKVMGRHKPENIVIEMARENQTTQKGQKNSRERMKRIEEGIKELGSQILKEHPVENTQLQNEKLYLYYLQNGRDMYVDQELDINRLSDYDVDHIVPQSFLKDDSIDNKVLTRSDKARGKSDNVPSEEVVKKMKNYWRQLLNAKLITQRKFDNLTKAERGGLSELDKAGFIKRQLVETRQITKHVAQILDSRMNTKYDENDKLIREVKVITLKSKLVSDFRKDFQFYKVREINNYHHAHDAYLNAVVGTALIKKYPKLESEFVYGDYKVYDVRKMIAKSEQEIGKATAKYFFYSNIMNFFKTEITLANGEIRKRPLIETNGETGEIVWDKGRDFATVRKVLSMPQVNIVKKTEVQTGGFSKESILPKRNSDKLIARKKDWDPKKYGGFDSPTVAYSVLVVAKVEKGKSKKLKSVKELLGITIMERSSFEKNPIDFLEAKGYKEVKKDLIIKLPKYSLFELENGRKRMLASAGELQKGNELALPSKYVNFLYLASHYEKLKGSPEDNEQKQLFVEQHKHYLDEIIEQISEFSKRVILADANLDKVLSAYNKHRDKPIREQAENIIHLFTLTNLGAPAAFKYFDTTIDRKRYTSTKEVLDATLIHQSITGLYETRIDLSQLGGDGGEAAAKGSSPAPGGLLGRDLLTKLKAQIQFSTEGPQVTWEDRPAMCLVLNLEEEYRLHEKPVPPSIDPSWLQLFPMVWAEKAGMGLANQVPPVVVELKSDASPVAVRQYPMSKEAREGIRPHIQRFLDLGILVPCQSPWNTPLLPVKKPGTNDYRPVQDLREVNKRVQDIHPTVPNPYNLLSSLPPSHTWYSVLDLKDAFFCLKLHPNSQPLFAFEWRDPEKGNTGQLTWTRLPQGFKNSPTLFNEALHRDLASFRALNPQVVMLQYVDDLLVAAPTYRDCKEGTRRLLQELSKLGYRVSAKKAQLCREEVTYLGYLLKGGKRWLTPARKATVMKIPTPTTPRQVREFLGKAGFCRLFIPGFASLAAPLYPLTRPKVPFTWTEAHQEAFGRIKEALLSAPALALPDLTKPFALYVDEKEGVARGVLTQTLGPWRRPVAYLSKKLDPVASGWPTCLKAIAAVALLLKDADKLTLGQNVLVIAPHNLESIVRQPPDRWMTNARMTHYQSLLLNERVSFAPPAILNPATLLPVESDDTPIHICSEILAEETGTRPDLRDQPLPGVPAWYTDGSSFIMDGRRQAGAAIVDNKRTVWASNLPEGTSAQKAELIALTQALRLAEGKSINIYTDSRYAFATAHVHGAIYKQRGWLTSAGKDIKNKEEILALLEAIHLPKRVAIIHCPGHQRGTDPVATGNRKADEAAKQAAQSTRILTETTKNAGKRTADGSEFEKRTADGSEFESPKKKAKVE

SEQ ID NO: 1665 - protein, 2131 aa, synthetic construct
MPAAKRVKLDGGDKKYSIGLDIGTNSVGWAVITDEYKVPSKKFKVLGNTDRHSIKKNLIGALLFDSGETAEATRLKRTARRRYTRRKNRICYLQEIFSNEMAKVDDSFFHRLEESFLVEEDKKHERHPIFGNIVDEVAYHEKYPTIYHLRKKLVDSTDKADLRLIYLALAHMIKFRGHFLIEGDLNPDNSDVDKLFIQLVQTYNQLFEENPINASGVDAKAILSARLSKSRRLENLIAQLPGEKKNGLFGNLIALSLGLTPNFKSNFDLAEDAKLQLSKDTYDDDLDNLLAQIGDQYADLFLAAKNLSDAILLSDILRVNTEITKAPLSASMIKRYDEHHQDLTLLKALVRQQLPEKYKEIFFDQSKNGYAGYIDGGASQEEFYKFIKPILEKMDGTEELLVKLNREDLLRKQRTFDNGSIPHQIHLGELHAILRRQEDFYPFLKDNREKIEKILTFRIPYYVGPLARGNSRFAWMTRKSEETITPWNFEEVVDKGASAQSFIERMTNFDKNLPNEKVLPKHSLLYEYFTVYNELTKVKYVTEGMRKPAFLSGEQKKAIVDLLFKTNRKVTVKQLKEDYFKKIECFDSVEISGVEDRFNASLGTYHDLLKIIKDKDFLDNEENEDILEDIVLTLTLFEDREMIEERLKTYAHLFDDKVMKQLKRRRYTGWGRLSRKLINGIRDKQSGKTILDFLKSDGFANRNFMQLIHDDSLTFKEDIQKAQVSGQGDSLHEHIANLAGSPAIKKGILQTVKVVDELVKVMGRHKPENIVIEMARENQTTQKGQKNSRERMKRIEEGIKELGSQILKEHPVENTQLQNEKLYLYYLQNGRDMYVDQELDINRLSDYDVDHIVPQSFLKDDSIDNKVLTRSDKARGKSDNVPSEEVVKKMKNYWRQLLNAKLITQRKFDNLTKAERGGLSELDKAGFIKRQLVETRQITKHVAQILDSRMNTKYDENDKLIREVKVITLKSKLVSDFRKDFQFYKVREINNYHHAHDAYLNAVVGTALIKKYPKLESEFVYGDYKVYDVRKMIAKSEQEIGKATAKYFFYSNIMNFFKTEITLANGEIRKRPLIETNGETGEIVWDKGRDFATVRKVLSMPQVNIVKKTEVQTGGFSKESILPKRNSDKLIARKKDWDPKKYGGFDSPTVAYSVLVVAKVEKGKSKKLKSVKELLGITIMERSSFEKNPIDFLEAKGYKEVKKDLIIKLPKYSLFELENGRKRMLASAGELQKGNELALPSKYVNFLYLASHYEKLKGSPEDNEQKQLFVEQHKHYLDEIIEQISEFSKRVILADANLDKVLSAYNKHRDKPIREQAENIIHLFTLTNLGAPAAFKYFDTTIDRKRYTSTKEVLDATLIHQSITGLYETRIDLSQLGGDGGGGSGGSGGSGGSGGSGGLLGRDLLTKLKAQIQFSTEGPQVTWEDRPAMCLVLNLEEEYRLHEKPVPPSIDPSWLQLFPMVWAEKAGMGLANQVPPVVVELKSDASPVAVRQYPMSKEAREGIRPHIQRFLDLGILVPCQSPWNTPLLPVKKPGTNDYRPVQDLREVNKRVQDIHPTVPNPYNLLSSLPPSHTWYSVLDLKDAFFCLKLHPNSQPLFAFEWRDPEKGNTGQLTWTRLPQGFKNSPTLFNEALHRDLASFRALNPQVVMLQYVDDLLVAAPTYRDCKEGTRRLLQELSKLGYRVSAKKAQLCREEVTYLGYLLKGGKRWLTPARKATVMKIPTPTTPRQVREFLGKAGFCRLFIPGFASLAAPLYPLTRPKVPFTWTEAHQEAFGRIKEALLSAPALALPDLTKPFALYVDEKEGVARGVLTQTLGPWRRPVAYLSKKLDPVASGWPTCLKAIAAVALLLKDADKLTLGQNVLVIAPHNLESIVRQPPDRWMTNARMTHYQSLLLNERVSFAPPAILNPATLLPVESDDTPIHICSEILAEETGTRPDLRDQPLPGVPAWYTDGSSFIMDGRRQAGAAIVDNKRTVWASNLPEGTSAQKAELIALTQALRLAEGKSINIYTDSRYAFATAHVHGAIYKQRGWLTSAGKDIKNKEEILALLEAIHLPKRVAIIHCPGHQRGTDPVATGNRKADEAAKQAAQSTRILTETTKNAGKRTADGSEFEKRTADGSEFESPKKKAKVE

SEQ ID NO: 1666 - protein, 2127 aa, synthetic construct
MPAAKRVKLDGGDKKYSIGLDIGTNSVGWAVITDEYKVPSKKFKVLGNTDRHSIKKNLIGALLFDSGETAEATRLKRTARRRYTRRKNRICYLQEIFSNEMAKVDDSFFHRLEESFLVEEDKKHERHPIFGNIVDEVAYHEKYPTIYHLRKKLVDSTDKADLRLIYLALAHMIKFRGHFLIEGDLNPDNSDVDKLFIQLVQTYNQLFEENPINASGVDAKAILSARLSKSRRLENLIAQLPGEKKNGLFGNLIALSLGLTPNFKSNFDLAEDAKLQLSKDTYDDDLDNLLAQIGDQYADLFLAAKNLSDAILLSDILRVNTEITKAPLSASMIKRYDEHHQDLTLLKALVRQQLPEKYKEIFFDQSKNGYAGYIDGGASQEEFYKFIKPILEKMDGTEELLVKLNREDLLRKQRTFDNGSIPHQIHLGELHAILRRQEDFYPFLKDNREKIEKILTFRIPYYVGPLARGNSRFAWMTRKSEETITPWNFEEVVDKGASAQSFIERMTNFDKNLPNEKVLPKHSLLYEYFTVYNELTKVKYVTEGMRKPAFLSGEQKKAIVDLLFKTNRKVTVKQLKEDYFKKIECFDSVEISGVEDRFNASLGTYHDLLKIIKDKDFLDNEENEDILEDIVLTLTLFEDREMIEERLKTYAHLFDDKVMKQLKRRRYTGWGRLSRKLINGIRDKQSGKTILDFLKSDGFANRNFMQLIHDDSLTFKEDIQKAQVSGQGDSLHEHIANLAGSPAIKKGILQTVKVVDELVKVMGRHKPENIVIEMARENQTTQKGQKNSRERMKRIEEGIKELGSQILKEHPVENTQLQNEKLYLYYLQNGRDMYVDQELDINRLSDYDVDHIVPQSFLKDDSIDNKVLTRSDKARGKSDNVPSEEVVKKMKNYWRQLLNAKLITQRKFDNLTKAERGGLSELDKAGFIKRQLVETRQITKHVAQILDSRMNTKYDENDKLIREVKVITLKSKLVSDFRKDFQFYKVREINNYHHAHDAYLNAVVGTALIKKYPKLESEFVYGDYKVYDVRKMIAKSEQEIGKATAKYFFYSNIMNFFKTEITLANGEIRKRPLIETNGETGEIVWDKGRDFATVRKVLSMPQVNIVKKTEVQTGGFSKESILPKRNSDKLIARKKDWDPKKYGGFDSPTVAYSVLVVAKVEKGKSKKLKSVKELLGITIMERSSFEKNPIDFLEAKGYKEVKKDLIIKLPKYSLFELENGRKRMLASAGELQKGNELALPSKYVNFLYLASHYEKLKGSPEDNEQKQLFVEQHKHYLDEIIEQISEFSKRVILADANLDKVLSAYNKHRDKPIREQAENIIHLFTLTNLGAPAAFKYFDTTIDRKRYTSTKEVLDATLIHQSITGLYETRIDLSQLGGDGGGGSPAPEAAAKGGLLGRDLLTKLKAQIQFSTEGPQVTWEDRPAMCLVLNLEEEYRLHEKPVPPSIDPSWLQLFPMVWAEKAGMGLANQVPPVVVELKSDASPVAVRQYPMSKEAREGIRPHIQRFLDLGILVPCQSPWNTPLLPVKKPGTNDYRPVQDLREVNKRVQDIHPTVPNPYNLLSSLPPSHTWYSVLDLKDAFFCLKLHPNSQPLFAFEWRDPEKGNTGQLTWTRLPQGFKNSPTLFNEALHRDLASFRALNPQVVMLQYVDDLLVAAPTYRDCKEGTRRLLQELSKLGYRVSAKKAQLCREEVTYLGYLLKGGKRWLTPARKATVMKIPTPTTPRQVREFLGKAGFCRLFIPGFASLAAPLYPLTRPKVPFTWTEAHQEAFGRIKEALLSAPALALPDLTKPFALYVDEKEGVARGVLTQTLGPWRRPVAYLSKKLDPVASGWPTCLKAIAAVALLLKDADKLTLGQNVLVIAPHNLESIVRQPPDRWMTNARMTHYQSLLLNERVSFAPPAILNPATLLPVESDDTPIHICSEILAEETGTRPDLRDQPLPGVPAWYTDGSSFIMDGRRQAGAAIVDNKRTVWASNLPEGTSAQKAELIALTQALRLAEGKSINIYTDSRYAFATAHVHGAIYKQRGWLTSAGKDIKNKEEILALLEAIHLPKRVAIIHCPGHQRGTDPVATGNRKADEAAKQAAQSTRILTETTKNAGKRTADGSEFEKRTADGSEFESPKKKAKVE

SEQ ID NO: 1667 - protein, 2134 aa, synthetic construct
MPAAKRVKLDGGDKKYSIGLDIGTNSVGWAVITDEYKVPSKKFKVLGNTDRHSIKKNLIGALLFDSGETAEATRLKRTARRRYTRRKNRICYLQEIFSNEMAKVDDSFFHRLEESFLVEEDKKHERHPIFGNIVDEVAYHEKYPTIYHLRKKLVDSTDKADLRLIYLALAHMIKFRGHFLIEGDLNPDNSDVDKLFIQLVQTYNQLFEENPINASGVDAKAILSARLSKSRRLENLIAQLPGEKKNGLFGNLIALSLGLTPNFKSNFDLAEDAKLQLSKDTYDDDLDNLLAQIGDQYADLFLAAKNLSDAILLSDILRVNTEITKAPLSASMIKRYDEHHQDLTLLKALVRQQLPEKYKEIFFDQSKNGYAGYIDGGASQEEFYKFIKPILEKMDGTEELLVKLNREDLLRKQRTFDNGSIPHQIHLGELHAILRRQEDFYPFLKDNREKIEKILTFRIPYYVGPLARGNSRFAWMTRKSEETITPWNFEEVVDKGASAQSFIERMTNFDKNLPNEKVLPKHSLLYEYFTVYNELTKVKYVTEGMRKPAFLSGEQKKAIVDLLFKTNRKVTVKQLKEDYFKKIECFDSVEISGVEDRFNASLGTYHDLLKIIKDKDFLDNEENEDILEDIVLTLTLFEDREMIEERLKTYAHLFDDKVMKQLKRRRYTGWGRLSRKLINGIRDKQSGKTILDFLKSDGFANRNFMQLIHDDSLTFKEDIQKAQVSGQGDSLHEHIANLAGSPAIKKGILQTVKVVDELVKVMGRHKPENIVIEMARENQTTQKGQKNSRERMKRIEEGIKELGSQILKEHPVENTQLQNEKLYLYYLQNGRDMYVDQELDINRLSDYDVDHIVPQSFLKDDSIDNKVLTRSDKARGKSDNVPSEEVVKKMKNYWRQLLNAKLITQRKFDNLTKAERGGLSELDKAGFIKRQLVETRQITKHVAQILDSRMNTKYDENDKLIREVKVITLKSKLVSDFRKDFQFYKVREINNYHHAHDAYLNAVVGTALIKKYPKLESEFVYGDYKVYDVRKMIAKSEQEIGKATAKYFFYSNIMNFFKTEITLANGEIRKRPLIETNGETGEIVWDKGRDFATVRKVLSMPQVNIVKKTEVQTGGFSKESILPKRNSDKLIARKKDWDPKKYGGFDSPTVAYSVLVVAKVEKGKSKKLKSVKELLGITIMERSSFEKNPIDFLEAKGYKEVKKDLIIKLPKYSLFELENGRKRMLASAGELQKGNELALPSKYVNFLYLASHYEKLKGSPEDNEQKQLFVEQHKHYLDEIIEQISEFSKRVILADANLDKVLSAYNKHRDKPIREQAENIIHLFTLTNLGAPAAFKYFDTTIDRKRYTSTKEVLDATLIHQSITGLYETRIDLSQLGGDGGGSSGSSGSSGSSGSSGSSGGLLGRDLLTKLKAQIQFSTEGPQVTWEDRPAMCLVLNLEEEYRLHEKPVPPSIDPSWLQLFPMVWAEKAGMGLANQVPPVVVELKSDASPVAVRQYPMSKEAREGIRPHIQRFLDLGILVPCQSPWNTPLLPVKKPGTNDYRPVQDLREVNKRVQDIHPTVPNPYNLLSSLPPSHTWYSVLDLKDAFFCLKLHPNSQPLFAFEWRDPEKGNTGQLTWTRLPQGFKNSPTLFNEALHRDLASFRALNPQVVMLQYVDDLLVAAPTYRDCKEGTRRLLQELSKLGYRVSAKKAQLCREEVTYLGYLLKGGKRWLTPARKATVMKIPTPTTPRQVREFLGKAGFCRLFIPGFASLAAPLYPLTRPKVPFTWTEAHQEAFGRIKEALLSAPALALPDLTKPFALYVDEKEGVARGVLTQTLGPWRRPVAYLSKKLDPVASGWPTCLKAIAAVALLLKDADKLTLGQNVLVIAPHNLESIVRQPPDRWMTNARMTHYQSLLLNERVSFAPPAILNPATLLPVESDDTPIHICSEILAEETGTRPDLRDQPLPGVPAWYTDGSSFIMDGRRQAGAAIVDNKRTVWASNLPEGTSAQKAELIALTQALRLAEGKSINIYTDSRYAFATAHVHGAIYKQRGWLTSAGKDIKNKEEILALLEAIHLPKRVAIIHCPGHQRGTDPVATGNRKADEAAKQAAQSTRILTETTKNAGKRTADGSEFEKRTADGSEFESPKKKAKVE

SEQ ID NO: 1668 - protein, 2122 aa, synthetic construct
MPAAKRVKLDGGDKKYSIGLDIGTNSVGWAVITDEYKVPSKKFKVLGNTDRHSIKKNLIGALLFDSGETAEATRLKRTARRRYTRRKNRICYLQEIFSNEMAKVDDSFFHRLEESFLVEEDKKHERHPIFGNIVDEVAYHEKYPTIYHLRKKLVDSTDKADLRLIYLALAHMIKFRGHFLIEGDLNPDNSDVDKLFIQLVQTYNQLFEENPINASGVDAKAILSARLSKSRRLENLIAQLPGEKKNGLFGNLIALSLGLTPNFKSNFDLAEDAKLQLSKDTYDDDLDNLLAQIGDQYADLFLAAKNLSDAILLSDILRVNTEITKAPLSASMIKRYDEHHQDLTLLKALVRQQLPEKYKEIFFDQSKNGYAGYIDGGASQEEFYKFIKPILEKMDGTEELLVKLNREDLLRKQRTFDNGSIPHQIHLGELHAILRRQEDFYPFLKDNREKIEKILTFRIPYYVGPLARGNSRFAWMTRKSEETITPWNFEEVVDKGASAQSFIERMTNFDKNLPNEKVLPKHSLLYEYFTVYNELTKVKYVTEGMRKPAFLSGEQKKAIVDLLFKTNRKVTVKQLKEDYFKKIECFDSVEISGVEDRFNASLGTYHDLLKIIKDKDFLDNEENEDILEDIVLTLTLFEDREMIEERLKTYAHLFDDKVMKQLKRRRYTGWGRLSRKLINGIRDKQSGKTILDFLKSDGFANRNFMQLIHDDSLTFKEDIQKAQVSGQGDSLHEHIANLAGSPAIKKGILQTVKVVDELVKVMGRHKPENIVIEMARENQTTQKGQKNSRERMKRIEEGIKELGSQILKEHPVENTQLQNEKLYLYYLQNGRDMYVDQELDINRLSDYDVDHIVPQSFLKDDSIDNKVLTRSDKARGKSDNVPSEEVVKKMKNYWRQLLNAKLITQRKFDNLTKAERGGLSELDKAGFIKRQLVETRQITKHVAQILDSRMNTKYDENDKLIREVKVITLKSKLVSDFRKDFQFYKVREINNYHHAHDAYLNAVVGTALIKKYPKLESEFVYGDYKVYDVRKMIAKSEQEIGKATAKYFFYSNIMNFFKTEITLANGEIRKRPLIETNGETGEIVWDKGRDFATVRKVLSMPQVNIVKKTEVQTGGFSKESILPKRNSDKLIARKKDWDPKKYGGFDSPTVAYSVLVVAKVEKGKSKKLKSVKELLGITIMERSSFEKNPIDFLEAKGYKEVKKDLIIKLPKYSLFELENGRKRMLASAGELQKGNELALPSKYVNFLYLASHYEKLKGSPEDNEQKQLFVEQHKHYLDEIIEQISEFSKRVILADANLDKVLSAYNKHRDKPIREQAENIIHLFTLTNLGAPAAFKYFDTTIDRKRYTSTKEVLDATLIHQSITGLYETRIDLSQLGGDGGGGSGGGGGLLGRDLLTKLKAQIQFSTEGPQVTWEDRPAMCLVLNLEEEYRLHEKPVPPSIDPSWLQLFPMVWAEKAGMGLANQVPPVVVELKSDASPVAVRQYPMSKEAREGIRPHIQRFLDLGILVPCQSPWNTPLLPVKKPGTNDYRPVQDLREVNKRVQDIHPTVPNPYNLLSSLPPSHTWYSVLDLKDAFFCLKLHPNSQPLFAFEWRDPEKGNTGQLTWTRLPQGFKNSPTLFNEALHRDLASFRALNPQVVMLQYVDDLLVAAPTYRDCKEGTRRLLQELSKLGYRVSAKKAQLCREEVTYLGYLLKGGKRWLTPARKATVMKIPTPTTPRQVREFLGKAGFCRLFIPGFASLAAPLYPLTRPKVPFTWTEAHQEAFGRIKEALLSAPALALPDLTKPFALYVDEKEGVARGVLTQTLGPWRRPVAYLSKKLDPVASGWPTCLKAIAAVALLLKDADKLTLGQNVLVIAPHNLESIVRQPPDRWMTNARMTHYQSLLLNERVSFAPPAILNPATLLPVESDDTPIHICSEILAEETGTRPDLRDQPLPGVPAWYTDGSSFIMDGRRQAGAAIVDNKRTVWASNLPEGTSAQKAELIALTQALRLAEGKSINIYTDSRYAFATAHVHGAIYKQRGWLTSAGKDIKNKEEILALLEAIHLPKRVAIIHCPGHQRGTDPVATGNRKADEAAKQAAQSTRILTETTKNAGKRTADGSEFEKRTADGSEFESPKKKAKVE

SEQ ID NO: 1669 - protein, 2124 aa, synthetic construct
MPAAKRVKLDGGDKKYSIGLDIGTNSVGWAVITDEYKVPSKKFKVLGNTDRHSIKKNLIGALLFDSGETAEATRLKRTARRRYTRRKNRICYLQEIFSNEMAKVDDSFFHRLEESFLVEEDKKHERHPIFGNIVDEVAYHEKYPTIYHLRKKLVDSTDKADLRLIYLALAHMIKFRGHFLIEGDLNPDNSDVDKLFIQLVQTYNQLFEENPINASGVDAKAILSARLSKSRRLENLIAQLPGEKKNGLFGNLIALSLGLTPNFKSNFDLAEDAKLQLSKDTYDDDLDNLLAQIGDQYADLFLAAKNLSDAILLSDILRVNTEITKAPLSASMIKRYDEHHQDLTLLKALVRQQLPEKYKEIFFDQSKNGYAGYIDGGASQEEFYKFIKPILEKMDGTEELLVKLNREDLLRKQRTFDNGSIPHQIHLGELHAILRRQEDFYPFLKDNREKIEKILTFRIPYYVGPLARGNSRFAWMTRKSEETITPWNFEEVVDKGASAQSFIERMTNFDKNLPNEKVLPKHSLLYEYFTVYNELTKVKYVTEGMRKPAFLSGEQKKAIVDLLFKTNRKVTVKQLKEDYFKKIECFDSVEISGVEDRFNASLGTYHDLLKIIKDKDFLDNEENEDILEDIVLTLTLFEDREMIEERLKTYAHLFDDKVMKQLKRRRYTGWGRLSRKLINGIRDKQSGKTILDFLKSDGFANRNFMQLIHDDSLTFKEDIQKAQVSGQGDSLHEHIANLAGSPAIKKGILQTVKVVDELVKVMGRHKPENIVIEMARENQTTQKGQKNSRERMKRIEEGIKELGSQILKEHPVENTQLQNEKLYLYYLQNGRDMYVDQELDINRLSDYDVDHIVPQSFLKDDSIDNKVLTRSDKARGKSDNVPSEEVVKKMKNYWRQLLNAKLITQRKFDNLTKAERGGLSELDKAGFIKRQLVETRQITKHVAQILDSRMNTKYDENDKLIREVKVITLKSKLVSDFRKDFQFYKVREINNYHHAHDAYLNAVVGTALIKKYPKLESEFVYGDYKVYDVRKMIAKSEQEIGKATAKYFFYSNIMNFFKTEITLANGEIRKRPLIETNGETGEIVWDKGRDFATVRKVLSMPQVNIVKKTEVQTGGFSKESILPKRNSDKLIARKKDWDPKKYGGFDSPTVAYSVLVVAKVEKGKSKKLKSVKELLGITIMERSSFEKNPIDFLEAKGYKEVKKDLIIKLPKYSLFELENGRKRMLASAGELQKGNELALPSKYVNFLYLASHYEKLKGSPEDNEQKQLFVEQHKHYLDEIIEQISEFSKRVILADANLDKVLSAYNKHRDKPIREQAENIIHLFTLTNLGAPAAFKYFDTTIDRKRYTSTKEVLDATLIHQSITGLYETRIDLSQLGGDGGPAPEAAAKGGLLGRDLLTKLKAQIQFSTEGPQVTWEDRPAMCLVLNLEEEYRLHEKPVPPSIDPSWLQLFPMVWAEKAGMGLANQVPPVVVELKSDASPVAVRQYPMSKEAREGIRPHIQRFLDLGILVPCQSPWNTPLLPVKKPGTNDYRPVQDLREVNKRVQDIHPTVPNPYNLLSSLPPSHTWYSVLDLKDAFFCLKLHPNSQPLFAFEWRDPEKGNTGQLTWTRLPQGFKNSPTLFNEALHRDLASFRALNPQVVMLQYVDDLLVAAPTYRDCKEGTRRLLQELSKLGYRVSAKKAQLCREEVTYLGYLLKGGKRWLTPARKATVMKIPTPTTPRQVREFLGKAGFCRLFIPGFASLAAPLYPLTRPKVPFTWTEAHQEAFGRIKEALLSAPALALPDLTKPFALYVDEKEGVARGVLTQTLGPWRRPVAYLSKKLDPVASGWPTCLKAIAAVALLLKDADKLTLGQNVLVIAPHNLESIVRQPPDRWMTNARMTHYQSLLLNERVSFAPPAILNPATLLPVESDDTPIHICSEILAEETGTRPDLRDQPLPGVPAWYTDGSSFIMDGRRQAGAAIVDNKRTVWASNLPEGTSAQKAELIALTQALRLAEGKSINIYTDSRYAFATAHVHGAIYKQRGWLTSAGKDIKNKEEILALLEAIHLPKRVAIIHCPGHQRGTDPVATGNRKADEAAKQAAQSTRILTETTKNAGKRTADGSEFEKRTADGSEFESPKKKAKVE

SEQ ID NO: 1670 - protein, 2162 aa, synthetic construct
MPAAKRVKLDGGDKKYSIGLDIGTNSVGWAVITDEYKVPSKKFKVLGNTDRHSIKKNLIGALLFDSGETAEATRLKRTARRRYTRRKNRICYLQEIFSNEMAKVDDSFFHRLEESFLVEEDKKHERHPIFGNIVDEVAYHEKYPTIYHLRKKLVDSTDKADLRLIYLALAHMIKFRGHFLIEGDLNPDNSDVDKLFIQLVQTYNQLFEENPINASGVDAKAILSARLSKSRRLENLIAQLPGEKKNGLFGNLIALSLGLTPNFKSNFDLAEDAKLQLSKDTYDDDLDNLLAQIGDQYADLFLAAKNLSDAILLSDILRVNTEITKAPLSASMIKRYDEHHQDLTLLKALVRQQLPEKYKEIFFDQSKNGYAGYIDGGASQEEFYKFIKPILEKMDGTEELLVKLNREDLLRKQRTFDNGSIPHQIHLGELHAILRRQEDFYPFLKDNREKIEKILTFRIPYYVGPLARGNSRFAWMTRKSEETITPWNFEEVVDKGASAQSFIERMTNFDKNLPNEKVLPKHSLLYEYFTVYNELTKVKYVTEGMRKPAFLSGEQKKAIVDLLFKTNRKVTVKQLKEDYFKKIECFDSVEISGVEDRFNASLGTYHDLLKIIKDKDFLDNEENEDILEDIVLTLTLFEDREMIEERLKTYAHLFDDKVMKQLKRRRYTGWGRLSRKLINGIRDKQSGKTILDFLKSDGFANRNFMQLIHDDSLTFKEDIQKAQVSGQGDSLHEHIANLAGSPAIKKGILQTVKVVDELVKVMGRHKPENIVIEMARENQTTQKGQKNSRERMKRIEEGIKELGSQILKEHPVENTQLQNEKLYLYYLQNGRDMYVDQELDINRLSDYDVDHIVPQSFLKDDSIDNKVLTRSDKARGKSDNVPSEEVVKKMKNYWRQLLNAKLITQRKFDNLTKAERGGLSELDKAGFIKRQLVETRQITKHVAQILDSRMNTKYDENDKLIREVKVITLKSKLVSDFRKDFQFYKVREINNYHHAHDAYLNAVVGTALIKKYPKLESEFVYGDYKVYDVRKMIAKSEQEIGKATAKYFFYSNIMNFFKTEITLANGEIRKRPLIETNGETGEIVWDKGRDFATVRKVLSMPQVNIVKKTEVQTGGFSKESILPKRNSDKLIARKKDWDPKKYGGFDSPTVAYSVLVVAKVEKGKSKKLKSVKELLGITIMERSSFEKNPIDFLEAKGYKEVKKDLIIKLPKYSLFELENGRKRMLASAGELQKGNELALPSKYVNFLYLASHYEKLKGSPEDNEQKQLFVEQHKHYLDEIIEQISEFSKRVILADANLDKVLSAYNKHRDKPIREQAENIIHLFTLTNLGAPAAFKYFDTTIDRKRYTSTKEVLDATLIHQSITGLYETRIDLSQLGGDGGAEAAAKEAAAKEAAAKEAAAKALEAEAAAKEAAAKEAAAKEAAAKAGGLLGRDLLTKLKAQIQFSTEGPQVTWEDRPAMCLVLNLEEEYRLHEKPVPPSIDPSWLQLFPMVWAEKAGMGLANQVPPVVVELKSDASPVAVRQYPMSKEAREGIRPHIQRFLDLGILVPCQSPWNTPLLPVKKPGTNDYRPVQDLREVNKRVQDIHPTVPNPYNLLSSLPPSHTWYSVLDLKDAFFCLKLHPNSQPLFAFEWRDPEKGNTGQLTWTRLPQGFKNSPTLFNEALHRDLASFRALNPQVVMLQYVDDLLVAAPTYRDCKEGTRRLLQELSKLGYRVSAKKAQLCREEVTYLGYLLKGGKRWLTPARKATVMKIPTPTTPRQVREFLGKAGFCRLFIPGFASLAAPLYPLTRPKVPFTWTEAHQEAFGRIKEALLSAPALALPDLTKPFALYVDEKEGVARGVLTQTLGPWRRPVAYLSKKLDPVASGWPTCLKAIAAVALLLKDADKLTLGQNVLVIAPHNLESIVRQPPDRWMTNARMTHYQSLLLNERVSFAPPAILNPATLLPVESDDTPIHICSEILAEETGTRPDLRDQPLPGVPAWYTDGSSFIMDGRRQAGAAIVDNKRTVWASNLPEGTSAQKAELIALTQALRLAEGKSINIYTDSRYAFATAHVHGAIYKQRGWLTSAGKDIKNKEEILALLEAIHLPKRVAIIHCPGHQRGTDPVATGNRKADEAAKQAAQSTRILTETTKNAGKRTADGSEFEKRTADGSEFESPKKKAKVE

SEQ ID NO: 1671 - protein, 2124 aa, synthetic construct
MPAAKRVKLDGGDKKYSIGLDIGTNSVGWAVITDEYKVPSKKFKVLGNTDRHSIKKNLIGALLFDSGETAEATRLKRTARRRYTRRKNRICYLQEIFSNEMAKVDDSFFHRLEESFLVEEDKKHERHPIFGNIVDEVAYHEKYPTIYHLRKKLVDSTDKADLRLIYLALAHMIKFRGHFLIEGDLNPDNSDVDKLFIQLVQTYNQLFEENPINASGVDAKAILSARLSKSRRLENLIAQLPGEKKNGLFGNLIALSLGLTPNFKSNFDLAEDAKLQLSKDTYDDDLDNLLAQIGDQYADLFLAAKNLSDAILLSDILRVNTEITKAPLSASMIKRYDEHHQDLTLLKALVRQQLPEKYKEIFFDQSKNGYAGYIDGGASQEEFYKFIKPILEKMDGTEELLVKLNREDLLRKQRTFDNGSIPHQIHLGELHAILRRQEDFYPFLKDNREKIEKILTFRIPYYVGPLARGNSRFAWMTRKSEETITPWNFEEVVDKGASAQSFIERMTNFDKNLPNEKVLPKHSLLYEYFTVYNELTKVKYVTEGMRKPAFLSGEQKKAIVDLLFKTNRKVTVKQLKEDYFKKIECFDSVEISGVEDRFNASLGTYHDLLKIIKDKDFLDNEENEDILEDIVLTLTLFEDREMIEERLKTYAHLFDDKVMKQLKRRRYTGWGRLSRKLINGIRDKQSGKTILDFLKSDGFANRNFMQLIHDDSLTFKEDIQKAQVSGQGDSLHEHIANLAGSPAIKKGILQTVKVVDELVKVMGRHKPENIVIEMARENQTTQKGQKNSRERMKRIEEGIKELGSQILKEHPVENTQLQNEKLYLYYLQNGRDMYVDQELDINRLSDYDVDHIVPQSFLKDDSIDNKVLTRSDKARGKSDNVPSEEVVKKMKNYWRQLLNAKLITQRKFDNLTKAERGGLSELDKAGFIKRQLVETRQITKHVAQILDSRMNTKYDENDKLIREVKVITLKSKLVSDFRKDFQFYKVREINNYHHAHDAYLNAVVGTALIKKYPKLESEFVYGDYKVYDVRKMIAKSEQEIGKATAKYFFYSNIMNFFKTEITLANGEIRKRPLIETNGETGEIVWDKGRDFATVRKVLSMPQVNIVKKTEVQTGGFSKESILPKRNSDKLIARKKDWDPKKYGGFDSPTVAYSVLVVAKVEKGKSKKLKSVKELLGITIMERSSFEKNPIDFLEAKGYKEVKKDLIIKLPKYSLFELENGRKRMLASAGELQKGNELALPSKYVNFLYLASHYEKLKGSPEDNEQKQLFVEQHKHYLDEIIEQISEFSKRVILADANLDKVLSAYNKHRDKPIREQAENIIHLFTLTNLGAPAAFKYFDTTIDRKRYTSTKEVLDATLIHQSITGLYETRIDLSQLGGDGGEAAAKGSSGGLLGRDLLTKLKAQIQFSTEGPQVTWEDRPAMCLVLNLEEEYRLHEKPVPPSIDPSWLQLFPMVWAEKAGMGLANQVPPVVVELKSDASPVAVRQYPMSKEAREGIRPHIQRFLDLGILVPCQSPWNTPLLPVKKPGTNDYRPVQDLREVNKRVQDIHPTVPNPYNLLSSLPPSHTWYSVLDLKDAFFCLKLHPNSQPLFAFEWRDPEKGNTGQLTWTRLPQGFKNSPTLFNEALHRDLASFRALNPQVVMLQYVDDLLVAAPTYRDCKEGTRRLLQELSKLGYRVSAKKAQLCREEVTYLGYLLKGGKRWLTPARKATVMKIPTPTTPRQVREFLGKAGFCRLFIPGFASLAAPLYPLTRPKVPFTWTEAHQEAFGRIKEALLSAPALALPDLTKPFALYVDEKEGVARGVLTQTLGPWRRPVAYLSKKLDPVASGWPTCLKAIAAVALLLKDADKLTLGQNVLVIAPHNLESIVRQPPDRWMTNARMTHYQSLLLNERVSFAPPAILNPATLLPVESDDTPIHICSEILAEETGTRPDLRDQPLPGVPAWYTDGSSFIMDGRRQAGAAIVDNKRTVWASNLPEGTSAQKAELIALTQALRLAEGKSINIYTDSRYAFATAHVHGAIYKQRGWLTSAGKDIKNKEEILALLEAIHLPKRVAIIHCPGHQRGTDPVATGNRKADEAAKQAAQSTRILTETTKNAGKRTADGSEFEKRTADGSEFESPKKKAKVE

SEQ ID NO: 1672 - protein, 2127 aa, synthetic construct
MPAAKRVKLDGGDKKYSIGLDIGTNSVGWAVITDEYKVPSKKFKVLGNTDRHSIKKNLIGALLFDSGETAEATRLKRTARRRYTRRKNRICYLQEIFSNEMAKVDDSFFHRLEESFLVEEDKKHERHPIFGNIVDEVAYHEKYPTIYHLRKKLVDSTDKADLRLIYLALAHMIKFRGHFLIEGDLNPDNSDVDKLFIQLVQTYNQLFEENPINASGVDAKAILSARLSKSRRLENLIAQLPGEKKNGLFGNLIALSLGLTPNFKSNFDLAEDAKLQLSKDTYDDDLDNLLAQIGDQYADLFLAAKNLSDAILLSDILRVNTEITKAPLSASMIKRYDEHHQDLTLLKALVRQQLPEKYKEIFFDQSKNGYAGYIDGGASQEEFYKFIKPILEKMDGTEELLVKLNREDLLRKQRTFDNGSIPHQIHLGELHAILRRQEDFYPFLKDNREKIEKILTFRIPYYVGPLARGNSRFAWMTRKSEETITPWNFEEVVDKGASAQSFIERMTNFDKNLPNEKVLPKHSLLYEYFTVYNELTKVKYVTEGMRKPAFLSGEQKKAIVDLLFKTNRKVTVKQLKEDYFKKIECFDSVEISGVEDRFNASLGTYHDLLKIIKDKDFLDNEENEDILEDIVLTLTLFEDREMIEERLKTYAHLFDDKVMKQLKRRRYTGWGRLSRKLINGIRDKQSGKTILDFLKSDGFANRNFMQLIHDDSLTFKEDIQKAQVSGQGDSLHEHIANLAGSPAIKKGILQTVKVVDELVKVMGRHKPENIVIEMARENQTTQKGQKNSRERMKRIEEGIKELGSQILKEHPVENTQLQNEKLYLYYLQNGRDMYVDQELDINRLSDYDVDHIVPQSFLKDDSIDNKVLTRSDKARGKSDNVPSEEVVKKMKNYWRQLLNAKLITQRKFDNLTKAERGGLSELDKAGFIKRQLVETRQITKHVAQILDSRMNTKYDENDKLIREVKVITLKSKLVSDFRKDFQFYKVREINNYHHAHDAYLNAVVGTALIKKYPKLESEFVYGDYKVYDVRKMIAKSEQEIGKATAKYFFYSNIMNFFKTEITLANGEIRKRPLIETNGETGEIVWDKGRDFATVRKVLSMPQVNIVKKTEVQTGGFSKESILPKRNSDKLIARKKDWDPKKYGGFDSPTVAYSVLVVAKVEKGKSKKLKSVKELLGITIMERSSFEKNPIDFLEAKGYKEVKKDLIIKLPKYSLFELENGRKRMLASAGELQKGNELALPSKYVNFLYLASHYEKLKGSPEDNEQKQLFVEQHKHYLDEIIEQISEFSKRVILADANLDKVLSAYNKHRDKPIREQAENIIHLFTLTNLGAPAAFKYFDTTIDRKRYTSTKEVLDATLIHQSITGLYETRIDLSQLGGDGGGGGEAAAKPAPGGLLGRDLLTKLKAQIQFSTEGPQVTWEDRPAMCLVLNLEEEYRLHEKPVPPSIDPSWLQLFPMVWAEKAGMGLANQVPPVVVELKSDASPVAVRQYPMSKEAREGIRPHIQRFLDLGILVPCQSPWNTPLLPVKKPGTNDYRPVQDLREVNKRVQDIHPTVPNPYNLLSSLPPSHTWYSVLDLKDAFFCLKLHPNSQPLFAFEWRDPEKGNTGQLTWTRLPQGFKNSPTLFNEALHRDLASFRALNPQVVMLQYVDDLLVAAPTYRDCKEGTRRLLQELSKLGYRVSAKKAQLCREEVTYLGYLLKGGKRWLTPARKATVMKIPTPTTPRQVREFLGKAGFCRLFIPGFASLAAPLYPLTRPKVPFTWTEAHQEAFGRIKEALLSAPALALPDLTKPFALYVDEKEGVARGVLTQTLGPWRRPVAYLSKKLDPVASGWPTCLKAIAAVALLLKDADKLTLGQNVLVIAPHNLESIVRQPPDRWMTNARMTHYQSLLLNERVSFAPPAILNPATLLPVESDDTPIHICSEILAEETGTRPDLRDQPLPGVPAWYTDGSSFIMDGRRQAGAAIVDNKRTVWASNLPEGTSAQKAELIALTQALRLAEGKSINIYTDSRYAFATAHVHGAIYKQRGWLTSAGKDIKNKEEILALLEAIHLPKRVAIIHCPGHQRGTDPVATGNRKADEAAKQAAQSTRILTETTKNAGKRTADGSEFEKRTADGSEFESPKKKAKVE

SEQ ID NO: 1673 - protein, 2122 aa, synthetic construct
MPAAKRVKLDGGDKKYSIGLDIGTNSVGWAVITDEYKVPSKKFKVLGNTDRHSIKKNLIGALLFDSGETAEATRLKRTARRRYTRRKNRICYLQEIFSNEMAKVDDSFFHRLEESFLVEEDKKHERHPIFGNIVDEVAYHEKYPTIYHLRKKLVDSTDKADLRLIYLALAHMIKFRGHFLIEGDLNPDNSDVDKLFIQLVQTYNQLFEENPINASGVDAKAILSARLSKSRRLENLIAQLPGEKKNGLFGNLIALSLGLTPNFKSNFDLAEDAKLQLSKDTYDDDLDNLLAQIGDQYADLFLAAKNLSDAILLSDILRVNTEITKAPLSASMIKRYDEHHQDLTLLKALVRQQLPEKYKEIFFDQSKNGYAGYIDGGASQEEFYKFIKPILEKMDGTEELLVKLNREDLLRKQRTFDNGSIPHQIHLGELHAILRRQEDFYPFLKDNREKIEKILTFRIPYYVGPLARGNSRFAWMTRKSEETITPWNFEEVVDKGASAQSFIERMTNFDKNLPNEKVLPKHSLLYEYFTVYNELTKVKYVTEGMRKPAFLSGEQKKAIVDLLFKTNRKVTVKQLKEDYFKKIECFDSVEISGVEDRFNASLGTYHDLLKIIKDKDFLDNEENEDILEDIVLTLTLFEDREMIEERLKTYAHLFDDKVMKQLKRRRYTGWGRLSRKLINGIRDKQSGKTILDFLKSDGFANRNFMQLIHDDSLTFKEDIQKAQVSGQGDSLHEHIANLAGSPAIKKGILQTVKVVDELVKVMGRHKPENIVIEMARENQTTQKGQKNSRERMKRIEEGIKELGSQILKEHPVENTQLQNEKLYLYYLQNGRDMYVDQELDINRLSDYDVDHIVPQSFLKDDSIDNKVLTRSDKARGKSDNVPSEEVVKKMKNYWRQLLNAKLITQRKFDNLTKAERGGLSELDKAGFIKRQLVETRQITKHVAQILDSRMNTKYDENDKLIREVKVITLKSKLVSDFRKDFQFYKVREINNYHHAHDAYLNAVVGTALIKKYPKLESEFVYGDYKVYDVRKMIAKSEQEIGKATAKYFFYSNIMNFFKTEITLANGEIRKRPLIETNGETGEIVWDKGRDFATVRKVLSMPQVNIVKKTEVQTGGFSKESILPKRNSDKLIARKKDWDPKKYGGFDSPTVAYSVLVVAKVEKGKSKKLKSVKELLGITIMERSSFEKNPIDFLEAKGYKEVKKDLIIKLPKYSLFELENGRKRMLASAGELQKGNELALPSKYVNFLYLASHYEKLKGSPEDNEQKQLFVEQHKHYLDEIIEQISEFSKRVILADANLDKVLSAYNKHRDKPIREQAENIIHLFTLTNLGAPAAFKYFDTTIDRKRYTSTKEVLDATLIHQSITGLYETRIDLSQLGGDGGGGGPAPGGLLGRDLLTKLKAQIQFSTEGPQVTWEDRPAMCLVLNLEEEYRLHEKPVPPSIDPSWLQLFPMVWAEKAGMGLANQVPPVVVELKSDASPVAVRQYPMSKEAREGIRPHIQRFLDLGILVPCQSPWNTPLLPVKKPGTNDYRPVQDLREVNKRVQDIHPTVPNPYNLLSSLPPSHTWYSVLDLKDAFFCLKLHPNSQPLFAFEWRDPEKGNTGQLTWTRLPQGFKNSPTLFNEALHRDLASFRALNPQVVMLQYVDDLLVAAPTYRDCKEGTRRLLQELSKLGYRVSAKKAQLCREEVTYLGYLLKGGKRWLTPARKATVMKIPTPTTPRQVREFLGKAGFCRLFIPGFASLAAPLYPLTRPKVPFTWTEAHQEAFGRIKEALLSAPALALPDLTKPFALYVDEKEGVARGVLTQTLGPWRRPVAYLSKKLDPVASGWPTCLKAIAAVALLLKDADKLTLGQNVLVIAPHNLESIVRQPPDRWMTNARMTHYQSLLLNERVSFAPPAILNPATLLPVESDDTPIHICSEILAEETGTRPDLRDQPLPGVPAWYTDGSSFIMDGRRQAGAAIVDNKRTVWASNLPEGTSAQKAELIALTQALRLAEGKSINIYTDSRYAFATAHVHGAIYKQRGWLTSAGKDIKNKEEILALLEAIHLPKRVAIIHCPGHQRGTDPVATGNRKADEAAKQAAQSTRILTETTKNAGKRTADGSEFEKRTADGSEFESPKKKAKVE

SEQ ID NO: 1674 - protein, 2136 aa, synthetic construct
MPAAKRVKLDGGDKKYSIGLDIGTNSVGWAVITDEYKVPSKKFKVLGNTDRHSIKKNLIGALLFDSGETAEATRLKRTARRRYTRRKNRICYLQEIFSNEMAKVDDSFFHRLEESFLVEEDKKHERHPIFGNIVDEVAYHEKYPTIYHLRKKLVDSTDKADLRLIYLALAHMIKFRGHFLIEGDLNPDNSDVDKLFIQLVQTYNQLFEENPINASGVDAKAILSARLSKSRRLENLIAQLPGEKKNGLFGNLIALSLGLTPNFKSNFDLAEDAKLQLSKDTYDDDLDNLLAQIGDQYADLFLAAKNLSDAILLSDILRVNTEITKAPLSASMIKRYDEHHQDLTLLKALVRQQLPEKYKEIFFDQSKNGYAGYIDGGASQEEFYKFIKPILEKMDGTEELLVKLNREDLLRKQRTFDNGSIPHQIHLGELHAILRRQEDFYPFLKDNREKIEKILTFRIPYYVGPLARGNSRFAWMTRKSEETITPWNFEEVVDKGASAQSFIERMTNFDKNLPNEKVLPKHSLLYEYFTVYNELTKVKYVTEGMRKPAFLSGEQKKAIVDLLFKTNRKVTVKQLKEDYFKKIECFDSVEISGVEDRFNASLGTYHDLLKIIKDKDFLDNEENEDILEDIVLTLTLFEDREMIEERLKTYAHLFDDKVMKQLKRRRYTGWGRLSRKLINGIRDKQSGKTILDFLKSDGFANRNFMQLIHDDSLTFKEDIQKAQVSGQGDSLHEHIANLAGSPAIKKGILQTVKVVDELVKVMGRHKPENIVIEMARENQTTQKGQKNSRERMKRIEEGIKELGSQILKEHPVENTQLQNEKLYLYYLQNGRDMYVDQELDINRLSDYDVDHIVPQSFLKDDSIDNKVLTRSDKARGKSDNVPSEEVVKKMKNYWRQLLNAKLITQRKFDNLTKAERGGLSELDKAGFIKRQLVETRQITKHVAQILDSRMNTKYDENDKLIREVKVITLKSKLVSDFRKDFQFYKVREINNYHHAHDAYLNAVVGTALIKKYPKLESEFVYGDYKVYDVRKMIAKSEQEIGKATAKYFFYSNIMNFFKTEITLANGEIRKRPLIETNGETGEIVWDKGRDFATVRKVLSMPQVNIVKKTEVQTGGFSKESILPKRNSDKLIARKKDWDPKKYGGFDSPTVAYSVLVVAKVEKGKSKKLKSVKELLGITIMERSSFEKNPIDFLEAKGYKEVKKDLIIKLPKYSLFELENGRKRMLASAGELQKGNELALPSKYVNFLYLASHYEKLKGSPEDNEQKQLFVEQHKHYLDEIIEQISEFSKRVILADANLDKVLSAYNKHRDKPIREQAENIIHLFTLTNLGAPAAFKYFDTTIDRKRYTSTKEVLDATLIHQSITGLYETRIDLSQLGGDGGEAAAKEAAAKEAAAKEAAAKGGLLGRDLLTKLKAQIQFSTEGPQVTWEDRPAMCLVLNLEEEYRLHEKPVPPSIDPSWLQLFPMVWAEKAGMGLANQVPPVVVELKSDASPVAVRQYPMSKEAREGIRPHIQRFLDLGILVPCQSPWNTPLLPVKKPGTNDYRPVQDLREVNKRVQDIHPTVPNPYNLLSSLPPSHTWYSVLDLKDAFFCLKLHPNSQPLFAFEWRDPEKGNTGQLTWTRLPQGFKNSPTLFNEALHRDLASFRALNPQVVMLQYVDDLLVAAPTYRDCKEGTRRLLQELSKLGYRVSAKKAQLCREEVTYLGYLLKGGKRWLTPARKATVMKIPTPTTPRQVREFLGKAGFCRLFIPGFASLAAPLYPLTRPKVPFTWTEAHQEAFGRIKEALLSAPALALPDLTKPFALYVDEKEGVARGVLTQTLGPWRRPVAYLSKKLDPVASGWPTCLKAIAAVALLLKDADKLTLGQNVLVIAPHNLESIVRQPPDRWMTNARMTHYQSLLLNERVSFAPPAILNPATLLPVESDDTPIHICSEILAEETGTRPDLRDQPLPGVPAWYTDGSSFIMDGRRQAGAAIVDNKRTVWASNLPEGTSAQKAELIALTQALRLAEGKSINIYTDSRYAFATAHVHGAIYKQRGWLTSAGKDIKNKEEILALLEAIHLPKRVAIIHCPGHQRGTDPVATGNRKADEAAKQAAQSTRILTETTKNAGKRTADGSEFEKRTADGSEFESPKKKAKVE

SEQ ID NO: 1675 - protein, 2119 aa, synthetic construct
MPAAKRVKLDGGDKKYSIGLDIGTNSVGWAVITDEYKVPSKKFKVLGNTDRHSIKKNLIGALLFDSGETAEATRLKRTARRRYTRRKNRICYLQEIFSNEMAKVDDSFFHRLEESFLVEEDKKHERHPIFGNIVDEVAYHEKYPTIYHLRKKLVDSTDKADLRLIYLALAHMIKFRGHFLIEGDLNPDNSDVDKLFIQLVQTYNQLFEENPINASGVDAKAILSARLSKSRRLENLIAQLPGEKKNGLFGNLIALSLGLTPNFKSNFDLAEDAKLQLSKDTYDDDLDNLLAQIGDQYADLFLAAKNLSDAILLSDILRVNTEITKAPLSASMIKRYDEHHQDLTLLKALVRQQLPEKYKEIFFDQSKNGYAGYIDGGASQEEFYKFIKPILEKMDGTEELLVKLNREDLLRKQRTFDNGSIPHQIHLGELHAILRRQEDFYPFLKDNREKIEKILTFRIPYYVGPLARGNSRFAWMTRKSEETITPWNFEEVVDKGASAQSFIERMTNFDKNLPNEKVLPKHSLLYEYFTVYNELTKVKYVTEGMRKPAFLSGEQKKAIVDLLFKTNRKVTVKQLKEDYFKKIECFDSVEISGVEDRFNASLGTYHDLLKIIKDKDFLDNEENEDILEDIVLTLTLFEDREMIEERLKTYAHLFDDKVMKQLKRRRYTGWGRLSRKLINGIRDKQSGKTILDFLKSDGFANRNFMQLIHDDSLTFKEDIQKAQVSGQGDSLHEHIANLAGSPAIKKGILQTVKVVDELVKVMGRHKPENIVIEMARENQTTQKGQKNSRERMKRIEEGIKELGSQILKEHPVENTQLQNEKLYLYYLQNGRDMYVDQELDINRLSDYDVDHIVPQSFLKDDSIDNKVLTRSDKARGKSDNVPSEEVVKKMKNYWRQLLNAKLITQRKFDNLTKAERGGLSELDKAGFIKRQLVETRQITKHVAQILDSRMNTKYDENDKLIREVKVITLKSKLVSDFRKDFQFYKVREINNYHHAHDAYLNAVVGTALIKKYPKLESEFVYGDYKVYDVRKMIAKSEQEIGKATAKYFFYSNIMNFFKTEITLANGEIRKRPLIETNGETGEIVWDKGRDFATVRKVLSMPQVNIVKKTEVQTGGFSKESILPKRNSDKLIARKKDWDPKKYGGFDSPTVAYSVLVVAKVEKGKSKKLKSVKELLGITIMERSSFEKNPIDFLEAKGYKEVKKDLIIKLPKYSLFELENGRKRMLASAGELQKGNELALPSKYVNFLYLASHYEKLKGSPEDNEQKQLFVEQHKHYLDEIIEQISEFSKRVILADANLDKVLSAYNKHRDKPIREQAENIIHLFTLTNLGAPAAFKYFDTTIDRKRYTSTKEVLDATLIHQSITGLYETRIDLSQLGGDGGGGSGGLLGRDLLTKLKAQIQFSTEGPQVTWEDRPAMCLVLNLEEEYRLHEKPVPPSIDPSWLQLFPMVWAEKAGMGLANQVPPVVVELKSDASPVAVRQYPMSKEAREGIRPHIQRFLDLGILVPCQSPWNTPLLPVKKPGTNDYRPVQDLREVNKRVQDIHPTVPNPYNLLSSLPPSHTWYSVLDLKDAFFCLKLHPNSQPLFAFEWRDPEKGNTGQLTWTRLPQGFKNSPTLFNEALHRDLASFRALNPQVVMLQYVDDLLVAAPTYRDCKEGTRRLLQELSKLGYRVSAKKAQLCREEVTYLGYLLKGGKRWLTPARKATVMKIPTPTTPRQVREFLGKAGFCRLFIPGFASLAAPLYPLTRPKVPFTWTEAHQEAFGRIKEALLSAPALALPDLTKPFALYVDEKEGVARGVLTQTLGPWRRPVAYLSKKLDPVASGWPTCLKAIAAVALLLKDADKLTLGQNVLVIAPHNLESIVRQPPDRWMTNARMTHYQSLLLNERVSFAPPAILNPATLLPVESDDTPIHICSEILAEETGTRPDLRDQPLPGVPAWYTDGSSFIMDGRRQAGAAIVDNKRTVWASNLPEGTSAQKAELIALTQALRLAEGKSINIYTDSRYAFATAHVHGAIYKQRGWLTSAGKDIKNKEEILALLEAIHLPKRVAIIHCPGHQRGTDPVATGNRKADEAAKQAAQSTRILTETTKNAGKRTADGSEFEKRTADGSEFESPKKKAKVE

SEQ ID NO: 1676 - protein, 2122 aa, synthetic construct
MPAAKRVKLDGGDKKYSIGLDIGTNSVGWAVITDEYKVPSKKFKVLGNTDRHSIKKNLIGALLFDSGETAEATRLKRTARRRYTRRKNRICYLQEIFSNEMAKVDDSFFHRLEESFLVEEDKKHERHPIFGNIVDEVAYHEKYPTIYHLRKKLVDSTDKADLRLIYLALAHMIKFRGHFLIEGDLNPDNSDVDKLFIQLVQTYNQLFEENPINASGVDAKAILSARLSKSRRLENLIAQLPGEKKNGLFGNLIALSLGLTPNFKSNFDLAEDAKLQLSKDTYDDDLDNLLAQIGDQYADLFLAAKNLSDAILLSDILRVNTEITKAPLSASMIKRYDEHHQDLTLLKALVRQQLPEKYKEIFFDQSKNGYAGYIDGGASQEEFYKFIKPILEKMDGTEELLVKLNREDLLRKQRTFDNGSIPHQIHLGELHAILRRQEDFYPFLKDNREKIEKILTFRIPYYVGPLARGNSRFAWMTRKSEETITPWNFEEVVDKGASAQSFIERMTNFDKNLPNEKVLPKHSLLYEYFTVYNELTKVKYVTEGMRKPAFLSGEQKKAIVDLLFKTNRKVTVKQLKEDYFKKIECFDSVEISGVEDRFNASLGTYHDLLKIIKDKDFLDNEENEDILEDIVLTLTLFEDREMIEERLKTYAHLFDDKVMKQLKRRRYTGWGRLSRKLINGIRDKQSGKTILDFLKSDGFANRNFMQLIHDDSLTFKEDIQKAQVSGQGDSLHEHIANLAGSPAIKKGILQTVKVVDELVKVMGRHKPENIVIEMARENQTTQKGQKNSRERMKRIEEGIKELGSQILKEHPVENTQLQNEKLYLYYLQNGRDMYVDQELDINRLSDYDVDHIVPQSFLKDDSIDNKVLTRSDKARGKSDNVPSEEVVKKMKNYWRQLLNAKLITQRKFDNLTKAERGGLSELDKAGFIKRQLVETRQITKHVAQILDSRMNTKYDENDKLIREVKVITLKSKLVSDFRKDFQFYKVREINNYHHAHDAYLNAVVGTALIKKYPKLESEFVYGDYKVYDVRKMIAKSEQEIGKATAKYFFYSNIMNFFKTEITLANGEIRKRPLIETNGETGEIVWDKGRDFATVRKVLSMPQVNIVKKTEVQTGGFSKESILPKRNSDKLIARKKDWDPKKYGGFDSPTVAYSVLVVAKVEKGKSKKLKSVKELLGITIMERSSFEKNPIDFLEAKGYKEVKKDLIIKLPKYSLFELENGRKRMLASAGELQKGNELALPSKYVNFLYLASHYEKLKGSPEDNEQKQLFVEQHKHYLDEIIEQISEFSKRVILADANLDKVLSAYNKHRDKPIREQAENIIHLFTLTNLGAPAAFKYFDTTIDRKRYTSTKEVLDATLIHQSITGLYETRIDLSQLGGDGGGGGGSSGGLLGRDLLTKLKAQIQFSTEGPQVTWEDRPAMCLVLNLEEEYRLHEKPVPPSIDPSWLQLFPMVWAEKAGMGLANQVPPVVVELKSDASPVAVRQYPMSKEAREGIRPHIQRFLDLGILVPCQSPWNTPLLPVKKPGTNDYRPVQDLREVNKRVQDIHPTVPNPYNLLSSLPPSHTWYSVLDLKDAFFCLKLHPNSQPLFAFEWRDPEKGNTGQLTWTRLPQGFKNSPTLFNEALHRDLASFRALNPQVVMLQYVDDLLVAAPTYRDCKEGTRRLLQELSKLGYRVSAKKAQLCREEVTYLGYLLKGGKRWLTPARKATVMKIPTPTTPRQVREFLGKAGFCRLFIPGFASLAAPLYPLTRPKVPFTWTEAHQEAFGRIKEALLSAPALALPDLTKPFALYVDEKEGVARGVLTQTLGPWRRPVAYLSKKLDPVASGWPTCLKAIAAVALLLKDADKLTLGQNVLVIAPHNLESIVRQPPDRWMTNARMTHYQSLLLNERVSFAPPAILNPATLLPVESDDTPIHICSEILAEETGTRPDLRDQPLPGVPAWYTDGSSFIMDGRRQAGAAIVDNKRTVWASNLPEGTSAQKAELIALTQALRLAEGKSINIYTDSRYAFATAHVHGAIYKQRGWLTSAGKDIKNKEEILALLEAIHLPKRVAIIHCPGHQRGTDPVATGNRKADEAAKQAAQSTRILTETTKNAGKRTADGSEFEKRTADGSEFESPKKKAKVE

SEQ ID NO: 1677 - protein, 2127 aa, synthetic construct
MPAAKRVKLDGGDKKYSIGLDIGTNSVGWAVITDEYKVPSKKFKVLGNTDRHSIKKNLIGALLFDSGETAEATRLKRTARRRYTRRKNRICYLQEIFSNEMAKVDDSFFHRLEESFLVEEDKKHERHPIFGNIVDEVAYHEKYPTIYHLRKKLVDSTDKADLRLIYLALAHMIKFRGHFLIEGDLNPDNSDVDKLFIQLVQTYNQLFEENPINASGVDAKAILSARLSKSRRLENLIAQLPGEKKNGLFGNLIALSLGLTPNFKSNFDLAEDAKLQLSKDTYDDDLDNLLAQIGDQYADLFLAAKNLSDAILLSDILRVNTEITKAPLSASMIKRYDEHHQDLTLLKALVRQQLPEKYKEIFFDQSKNGYAGYIDGGASQEEFYKFIKPILEKMDGTEELLVKLNREDLLRKQRTFDNGSIPHQIHLGELHAILRRQEDFYPFLKDNREKIEKILTFRIPYYVGPLARGNSRFAWMTRKSEETITPWNFEEVVDKGASAQSFIERMTNFDKNLPNEKVLPKHSLLYEYFTVYNELTKVKYVTEGMRKPAFLSGEQKKAIVDLLFKTNRKVTVKQLKEDYFKKIECFDSVEISGVEDRFNASLGTYHDLLKIIKDKDFLDNEENEDILEDIVLTLTLFEDREMIEERLKTYAHLFDDKVMKQLKRRRYTGWGRLSRKLINGIRDKQSGKTILDFLKSDGFANRNFMQLIHDDSLTFKEDIQKAQVSGQGDSLHEHIANLAGSPAIKKGILQTVKVVDELVKVMGRHKPENIVIEMARENQTTQKGQKNSRERMKRIEEGIKELGSQILKEHPVENTQLQNEKLYLYYLQNGRDMYVDQELDINRLSDYDVDHIVPQSFLKDDSIDNKVLTRSDKARGKSDNVPSEEVVKKMKNYWRQLLNAKLITQRKFDNLTKAERGGLSELDKAGFIKRQLVETRQITKHVAQILDSRMNTKYDENDKLIREVKVITLKSKLVSDFRKDFQFYKVREINNYHHAHDAYLNAVVGTALIKKYPKLESEFVYGDYKVYDVRKMIAKSEQEIGKATAKYFFYSNIMNFFKTEITLANGEIRKRPLIETNGETGEIVWDKGRDFATVRKVLSMPQVNIVKKTEVQTGGFSKESILPKRNSDKLIARKKDWDPKKYGGFDSPTVAYSVLVVAKVEKGKSKKLKSVKELLGITIMERSSFEKNPIDFLEAKGYKEVKKDLIIKLPKYSLFELENGRKRMLASAGELQKGNELALPSKYVNFLYLASHYEKLKGSPEDNEQKQLFVEQHKHYLDEIIEQISEFSKRVILADANLDKVLSAYNKHRDKPIREQAENIIHLFTLTNLGAPAAFKYFDTTIDRKRYTSTKEVLDATLIHQSITGLYETRIDLSQLGGDGGEAAAKGGGGSSGGLLGRDLLTKLKAQIQFSTEGPQVTWEDRPAMCLVLNLEEEYRLHEKPVPPSIDPSWLQLFPMVWAEKAGMGLANQVPPVVVELKSDASPVAVRQYPMSKEAREGIRPHIQRFLDLGILVPCQSPWNTPLLPVKKPGTNDYRPVQDLREVNKRVQDIHPTVPNPYNLLSSLPPSHTWYSVLDLKDAFFCLKLHPNSQPLFAFEWRDPEKGNTGQLTWTRLPQGFKNSPTLFNEALHRDLASFRALNPQVVMLQYVDDLLVAAPTYRDCKEGTRRLLQELSKLGYRVSAKKAQLCREEVTYLGYLLKGGKRWLTPARKATVMKIPTPTTPRQVREFLGKAGFCRLFIPGFASLAAPLYPLTRPKVPFTWTEAHQEAFGRIKEALLSAPALALPDLTKPFALYVDEKEGVARGVLTQTLGPWRRPVAYLSKKLDPVASGWPTCLKAIAAVALLLKDADKLTLGQNVLVIAPHNLESIVRQPPDRWMTNARMTHYQSLLLNERVSFAPPAILNPATLLPVESDDTPIHICSEILAEETGTRPDLRDQPLPGVPAWYTDGSSFIMDGRRQAGAAIVDNKRTVWASNLPEGTSAQKAELIALTQALRLAEGKSINIYTDSRYAFATAHVHGAIYKQRGWLTSAGKDIKNKEEILALLEAIHLPKRVAIIHCPGHQRGTDPVATGNRKADEAAKQAAQSTRILTETTKNAGKRTADGSEFEKRTADGSEFESPKKKAKVE

SEQ ID NO: 1678 - protein, 2128 aa, synthetic construct
MPAAKRVKLDGGDKKYSIGLDIGTNSVGWAVITDEYKVPSKKFKVLGNTDRHSIKKNLIGALLFDSGETAEATRLKRTARRRYTRRKNRICYLQEIFSNEMAKVDDSFFHRLEESFLVEEDKKHERHPIFGNIVDEVAYHEKYPTIYHLRKKLVDSTDKADLRLIYLALAHMIKFRGHFLIEGDLNPDNSDVDKLFIQLVQTYNQLFEENPINASGVDAKAILSARLSKSRRLENLIAQLPGEKKNGLFGNLIALSLGLTPNFKSNFDLAEDAKLQLSKDTYDDDLDNLLAQIGDQYADLFLAAKNLSDAILLSDILRVNTEITKAPLSASMIKRYDEHHQDLTLLKALVRQQLPEKYKEIFFDQSKNGYAGYIDGGASQEEFYKFIKPILEKMDGTEELLVKLNREDLLRKQRTFDNGSIPHQIHLGELHAILRRQEDFYPFLKDNREKIEKILTFRIPYYVGPLARGNSRFAWMTRKSEETITPWNFEEVVDKGASAQSFIERMTNFDKNLPNEKVLPKHSLLYEYFTVYNELTKVKYVTEGMRKPAFLSGEQKKAIVDLLFKTNRKVTVKQLKEDYFKKIECFDSVEISGVEDRFNASLGTYHDLLKIIKDKDFLDNEENEDILEDIVLTLTLFEDREMIEERLKTYAHLFDDKVMKQLKRRRYTGWGRLSRKLINGIRDKQSGKTILDFLKSDGFANRNFMQLIHDDSLTFKEDIQKAQVSGQGDSLHEHIANLAGSPAIKKGILQTVKVVDELVKVMGRHKPENIVIEMARENQTTQKGQKNSRERMKRIEEGIKELGSQILKEHPVENTQLQNEKLYLYYLQNGRDMYVDQELDINRLSDYDVDHIVPQSFLKDDSIDNKVLTRSDKARGKSDNVPSEEVVKKMKNYWRQLLNAKLITQRKFDNLTKAERGGLSELDKAGFIKRQLVETRQITKHVAQILDSRMNTKYDENDKLIREVKVITLKSKLVSDFRKDFQFYKVREINNYHHAHDAYLNAVVGTALIKKYPKLESEFVYGDYKVYDVRKMIAKSEQEIGKATAKYFFYSNIMNFFKTEITLANGEIRKRPLIETNGETGEIVWDKGRDFATVRKVLSMPQVNIVKKTEVQTGGFSKESILPKRNSDKLIARKKDWDPKKYGGFDSPTVAYSVLVVAKVEKGKSKKLKSVKELLGITIMERSSFEKNPIDFLEAKGYKEVKKDLIIKLPKYSLFELENGRKRMLASAGELQKGNELALPSKYVNFLYLASHYEKLKGSPEDNEQKQLFVEQHKHYLDEIIEQISEFSKRVILADANLDKVLSAYNKHRDKPIREQAENIIHLFTLTNLGAPAAFKYFDTTIDRKRYTSTKEVLDATLIHQSITGLYETRIDLSQLGGDGGGGSGGSGGSGGSGGLLGRDLLTKLKAQIQFSTEGPQVTWEDRPAMCLVLNLEEEYRLHEKPVPPSIDPSWLQLFPMVWAEKAGMGLANQVPPVVVELKSDASPVAVRQYPMSKEAREGIRPHIQRFLDLGILVPCQSPWNTPLLPVKKPGTNDYRPVQDLREVNKRVQDIHPTVPNPYNLLSSLPPSHTWYSVLDLKDAFFCLKLHPNSQPLFAFEWRDPEKGNTGQLTWTRLPQGFKNSPTLFNEALHRDLASFRALNPQVVMLQYVDDLLVAAPTYRDCKEGTRRLLQELSKLGYRVSAKKAQLCREEVTYLGYLLKGGKRWLTPARKATVMKIPTPTTPRQVREFLGKAGFCRLFIPGFASLAAPLYPLTRPKVPFTWTEAHQEAFGRIKEALLSAPALALPDLTKPFALYVDEKEGVARGVLTQTLGPWRRPVAYLSKKLDPVASGWPTCLKAIAAVALLLKDADKLTLGQNVLVIAPHNLESIVRQPPDRWMTNARMTHYQSLLLNERVSFAPPAILNPATLLPVESDDTPIHICSEILAEETGTRPDLRDQPLPGVPAWYTDGSSFIMDGRRQAGAAIVDNKRTVWASNLPEGTSAQKAELIALTQALRLAEGKSINIYTDSRYAFATAHVHGAIYKQRGWLTSAGKDIKNKEEILALLEAIHLPKRVAIIHCPGHQRGTDPVATGNRKADEAAKQAAQSTRILTETTKNAGKRTADGSEFEKRTADGSEFESPKKKAKVE

SEQ ID NO: 1679 - protein, 2124 aa, synthetic construct
MPAAKRVKLDGGDKKYSIGLDIGTNSVGWAVITDEYKVPSKKFKVLGNTDRHSIKKNLIGALLFDSGETAEATRLKRTARRRYTRRKNRICYLQEIFSNEMAKVDDSFFHRLEESFLVEEDKKHERHPIFGNIVDEVAYHEKYPTIYHLRKKLVDSTDKADLRLIYLALAHMIKFRGHFLIEGDLNPDNSDVDKLFIQLVQTYNQLFEENPINASGVDAKAILSARLSKSRRLENLIAQLPGEKKNGLFGNLIALSLGLTPNFKSNFDLAEDAKLQLSKDTYDDDLDNLLAQIGDQYADLFLAAKNLSDAILLSDILRVNTEITKAPLSASMIKRYDEHHQDLTLLKALVRQQLPEKYKEIFFDQSKNGYAGYIDGGASQEEFYKFIKPILEKMDGTEELLVKLNREDLLRKQRTFDNGSIPHQIHLGELHAILRRQEDFYPFLKDNREKIEKILTFRIPYYVGPLARGNSRFAWMTRKSEETITPWNFEEVVDKGASAQSFIERMTNFDKNLPNEKVLPKHSLLYEYFTVYNELTKVKYVTEGMRKPAFLSGEQKKAIVDLLFKTNRKVTVKQLKEDYFKKIECFDSVEISGVEDRFNASLGTYHDLLKIIKDKDFLDNEENEDILEDIVLTLTLFEDREMIEERLKTYAHLFDDKVMKQLKRRRYTGWGRLSRKLINGIRDKQSGKTILDFLKSDGFANRNFMQLIHDDSLTFKEDIQKAQVSGQGDSLHEHIANLAGSPAIKKGILQTVKVVDELVKVMGRHKPENIVIEMARENQTTQKGQKNSRERMKRIEEGIKELGSQILKEHPVENTQLQNEKLYLYYLQNGRDMYVDQELDINRLSDYDVDHIVPQSFLKDDSIDNKVLTRSDKARGKSDNVPSEEVVKKMKNYWRQLLNAKLITQRKFDNLTKAERGGLSELDKAGFIKRQLVETRQITKHVAQILDSRMNTKYDENDKLIREVKVITLKSKLVSDFRKDFQFYKVREINNYHHAHDAYLNAVVGTALIKKYPKLESEFVYGDYKVYDVRKMIAKSEQEIGKATAKYFFYSNIMNFFKTEITLANGEIRKRPLIETNGETGEIVWDKGRDFATVRKVLSMPQVNIVKKTEVQTGGFSKESILPKRNSDKLIARKKDWDPKKYGGFDSPTVAYSVLVVAKVEKGKSKKLKSVKELLGITIMERSSFEKNPIDFLEAKGYKEVKKDLIIKLPKYSLFELENGRKRMLASAGELQKGNELALPSKYVNFLYLASHYEKLKGSPEDNEQKQLFVEQHKHYLDEIIEQISEFSKRVILADANLDKVLSAYNKHRDKPIREQAENIIHLFTLTNLGAPAAFKYFDTTIDRKRYTSTKEVLDATLIHQSITGLYETRIDLSQLGGDGGEAAAKGGSGGLLGRDLLTKLKAQIQFSTEGPQVTWEDRPAMCLVLNLEEEYRLHEKPVPPSIDPSWLQLFPMVWAEKAGMGLANQVPPVVVELKSDASPVAVRQYPMSKEAREGIRPHIQRFLDLGILVPCQSPWNTPLLPVKKPGTNDYRPVQDLREVNKRVQDIHPTVPNPYNLLSSLPPSHTWYSVLDLKDAFFCLKLHPNSQPLFAFEWRDPEKGNTGQLTWTRLPQGFKNSPTLFNEALHRDLASFRALNPQVVMLQYVDDLLVAAPTYRDCKEGTRRLLQELSKLGYRVSAKKAQLCREEVTYLGYLLKGGKRWLTPARKATVMKIPTPTTPRQVREFLGKAGFCRLFIPGFASLAAPLYPLTRPKVPFTWTEAHQEAFGRIKEALLSAPALALPDLTKPFALYVDEKEGVARGVLTQTLGPWRRPVAYLSKKLDPVASGWPTCLKAIAAVALLLKDADKLTLGQNVLVIAPHNLESIVRQPPDRWMTNARMTHYQSLLLNERVSFAPPAILNPATLLPVESDDTPIHICSEILAEETGTRPDLRDQPLPGVPAWYTDGSSFIMDGRRQAGAAIVDNKRTVWASNLPEGTSAQKAELIALTQALRLAEGKSINIYTDSRYAFATAHVHGAIYKQRGWLTSAGKDIKNKEEILALLEAIHLPKRVAIIHCPGHQRGTDPVATGNRKADEAAKQAAQSTRILTETTKNAGKRTADGSEFEKRTADGSEFESPKKKAKVE

SEQ ID NO: 1680 - protein, 2123 aa, synthetic construct
MPAAKRVKLDGGDKKYSIGLDIGTNSVGWAVITDEYKVPSKKFKVLGNTDRHSIKKNLIGALLFDSGETAEATRLKRTARRRYTRRKNRICYLQEIFSNEMAKVDDSFFHRLEESFLVEEDKKHERHPIFGNIVDEVAYHEKYPTIYHLRKKLVDSTDKADLRLIYLALAHMIKFRGHFLIEGDLNPDNSDVDKLFIQLVQTYNQLFEENPINASGVDAKAILSARLSKSRRLENLIAQLPGEKKNGLFGNLIALSLGLTPNFKSNFDLAEDAKLQLSKDTYDDDLDNLLAQIGDQYADLFLAAKNLSDAILLSDILRVNTEITKAPLSASMIKRYDEHHQDLTLLKALVRQQLPEKYKEIFFDQSKNGYAGYIDGGASQEEFYKFIKPILEKMDGTEELLVKLNREDLLRKQRTFDNGSIPHQIHLGELHAILRRQEDFYPFLKDNREKIEKILTFRIPYYVGPLARGNSRFAWMTRKSEETITPWNFEEVVDKGASAQSFIERMTNFDKNLPNEKVLPKHSLLYEYFTVYNELTKVKYVTEGMRKPAFLSGEQKKAIVDLLFKTNRKVTVKQLKEDYFKKIECFDSVEISGVEDRFNASLGTYHDLLKIIKDKDFLDNEENEDILEDIVLTLTLFEDREMIEERLKTYAHLFDDKVMKQLKRRRYTGWGRLSRKLINGIRDKQSGKTILDFLKSDGFANRNFMQLIHDDSLTFKEDIQKAQVSGQGDSLHEHIANLAGSPAIKKGILQTVKVVDELVKVMGRHKPENIVIEMARENQTTQKGQKNSRERMKRIEEGIKELGSQILKEHPVENTQLQNEKLYLYYLQNGRDMYVDQELDINRLSDYDVDHIVPQSFLKDDSIDNKVLTRSDKARGKSDNVPSEEVVKKMKNYWRQLLNAKLITQRKFDNLTKAERGGLSELDKAGFIKRQLVETRQITKHVAQILDSRMNTKYDENDKLIREVKVITLKSKLVSDFRKDFQFYKVREINNYHHAHDAYLNAVVGTALIKKYPKLESEFVYGDYKVYDVRKMIAKSEQEIGKATAKYFFYSNIMNFFKTEITLANGEIRKRPLIETNGETGEIVWDKGRDFATVRKVLSMPQVNIVKKTEVQTGGFSKESILPKRNSDKLIARKKDWDPKKYGGFDSPTVAYSVLVVAKVEKGKSKKLKSVKELLGITIMERSSFEKNPIDFLEAKGYKEVKKDLIIKLPKYSLFELENGRKRMLASAGELQKGNELALPSKYVNFLYLASHYEKLKGSPEDNEQKQLFVEQHKHYLDEIIEQISEFSKRVILADANLDKVLSAYNKHRDKPIREQAENIIHLFTLTNLGAPAAFKYFDTTIDRKRYTSTKEVLDATLIHQSITGLYETRIDLSQLGGDGGPAPAPAPGGLLGRDLLTKLKAQIQFSTEGPQVTWEDRPAMCLVLNLEEEYRLHEKPVPPSIDPSWLQLFPMVWAEKAGMGLANQVPPVVVELKSDASPVAVRQYPMSKEAREGIRPHIQRFLDLGILVPCQSPWNTPLLPVKKPGTNDYRPVQDLREVNKRVQDIHPTVPNPYNLLSSLPPSHTWYSVLDLKDAFFCLKLHPNSQPLFAFEWRDPEKGNTGQLTWTRLPQGFKNSPTLFNEALHRDLASFRALNPQVVMLQYVDDLLVAAPTYRDCKEGTRRLLQELSKLGYRVSAKKAQLCREEVTYLGYLLKGGKRWLTPARKATVMKIPTPTTPRQVREFLGKAGFCRLFIPGFASLAAPLYPLTRPKVPFTWTEAHQEAFGRIKEALLSAPALALPDLTKPFALYVDEKEGVARGVLTQTLGPWRRPVAYLSKKLDPVASGWPTCLKAIAAVALLLKDADKLTLGQNVLVIAPHNLESIVRQPPDRWMTNARMTHYQSLLLNERVSFAPPAILNPATLLPVESDDTPIHICSEILAEETGTRPDLRDQPLPGVPAWYTDGSSFIMDGRRQAGAAIVDNKRTVWASNLPEGTSAQKAELIALTQALRLAEGKSINIYTDSRYAFATAHVHGAIYKQRGWLTSAGKDIKNKEEILALLEAIHLPKRVAIIHCPGHQRGTDPVATGNRKADEAAKQAAQSTRILTETTKNAGKRTADGSEFEKRTADGSEFESPKKKAKVE

SEQ ID NO: 1681 - protein, 2131 aa, synthetic construct
MPAAKRVKLDGGDKKYSIGLDIGTNSVGWAVITDEYKVPSKKFKVLGNTDRHSIKKNLIGALLFDSGETAEATRLKRTARRRYTRRKNRICYLQEIFSNEMAKVDDSFFHRLEESFLVEEDKKHERHPIFGNIVDEVAYHEKYPTIYHLRKKLVDSTDKADLRLIYLALAHMIKFRGHFLIEGDLNPDNSDVDKLFIQLVQTYNQLFEENPINASGVDAKAILSARLSKSRRLENLIAQLPGEKKNGLFGNLIALSLGLTPNFKSNFDLAEDAKLQLSKDTYDDDLDNLLAQIGDQYADLFLAAKNLSDAILLSDILRVNTEITKAPLSASMIKRYDEHHQDLTLLKALVRQQLPEKYKEIFFDQSKNGYAGYIDGGASQEEFYKFIKPILEKMDGTEELLVKLNREDLLRKQRTFDNGSIPHQIHLGELHAILRRQEDFYPFLKDNREKIEKILTFRIPYYVGPLARGNSRFAWMTRKSEETITPWNFEEVVDKGASAQSFIERMTNFDKNLPNEKVLPKHSLLYEYFTVYNELTKVKYVTEGMRKPAFLSGEQKKAIVDLLFKTNRKVTVKQLKEDYFKKIECFDSVEISGVEDRFNASLGTYHDLLKIIKDKDFLDNEENEDILEDIVLTLTLFEDREMIEERLKTYAHLFDDKVMKQLKRRRYTGWGRLSRKLINGIRDKQSGKTILDFLKSDGFANRNFMQLIHDDSLTFKEDIQKAQVSGQGDSLHEHIANLAGSPAIKKGILQTVKVVDELVKVMGRHKPENIVIEMARENQTTQKGQKNSRERMKRIEEGIKELGSQILKEHPVENTQLQNEKLYLYYLQNGRDMYVDQELDINRLSDYDVDHIVPQSFLKDDSIDNKVLTRSDKARGKSDNVPSEEVVKKMKNYWRQLLNAKLITQRKFDNLTKAERGGLSELDKAGFIKRQLVETRQITKHVAQILDSRMNTKYDENDKLIREVKVITLKSKLVSDFRKDFQFYKVREINNYHHAHDAYLNAVVGTALIKKYPKLESEFVYGDYKVYDVRKMIAKSEQEIGKATAKYFFYSNIMNFFKTEITLANGEIRKRPLIETNGETGEIVWDKGRDFATVRKVLSMPQVNIVKKTEVQTGGFSKESILPKRNSDKLIARKKDWDPKKYGGFDSPTVAYSVLVVAKVEKGKSKKLKSVKELLGITIMERSSFEKNPIDFLEAKGYKEVKKDLIIKLPKYSLFELENGRKRMLASAGELQKGNELALPSKYVNFLYLASHYEKLKGSPEDNEQKQLFVEQHKHYLDEIIEQISEFSKRVILADANLDKVLSAYNKHRDKPIREQAENIIHLFTLTNLGAPAAFKYFDTTIDRKRYTSTKEVLDATLIHQSITGLYETRIDLSQLGGDGGGSSGSSGSSGSSGSSGGLLGRDLLTKLKAQIQFSTEGPQVTWEDRPAMCLVLNLEEEYRLHEKPVPPSIDPSWLQLFPMVWAEKAGMGLANQVPPVVVELKSDASPVAVRQYPMSKEAREGIRPHIQRFLDLGILVPCQSPWNTPLLPVKKPGTNDYRPVQDLREVNKRVQDIHPTVPNPYNLLSSLPPSHTWYSVLDLKDAFFCLKLHPNSQPLFAFEWRDPEKGNTGQLTWTRLPQGFKNSPTLFNEALHRDLASFRALNPQVVMLQYVDDLLVAAPTYRDCKEGTRRLLQELSKLGYRVSAKKAQLCREEVTYLGYLLKGGKRWLTPARKATVMKIPTPTTPRQVREFLGKAGFCRLFIPGFASLAAPLYPLTRPKVPFTWTEAHQEAFGRIKEALLSAPALALPDLTKPFALYVDEKEGVARGVLTQTLGPWRRPVAYLSKKLDPVASGWPTCLKAIAAVALLLKDADKLTLGQNVLVIAPHNLESIVRQPPDRWMTNARMTHYQSLLLNERVSFAPPAILNPATLLPVESDDTPIHICSEILAEETGTRPDLRDQPLPGVPAWYTDGSSFIMDGRRQAGAAIVDNKRTVWASNLPEGTSAQKAELIALTQALRLAEGKSINIYTDSRYAFATAHVHGAIYKQRGWLTSAGKDIKNKEEILALLEAIHLPKRVAIIHCPGHQRGTDPVATGNRKADEAAKQAAQSTRILTETTKNAGKRTADGSEFEKRTADGSEFESPKKKAKVE

SEQ ID NO: 1682 - protein, 2127 aa, synthetic construct
MPAAKRVKLDGGDKKYSIGLDIGTNSVGWAVITDEYKVPSKKFKVLGNTDRHSIKKNLIGALLFDSGETAEATRLKRTARRRYTRRKNRICYLQEIFSNEMAKVDDSFFHRLEESFLVEEDKKHERHPIFGNIVDEVAYHEKYPTIYHLRKKLVDSTDKADLRLIYLALAHMIKFRGHFLIEGDLNPDNSDVDKLFIQLVQTYNQLFEENPINASGVDAKAILSARLSKSRRLENLIAQLPGEKKNGLFGNLIALSLGLTPNFKSNFDLAEDAKLQLSKDTYDDDLDNLLAQIGDQYADLFLAAKNLSDAILLSDILRVNTEITKAPLSASMIKRYDEHHQDLTLLKALVRQQLPEKYKEIFFDQSKNGYAGYIDGGASQEEFYKFIKPILEKMDGTEELLVKLNREDLLRKQRTFDNGSIPHQIHLGELHAILRRQEDFYPFLKDNREKIEKILTFRIPYYVGPLARGNSRFAWMTRKSEETITPWNFEEVVDKGASAQSFIERMTNFDKNLPNEKVLPKHSLLYEYFTVYNELTKVKYVTEGMRKPAFLSGEQKKAIVDLLFKTNRKVTVKQLKEDYFKKIECFDSVEISGVEDRFNASLGTYHDLLKIIKDKDFLDNEENEDILEDIVLTLTLFEDREMIEERLKTYAHLFDDKVMKQLKRRRYTGWGRLSRKLINGIRDKQSGKTILDFLKSDGFANRNFMQLIHDDSLTFKEDIQKAQVSGQGDSLHEHIANLAGSPAIKKGILQTVKVVDELVKVMGRHKPENIVIEMARENQTTQKGQKNSRERMKRIEEGIKELGSQILKEHPVENTQLQNEKLYLYYLQNGRDMYVDQELDINRLSDYDVDHIVPQSFLKDDSIDNKVLTRSDKARGKSDNVPSEEVVKKMKNYWRQLLNAKLITQRKFDNLTKAERGGLSELDKAGFIKRQLVETRQITKHVAQILDSRMNTKYDENDKLIREVKVITLKSKLVSDFRKDFQFYKVREINNYHHAHDAYLNAVVGTALIKKYPKLESEFVYGDYKVYDVRKMIAKSEQEIGKATAKYFFYSNIMNFFKTEITLANGEIRKRPLIETNGETGEIVWDKGRDFATVRKVLSMPQVNIVKKTEVQTGGFSKESILPKRNSDKLIARKKDWDPKKYGGFDSPTVAYSVLVVAKVEKGKSKKLKSVKELLGITIMERSSFEKNPIDFLEAKGYKEVKKDLIIKLPKYSLFELENGRKRMLASAGELQKGNELALPSKYVNFLYLASHYEKLKGSPEDNEQKQLFVEQHKHYLDEIIEQISEFSKRVILADANLDKVLSAYNKHRDKPIREQAENIIHLFTLTNLGAPAAFKYFDTTIDRKRYTSTKEVLDATLIHQSITGLYETRIDLSQLGGDGGGGGGGSEAAAKGGLLGRDLLTKLKAQIQFSTEGPQVTWEDRPAMCLVLNLEEEYRLHEKPVPPSIDPSWLQLFPMVWAEKAGMGLANQVPPVVVELKSDASPVAVRQYPMSKEAREGIRPHIQRFLDLGILVPCQSPWNTPLLPVKKPGTNDYRPVQDLREVNKRVQDIHPTVPNPYNLLSSLPPSHTWYSVLDLKDAFFCLKLHPNSQPLFAFEWRDPEKGNTGQLTWTRLPQGFKNSPTLFNEALHRDLASFRALNPQVVMLQYVDDLLVAAPTYRDCKEGTRRLLQELSKLGYRVSAKKAQLCREEVTYLGYLLKGGKRWLTPARKATVMKIPTPTTPRQVREFLGKAGFCRLFIPGFASLAAPLYPLTRPKVPFTWTEAHQEAFGRIKEALLSAPALALPDLTKPFALYVDEKEGVARGVLTQTLGPWRRPVAYLSKKLDPVASGWPTCLKAIAAVALLLKDADKLTLGQNVLVIAPHNLESIVRQPPDRWMTNARMTHYQSLLLNERVSFAPPAILNPATLLPVESDDTPIHICSEILAEETGTRPDLRDQPLPGVPAWYTDGSSFIMDGRRQAGAAIVDNKRTVWASNLPEGTSAQKAELIALTQALRLAEGKSINIYTDSRYAFATAHVHGAIYKQRGWLTSAGKDIKNKEEILALLEAIHLPKRVAIIHCPGHQRGTDPVATGNRKADEAAKQAAQSTRILTETTKNAGKRTADGSEFEKRTADGSEFESPKKKAKVE

SEQ ID NO: 1683 - protein, 2125 aa, synthetic construct
MPAAKRVKLDGGDKKYSIGLDIGTNSVGWAVITDEYKVPSKKFKVLGNTDRHSIKKNLIGALLFDSGETAEATRLKRTARRRYTRRKNRICYLQEIFSNEMAKVDDSFFHRLEESFLVEEDKKHERHPIFGNIVDEVAYHEKYPTIYHLRKKLVDSTDKADLRLIYLALAHMIKFRGHFLIEGDLNPDNSDVDKLFIQLVQTYNQLFEENPINASGVDAKAILSARLSKSRRLENLIAQLPGEKKNGLFGNLIALSLGLTPNFKSNFDLAEDAKLQLSKDTYDDDLDNLLAQIGDQYADLFLAAKNLSDAILLSDILRVNTEITKAPLSASMIKRYDEHHQDLTLLKALVRQQLPEKYKEIFFDQSKNGYAGYIDGGASQEEFYKFIKPILEKMDGTEELLVKLNREDLLRKQRTFDNGSIPHQIHLGELHAILRRQEDFYPFLKDNREKIEKILTFRIPYYVGPLARGNSRFAWMTRKSEETITPWNFEEVVDKGASAQSFIERMTNFDKNLPNEKVLPKHSLLYEYFTVYNELTKVKYVTEGMRKPAFLSGEQKKAIVDLLFKTNRKVTVKQLKEDYFKKIECFDSVEISGVEDRFNASLGTYHDLLKIIKDKDFLDNEENEDILEDIVLTLTLFEDREMIEERLKTYAHLFDDKVMKQLKRRRYTGWGRLSRKLINGIRDKQSGKTILDFLKSDGFANRNFMQLIHDDSLTFKEDIQKAQVSGQGDSLHEHIANLAGSPAIKKGILQTVKVVDELVKVMGRHKPENIVIEMARENQTTQKGQKNSRERMKRIEEGIKELGSQILKEHPVENTQLQNEKLYLYYLQNGRDMYVDQELDINRLSDYDVDHIVPQSFLKDDSIDNKVLTRSDKARGKSDNVPSEEVVKKMKNYWRQLLNAKLITQRKFDNLTKAERGGLSELDKAGFIKRQLVETRQITKHVAQILDSRMNTKYDENDKLIREVKVITLKSKLVSDFRKDFQFYKVREINNYHHAHDAYLNAVVGTALIKKYPKLESEFVYGDYKVYDVRKMIAKSEQEIGKATAKYFFYSNIMNFFKTEITLANGEIRKRPLIETNGETGEIVWDKGRDFATVRKVLSMPQVNIVKKTEVQTGGFSKESILPKRNSDKLIARKKDWDPKKYGGFDSPTVAYSVLVVAKVEKGKSKKLKSVKELLGITIMERSSFEKNPIDFLEAKGYKEVKKDLIIKLPKYSLFELENGRKRMLASAGELQKGNELALPSKYVNFLYLASHYEKLKGSPEDNEQKQLFVEQHKHYLDEIIEQISEFSKRVILADANLDKVLSAYNKHRDKPIREQAENIIHLFTLTNLGAPAAFKYFDTTIDRKRYTSTKEVLDATLIHQSITGLYETRIDLSQLGGDGGPAPGGSGSSGGLLGRDLLTKLKAQIQFSTEGPQVTWEDRPAMCLVLNLEEEYRLHEKPVPPSIDPSWLQLFPMVWAEKAGMGLANQVPPVVVELKSDASPVAVRQYPMSKEAREGIRPHIQRFLDLGILVPCQSPWNTPLLPVKKPGTNDYRPVQDLREVNKRVQDIHPTVPNPYNLLSSLPPSHTWYSVLDLKDAFFCLKLHPNSQPLFAFEWRDPEKGNTGQLTWTRLPQGFKNSPTLFNEALHRDLASFRALNPQVVMLQYVDDLLVAAPTYRDCKEGTRRLLQELSKLGYRVSAKKAQLCREEVTYLGYLLKGGKRWLTPARKATVMKIPTPTTPRQVREFLGKAGFCRLFIPGFASLAAPLYPLTRPKVPFTWTEAHQEAFGRIKEALLSAPALALPDLTKPFALYVDEKEGVARGVLTQTLGPWRRPVAYLSKKLDPVASGWPTCLKAIAAVALLLKDADKLTLGQNVLVIAPHNLESIVRQPPDRWMTNARMTHYQSLLLNERVSFAPPAILNPATLLPVESDDTPIHICSEILAEETGTRPDLRDQPLPGVPAWYTDGSSFIMDGRRQAGAAIVDNKRTVWASNLPEGTSAQKAELIALTQALRLAEGKSINIYTDSRYAFATAHVHGAIYKQRGWLTSAGKDIKNKEEILALLEAIHLPKRVAIIHCPGHQRGTDPVATGNRKADEAAKQAAQSTRILTETTKNAGKRTADGSEFEKRTADGSEFESPKKKAKVE

SEQ ID NO: 1684 - protein, 2127 aa, synthetic construct
MPAAKRVKLDGGDKKYSIGLDIGTNSVGWAVITDEYKVPSKKFKVLGNTDRHSIKKNLIGALLFDSGETAEATRLKRTARRRYTRRKNRICYLQEIFSNEMAKVDDSFFHRLEESFLVEEDKKHERHPIFGNIVDEVAYHEKYPTIYHLRKKLVDSTDKADLRLIYLALAHMIKFRGHFLIEGDLNPDNSDVDKLFIQLVQTYNQLFEENPINASGVDAKAILSARLSKSRRLENLIAQLPGEKKNGLFGNLIALSLGLTPNFKSNFDLAEDAKLQLSKDTYDDDLDNLLAQIGDQYADLFLAAKNLSDAILLSDILRVNTEITKAPLSASMIKRYDEHHQDLTLLKALVRQQLPEKYKEIFFDQSKNGYAGYIDGGASQEEFYKFIKPILEKMDGTEELLVKLNREDLLRKQRTFDNGSIPHQIHLGELHAILRRQEDFYPFLKDNREKIEKILTFRIPYYVGPLARGNSRFAWMTRKSEETITPWNFEEVVDKGASAQSFIERMTNFDKNLPNEKVLPKHSLLYEYFTVYNELTKVKYVTEGMRKPAFLSGEQKKAIVDLLFKTNRKVTVKQLKEDYFKKIECFDSVEISGVEDRFNASLGTYHDLLKIIKDKDFLDNEENEDILEDIVLTLTLFEDREMIEERLKTYAHLFDDKVMKQLKRRRYTGWGRLSRKLINGIRDKQSGKTILDFLKSDGFANRNFMQLIHDDSLTFKEDIQKAQVSGQGDSLHEHIANLAGSPAIKKGILQTVKVVDELVKVMGRHKPENIVIEMARENQTTQKGQKNSRERMKRIEEGIKELGSQILKEHPVENTQLQNEKLYLYYLQNGRDMYVDQELDINRLSDYDVDHIVPQSFLKDDSIDNKVLTRSDKARGKSDNVPSEEVVKKMKNYWRQLLNAKLITQRKFDNLTKAERGGLSELDKAGFIKRQLVETRQITKHVAQILDSRMNTKYDENDKLIREVKVITLKSKLVSDFRKDFQFYKVREINNYHHAHDAYLNAVVGTALIKKYPKLESEFVYGDYKVYDVRKMIAKSEQEIGKATAKYFFYSNIMNFFKTEITLANGEIRKRPLIETNGETGEIVWDKGRDFATVRKVLSMPQVNIVKKTEVQTGGFSKESILPKRNSDKLIARKKDWDPKKYGGFDSPTVAYSVLVVAKVEKGKSKKLKSVKELLGITIMERSSFEKNPIDFLEAKGYKEVKKDLIIKLPKYSLFELENGRKRMLASAGELQKGNELALPSKYVNFLYLASHYEKLKGSPEDNEQKQLFVEQHKHYLDEIIEQISEFSKRVILADANLDKVLSAYNKHRDKPIREQAENIIHLFTLTNLGAPAAFKYFDTTIDRKRYTSTKEVLDATLIHQSITGLYETRIDLSQLGGDGGPAPAPAPAPAPGGLLGRDLLTKLKAQIQFSTEGPQVTWEDRPAMCLVLNLEEEYRLHEKPVPPSIDPSWLQLFPMVWAEKAGMGLANQVPPVVVELKSDASPVAVRQYPMSKEAREGIRPHIQRFLDLGILVPCQSPWNTPLLPVKKPGTNDYRPVQDLREVNKRVQDIHPTVPNPYNLLSSLPPSHTWYSVLDLKDAFFCLKLHPNSQPLFAFEWRDPEKGNTGQLTWTRLPQGFKNSPTLFNEALHRDLASFRALNPQVVMLQYVDDLLVAAPTYRDCKEGTRRLLQELSKLGYRVSAKKAQLCREEVTYLGYLLKGGKRWLTPARKATVMKIPTPTTPRQVREFLGKAGFCRLFIPGFASLAAPLYPLTRPKVPFTWTEAHQEAFGRIKEALLSAPALALPDLTKPFALYVDEKEGVARGVLTQTLGPWRRPVAYLSKKLDPVASGWPTCLKAIAAVALLLKDADKLTLGQNVLVIAPHNLESIVRQPPDRWMTNARMTHYQSLLLNERVSFAPPAILNPATLLPVESDDTPIHICSEILAEETGTRPDLRDQPLPGVPAWYTDGSSFIMDGRRQAGAAIVDNKRTVWASNLPEGTSAQKAELIALTQALRLAEGKSINIYTDSRYAFATAHVHGAIYKQRGWLTSAGKDIKNKEEILALLEAIHLPKRVAIIHCPGHQRGTDPVATGNRKADEAAKQAAQSTRILTETTKNAGKRTADGSEFEKRTADGSEFESPKKKAKVE

SEQ ID NO: 1685 - protein, 2127 aa, synthetic construct
MPAAKRVKLDGGDKKYSIGLDIGTNSVGWAVITDEYKVPSKKFKVLGNTDRHSIKKNLIGALLFDSGETAEATRLKRTARRRYTRRKNRICYLQEIFSNEMAKVDDSFFHRLEESFLVEEDKKHERHPIFGNIVDEVAYHEKYPTIYHLRKKLVDSTDKADLRLIYLALAHMIKFRGHFLIEGDLNPDNSDVDKLFIQLVQTYNQLFEENPINASGVDAKAILSARLSKSRRLENLIAQLPGEKKNGLFGNLIALSLGLTPNFKSNFDLAEDAKLQLSKDTYDDDLDNLLAQIGDQYADLFLAAKNLSDAILLSDILRVNTEITKAPLSASMIKRYDEHHQDLTLLKALVRQQLPEKYKEIFFDQSKNGYAGYIDGGASQEEFYKFIKPILEKMDGTEELLVKLNREDLLRKQRTFDNGSIPHQIHLGELHAILRRQEDFYPFLKDNREKIEKILTFRIPYYVGPLARGNSRFAWMTRKSEETITPWNFEEVVDKGASAQSFIERMTNFDKNLPNEKVLPKHSLLYEYFTVYNELTKVKYVTEGMRKPAFLSGEQKKAIVDLLFKTNRKVTVKQLKEDYFKKIECFDSVEISGVEDRFNASLGTYHDLLKIIKDKDFLDNEENEDILEDIVLTLTLFEDREMIEERLKTYAHLFDDKVMKQLKRRRYTGWGRLSRKLINGIRDKQSGKTILDFLKSDGFANRNFMQLIHDDSLTFKEDIQKAQVSGQGDSLHEHIANLAGSPAIKKGILQTVKVVDELVKVMGRHKPENIVIEMARENQTTQKGQKNSRERMKRIEEGIKELGSQILKEHPVENTQLQNEKLYLYYLQNGRDMYVDQELDINRLSDYDVDHIVPQSFLKDDSIDNKVLTRSDKARGKSDNVPSEEVVKKMKNYWRQLLNAKLITQRKFDNLTKAERGGLSELDKAGFIKRQLVETRQITKHVAQILDSRMNTKYDENDKLIREVKVITLKSKLVSDFRKDFQFYKVREINNYHHAHDAYLNAVVGTALIKKYPKLESEFVYGDYKVYDVRKMIAKSEQEIGKATAKYFFYSNIMNFFKTEITLANGEIRKRPLIETNGETGEIVWDKGRDFATVRKVLSMPQVNIVKKTEVQTGGFSKESILPKRNSDKLIARKKDWDPKKYGGFDSPTVAYSVLVVAKVEKGKSKKLKSVKELLGITIMERSSFEKNPIDFLEAKGYKEVKKDLIIKLPKYSLFELENGRKRMLASAGELQKGNELALPSKYVNFLYLASHYEKLKGSPEDNEQKQLFVEQHKHYLDEIIEQISEFSKRVILADANLDKVLSAYNKHRDKPIREQAENIIHLFTLTNLGAPAAFKYFDTTIDRKRYTSTKEVLDATLIHQSITGLYETRIDLSQLGGDGGEAAAKPAPGGGGGLLGRDLLTKLKAQIQFSTEGPQVTWEDRPAMCLVLNLEEEYRLHEKPVPPSIDPSWLQLFPMVWAEKAGMGLANQVPPVVVELKSDASPVAVRQYPMSKEAREGIRPHIQRFLDLGILVPCQSPWNTPLLPVKKPGTNDYRPVQDLREVNKRVQDIHPTVPNPYNLLSSLPPSHTWYSVLDLKDAFFCLKLHPNSQPLFAFEWRDPEKGNTGQLTWTRLPQGFKNSPTLFNEALHRDLASFRALNPQVVMLQYVDDLLVAAPTYRDCKEGTRRLLQELSKLGYRVSAKKAQLCREEVTYLGYLLKGGKRWLTPARKATVMKIPTPTTPRQVREFLGKAGFCRLFIPGFASLAAPLYPLTRPKVPFTWTEAHQEAFGRIKEALLSAPALALPDLTKPFALYVDEKEGVARGVLTQTLGPWRRPVAYLSKKLDPVASGWPTCLKAIAAVALLLKDADKLTLGQNVLVIAPHNLESIVRQPPDRWMTNARMTHYQSLLLNERVSFAPPAILNPATLLPVESDDTPIHICSEILAEETGTRPDLRDQPLPGVPAWYTDGSSFIMDGRRQAGAAIVDNKRTVWASNLPEGTSAQKAELIALTQALRLAEGKSINIYTDSRYAFATAHVHGAIYKQRGWLTSAGKDIKNKEEILALLEAIHLPKRVAIIHCPGHQRGTDPVATGNRKADEAAKQAAQSTRILTETTKNAGKRTADGSEFEKRTADGSEFESPKKKAKVE

SEQ ID NO: 1686 - protein, 2125 aa, synthetic construct
MPAAKRVKLDGGDKKYSIGLDIGTNSVGWAVITDEYKVPSKKFKVLGNTDRHSIKKNLIGALLFDSGETAEATRLKRTARRRYTRRKNRICYLQEIFSNEMAKVDDSFFHRLEESFLVEEDKKHERHPIFGNIVDEVAYHEKYPTIYHLRKKLVDSTDKADLRLIYLALAHMIKFRGHFLIEGDLNPDNSDVDKLFIQLVQTYNQLFEENPINASGVDAKAILSARLSKSRRLENLIAQLPGEKKNGLFGNLIALSLGLTPNFKSNFDLAEDAKLQLSKDTYDDDLDNLLAQIGDQYADLFLAAKNLSDAILLSDILRVNTEITKAPLSASMIKRYDEHHQDLTLLKALVRQQLPEKYKEIFFDQSKNGYAGYIDGGASQEEFYKFIKPILEKMDGTEELLVKLNREDLLRKQRTFDNGSIPHQIHLGELHAILRRQEDFYPFLKDNREKIEKILTFRIPYYVGPLARGNSRFAWMTRKSEETITPWNFEEVVDKGASAQSFIERMTNFDKNLPNEKVLPKHSLLYEYFTVYNELTKVKYVTEGMRKPAFLSGEQKKAIVDLLFKTNRKVTVKQLKEDYFKKIECFDSVEISGVEDRFNASLGTYHDLLKIIKDKDFLDNEENEDILEDIVLTLTLFEDREMIEERLKTYAHLFDDKVMKQLKRRRYTGWGRLSRKLINGIRDKQSGKTILDFLKSDGFANRNFMQLIHDDSLTFKEDIQKAQVSGQGDSLHEHIANLAGSPAIKKGILQTVKVVDELVKVMGRHKPENIVIEMARENQTTQKGQKNSRERMKRIEEGIKELGSQILKEHPVENTQLQNEKLYLYYLQNGRDMYVDQELDINRLSDYDVDHIVPQSFLKDDSIDNKVLTRSDKARGKSDNVPSEEVVKKMKNYWRQLLNAKLITQRKFDNLTKAERGGLSELDKAGFIKRQLVETRQITKHVAQILDSRMNTKYDENDKLIREVKVITLKSKLVSDFRKDFQFYKVREINNYHHAHDAYLNAVVGTALIKKYPKLESEFVYGDYKVYDVRKMIAKSEQEIGKATAKYFFYSNIMNFFKTEITLANGEIRKRPLIETNGETGEIVWDKGRDFATVRKVLSMPQVNIVKKTEVQTGGFSKESILPKRNSDKLIARKKDWDPKKYGGFDSPTVAYSVLVVAKVEKGKSKKLKSVKELLGITIMERSSFEKNPIDFLEAKGYKEVKKDLIIKLPKYSLFELENGRKRMLASAGELQKGNELALPSKYVNFLYLASHYEKLKGSPEDNEQKQLFVEQHKHYLDEIIEQISEFSKRVILADANLDKVLSAYNKHRDKPIREQAENIIHLFTLTNLGAPAAFKYFDTTIDRKRYTSTKEVLDATLIHQSITGLYETRIDLSQLGGDGGGGSGGSGGSGGLLGRDLLTKLKAQIQFSTEGPQVTWEDRPAMCLVLNLEEEYRLHEKPVPPSIDPSWLQLFPMVWAEKAGMGLANQVPPVVVELKSDASPVAVRQYPMSKEAREGIRPHIQRFLDLGILVPCQSPWNTPLLPVKKPGTNDYRPVQDLREVNKRVQDIHPTVPNPYNLLSSLPPSHTWYSVLDLKDAFFCLKLHPNSQPLFAFEWRDPEKGNTGQLTWTRLPQGFKNSPTLFNEALHRDLASFRALNPQVVMLQYVDDLLVAAPTYRDCKEGTRRLLQELSKLGYRVSAKKAQLCREEVTYLGYLLKGGKRWLTPARKATVMKIPTPTTPRQVREFLGKAGFCRLFIPGFASLAAPLYPLTRPKVPFTWTEAHQEAFGRIKEALLSAPALALPDLTKPFALYVDEKEGVARGVLTQTLGPWRRPVAYLSKKLDPVASGWPTCLKAIAAVALLLKDADKLTLGQNVLVIAPHNLESIVRQPPDRWMTNARMTHYQSLLLNERVSFAPPAILNPATLLPVESDDTPIHICSEILAEETGTRPDLRDQPLPGVPAWYTDGSSFIMDGRRQAGAAIVDNKRTVWASNLPEGTSAQKAELIALTQALRLAEGKSINIYTDSRYAFATAHVHGAIYKQRGWLTSAGKDIKNKEEILALLEAIHLPKRVAIIHCPGHQRGTDPVATGNRKADEAAKQAAQSTRILTETTKNAGKRTADGSEFEKRTADGSEFESPKKKAKVE

SEQ ID NO: 1687 - protein, 2127 aa, synthetic construct
MPAAKRVKLDGGDKKYSIGLDIGTNSVGWAVITDEYKVPSKKFKVLGNTDRHSIKKNLIGALLFDSGETAEATRLKRTARRRYTRRKNRICYLQEIFSNEMAKVDDSFFHRLEESFLVEEDKKHERHPIFGNIVDEVAYHEKYPTIYHLRKKLVDSTDKADLRLIYLALAHMIKFRGHFLIEGDLNPDNSDVDKLFIQLVQTYNQLFEENPINASGVDAKAILSARLSKSRRLENLIAQLPGEKKNGLFGNLIALSLGLTPNFKSNFDLAEDAKLQLSKDTYDDDLDNLLAQIGDQYADLFLAAKNLSDAILLSDILRVNTEITKAPLSASMIKRYDEHHQDLTLLKALVRQQLPEKYKEIFFDQSKNGYAGYIDGGASQEEFYKFIKPILEKMDGTEELLVKLNREDLLRKQRTFDNGSIPHQIHLGELHAILRRQEDFYPFLKDNREKIEKILTFRIPYYVGPLARGNSRFAWMTRKSEETITPWNFEEVVDKGASAQSFIERMTNFDKNLPNEKVLPKHSLLYEYFTVYNELTKVKYVTEGMRKPAFLSGEQKKAIVDLLFKTNRKVTVKQLKEDYFKKIECFDSVEISGVEDRFNASLGTYHDLLKIIKDKDFLDNEENEDILEDIVLTLTLFEDREMIEERLKTYAHLFDDKVMKQLKRRRYTGWGRLSRKLINGIRDKQSGKTILDFLKSDGFANRNFMQLIHDDSLTFKEDIQKAQVSGQGDSLHEHIANLAGSPAIKKGILQTVKVVDELVKVMGRHKPENIVIEMARENQTTQKGQKNSRERMKRIEEGIKELGSQILKEHPVENTQLQNEKLYLYYLQNGRDMYVDQELDINRLSDYDVDHIVPQSFLKDDSIDNKVLTRSDKARGKSDNVPSEEVVKKMKNYWRQLLNAKLITQRKFDNLTKAERGGLSELDKAGFIKRQLVETRQITKHVAQILDSRMNTKYDENDKLIREVKVITLKSKLVSDFRKDFQFYKVREINNYHHAHDAYLNAVVGTALIKKYPKLESEFVYGDYKVYDVRKMIAKSEQEIGKATAKYFFYSNIMNFFKTEITLANGEIRKRPLIETNGETGEIVWDKGRDFATVRKVLSMPQVNIVKKTEVQTGGFSKESILPKRNSDKLIARKKDWDPKKYGGFDSPTVAYSVLVVAKVEKGKSKKLKSVKELLGITIMERSSFEKNPIDFLEAKGYKEVKKDLIIKLPKYSLFELENGRKRMLASAGELQKGNELALPSKYVNFLYLASHYEKLKGSPEDNEQKQLFVEQHKHYLDEIIEQISEFSKRVILADANLDKVLSAYNKHRDKPIREQAENIIHLFTLTNLGAPAAFKYFDTTIDRKRYTSTKEVLDATLIHQSITGLYETRIDLSQLGGDGGEAAAKPAPGSSGGLLGRDLLTKLKAQIQFSTEGPQVTWEDRPAMCLVLNLEEEYRLHEKPVPPSIDPSWLQLFPMVWAEKAGMGLANQVPPVVVELKSDASPVAVRQYPMSKEAREGIRPHIQRFLDLGILVPCQSPWNTPLLPVKKPGTNDYRPVQDLREVNKRVQDIHPTVPNPYNLLSSLPPSHTWYSVLDLKDAFFCLKLHPNSQPLFAFEWRDPEKGNTGQLTWTRLPQGFKNSPTLFNEALHRDLASFRALNPQVVMLQYVDDLLVAAPTYRDCKEGTRRLLQELSKLGYRVSAKKAQLCREEVTYLGYLLKGGKRWLTPARKATVMKIPTPTTPRQVREFLGKAGFCRLFIPGFASLAAPLYPLTRPKVPFTWTEAHQEAFGRIKEALLSAPALALPDLTKPFALYVDEKEGVARGVLTQTLGPWRRPVAYLSKKLDPVASGWPTCLKAIAAVALLLKDADKLTLGQNVLVIAPHNLESIVRQPPDRWMTNARMTHYQSLLLNERVSFAPPAILNPATLLPVESDDTPIHICSEILAEETGTRPDLRDQPLPGVPAWYTDGSSFIMDGRRQAGAAIVDNKRTVWASNLPEGTSAQKAELIALTQALRLAEGKSINIYTDSRYAFATAHVHGAIYKQRGWLTSAGKDIKNKEEILALLEAIHLPKRVAIIHCPGHQRGTDPVATGNRKADEAAKQAAQSTRILTETTKNAGKRTADGSEFEKRTADGSEFESPKKKAKVE

SEQ ID NO: 1688 - protein, 2127 aa, synthetic construct
MPAAKRVKLDGGDKKYSIGLDIGTNSVGWAVITDEYKVPSKKFKVLGNTDRHSIKKNLIGALLFDSGETAEATRLKRTARRRYTRRKNRICYLQEIFSNEMAKVDDSFFHRLEESFLVEEDKKHERHPIFGNIVDEVAYHEKYPTIYHLRKKLVDSTDKADLRLIYLALAHMIKFRGHFLIEGDLNPDNSDVDKLFIQLVQTYNQLFEENPINASGVDAKAILSARLSKSRRLENLIAQLPGEKKNGLFGNLIALSLGLTPNFKSNFDLAEDAKLQLSKDTYDDDLDNLLAQIGDQYADLFLAAKNLSDAILLSDILRVNTEITKAPLSASMIKRYDEHHQDLTLLKALVRQQLPEKYKEIFFDQSKNGYAGYIDGGASQEEFYKFIKPILEKMDGTEELLVKLNREDLLRKQRTFDNGSIPHQIHLGELHAILRRQEDFYPFLKDNREKIEKILTFRIPYYVGPLARGNSRFAWMTRKSEETITPWNFEEVVDKGASAQSFIERMTNFDKNLPNEKVLPKHSLLYEYFTVYNELTKVKYVTEGMRKPAFLSGEQKKAIVDLLFKTNRKVTVKQLKEDYFKKIECFDSVEISGVEDRFNASLGTYHDLLKIIKDKDFLDNEENEDILEDIVLTLTLFEDREMIEERLKTYAHLFDDKVMKQLKRRRYTGWGRLSRKLINGIRDKQSGKTILDFLKSDGFANRNFMQLIHDDSLTFKEDIQKAQVSGQGDSLHEHIANLAGSPAIKKGILQTVKVVDELVKVMGRHKPENIVIEMARENQTTQKGQKNSRERMKRIEEGIKELGSQILKEHPVENTQLQNEKLYLYYLQNGRDMYVDQELDINRLSDYDVDHIVPQSFLKDDSIDNKVLTRSDKARGKSDNVPSEEVVKKMKNYWRQLLNAKLITQRKFDNLTKAERGGLSELDKAGFIKRQLVETRQITKHVAQILDSRMNTKYDENDKLIREVKVITLKSKLVSDFRKDFQFYKVREINNYHHAHDAYLNAVVGTALIKKYPKLESEFVYGDYKVYDVRKMIAKSEQEIGKATAKYFFYSNIMNFFKTEITLANGEIRKRPLIETNGETGEIVWDKGRDFATVRKVLSMPQVNIVKKTEVQTGGFSKESILPKRNSDKLIARKKDWDPKKYGGFDSPTVAYSVLVVAKVEKGKSKKLKSVKELLGITIMERSSFEKNPIDFLEAKGYKEVKKDLIIKLPKYSLFELENGRKRMLASAGELQKGNELALPSKYVNFLYLASHYEKLKGSPEDNEQKQLFVEQHKHYLDEIIEQISEFSKRVILADANLDKVLSAYNKHRDKPIREQAENIIHLFTLTNLGAPAAFKYFDTTIDRKRYTSTKEVLDATLIHQSITGLYETRIDLSQLGGDGGGGGEAAAKGSSGGLLGRDLLTKLKAQIQFSTEGPQVTWEDRPAMCLVLNLEEEYRLHEKPVPPSIDPSWLQLFPMVWAEKAGMGLANQVPPVVVELKSDASPVAVRQYPMSKEAREGIRPHIQRFLDLGILVPCQSPWNTPLLPVKKPGTNDYRPVQDLREVNKRVQDIHPTVPNPYNLLSSLPPSHTWYSVLDLKDAFFCLKLHPNSQPLFAFEWRDPEKGNTGQLTWTRLPQGFKNSPTLFNEALHRDLASFRALNPQVVMLQYVDDLLVAAPTYRDCKEGTRRLLQELSKLGYRVSAKKAQLCREEVTYLGYLLKGGKRWLTPARKATVMKIPTPTTPRQVREFLGKAGFCRLFIPGFASLAAPLYPLTRPKVPFTWTEAHQEAFGRIKEALLSAPALALPDLTKPFALYVDEKEGVARGVLTQTLGPWRRPVAYLSKKLDPVASGWPTCLKAIAAVALLLKDADKLTLGQNVLVIAPHNLESIVRQPPDRWMTNARMTHYQSLLLNERVSFAPPAILNPATLLPVESDDTPIHICSEILAEETGTRPDLRDQPLPGVPAWYTDGSSFIMDGRRQAGAAIVDNKRTVWASNLPEGTSAQKAELIALTQALRLAEGKSINIYTDSRYAFATAHVHGAIYKQRGWLTSAGKDIKNKEEILALLEAIHLPKRVAIIHCPGHQRGTDPVATGNRKADEAAKQAAQSTRILTETTKNAGKRTADGSEFEKRTADGSEFESPKKKAKVE

SEQ ID NO: 1689 - protein, 2121 aa, synthetic construct
MPAAKRVKLDGGDKKYSIGLDIGTNSVGWAVITDEYKVPSKKFKVLGNTDRHSIKKNLIGALLFDSGETAEATRLKRTARRRYTRRKNRICYLQEIFSNEMAKVDDSFFHRLEESFLVEEDKKHERHPIFGNIVDEVAYHEKYPTIYHLRKKLVDSTDKADLRLIYLALAHMIKFRGHFLIEGDLNPDNSDVDKLFIQLVQTYNQLFEENPINASGVDAKAILSARLSKSRRLENLIAQLPGEKKNGLFGNLIALSLGLTPNFKSNFDLAEDAKLQLSKDTYDDDLDNLLAQIGDQYADLFLAAKNLSDAILLSDILRVNTEITKAPLSASMIKRYDEHHQDLTLLKALVRQQLPEKYKEIFFDQSKNGYAGYIDGGASQEEFYKFIKPILEKMDGTEELLVKLNREDLLRKQRTFDNGSIPHQIHLGELHAILRRQEDFYPFLKDNREKIEKILTFRIPYYVGPLARGNSRFAWMTRKSEETITPWNFEEVVDKGASAQSFIERMTNFDKNLPNEKVLPKHSLLYEYFTVYNELTKVKYVTEGMRKPAFLSGEQKKAIVDLLFKTNRKVTVKQLKEDYFKKIECFDSVEISGVEDRFNASLGTYHDLLKIIKDKDFLDNEENEDILEDIVLTLTLFEDREMIEERLKTYAHLFDDKVMKQLKRRRYTGWGRLSRKLINGIRDKQSGKTILDFLKSDGFANRNFMQLIHDDSLTFKEDIQKAQVSGQGDSLHEHIANLAGSPAIKKGILQTVKVVDELVKVMGRHKPENIVIEMARENQTTQKGQKNSRERMKRIEEGIKELGSQILKEHPVENTQLQNEKLYLYYLQNGRDMYVDQELDINRLSDYDVDHIVPQSFLKDDSIDNKVLTRSDKARGKSDNVPSEEVVKKMKNYWRQLLNAKLITQRKFDNLTKAERGGLSELDKAGFIKRQLVETRQITKHVAQILDSRMNTKYDENDKLIREVKVITLKSKLVSDFRKDFQFYKVREINNYHHAHDAYLNAVVGTALIKKYPKLESEFVYGDYKVYDVRKMIAKSEQEIGKATAKYFFYSNIMNFFKTEITLANGEIRKRPLIETNGETGEIVWDKGRDFATVRKVLSMPQVNIVKKTEVQTGGFSKESILPKRNSDKLIARKKDWDPKKYGGFDSPTVAYSVLVVAKVEKGKSKKLKSVKELLGITIMERSSFEKNPIDFLEAKGYKEVKKDLIIKLPKYSLFELENGRKRMLASAGELQKGNELALPSKYVNFLYLASHYEKLKGSPEDNEQKQLFVEQHKHYLDEIIEQISEFSKRVILADANLDKVLSAYNKHRDKPIREQAENIIHLFTLTNLGAPAAFKYFDTTIDRKRYTSTKEVLDATLIHQSITGLYETRIDLSQLGGDGGEAAAKGGLLGRDLLTKLKAQIQFSTEGPQVTWEDRPAMCLVLNLEEEYRLHEKPVPPSIDPSWLQLFPMVWAEKAGMGLANQVPPVVVELKSDASPVAVRQYPMSKEAREGIRPHIQRFLDLGILVPCQSPWNTPLLPVKKPGTNDYRPVQDLREVNKRVQDIHPTVPNPYNLLSSLPPSHTWYSVLDLKDAFFCLKLHPNSQPLFAFEWRDPEKGNTGQLTWTRLPQGFKNSPTLFNEALHRDLASFRALNPQVVMLQYVDDLLVAAPTYRDCKEGTRRLLQELSKLGYRVSAKKAQLCREEVTYLGYLLKGGKRWLTPARKATVMKIPTPTTPRQVREFLGKAGFCRLFIPGFASLAAPLYPLTRPKVPFTWTEAHQEAFGRIKEALLSAPALALPDLTKPFALYVDEKEGVARGVLTQTLGPWRRPVAYLSKKLDPVASGWPTCLKAIAAVALLLKDADKLTLGQNVLVIAPHNLESIVRQPPDRWMTNARMTHYQSLLLNERVSFAPPAILNPATLLPVESDDTPIHICSEILAEETGTRPDLRDQPLPGVPAWYTDGSSFIMDGRRQAGAAIVDNKRTVWASNLPEGTSAQKAELIALTQALRLAEGKSINIYTDSRYAFATAHVHGAIYKQRGWLTSAGKDIKNKEEILALLEAIHLPKRVAIIHCPGHQRGTDPVATGNRKADEAAKQAAQSTRILTETTKNAGKRTADGSEFEKRTADGSEFESPKKKAKVE

SEQ ID NO: 1690 - protein, 2127 aa, synthetic construct
MPAAKRVKLDGGDKKYSIGLDIGTNSVGWAVITDEYKVPSKKFKVLGNTDRHSIKKNLIGALLFDSGETAEATRLKRTARRRYTRRKNRICYLQEIFSNEMAKVDDSFFHRLEESFLVEEDKKHERHPIFGNIVDEVAYHEKYPTIYHLRKKLVDSTDKADLRLIYLALAHMIKFRGHFLIEGDLNPDNSDVDKLFIQLVQTYNQLFEENPINASGVDAKAILSARLSKSRRLENLIAQLPGEKKNGLFGNLIALSLGLTPNFKSNFDLAEDAKLQLSKDTYDDDLDNLLAQIGDQYADLFLAAKNLSDAILLSDILRVNTEITKAPLSASMIKRYDEHHQDLTLLKALVRQQLPEKYKEIFFDQSKNGYAGYIDGGASQEEFYKFIKPILEKMDGTEELLVKLNREDLLRKQRTFDNGSIPHQIHLGELHAILRRQEDFYPFLKDNREKIEKILTFRIPYYVGPLARGNSRFAWMTRKSEETITPWNFEEVVDKGASAQSFIERMTNFDKNLPNEKVLPKHSLLYEYFTVYNELTKVKYVTEGMRKPAFLSGEQKKAIVDLLFKTNRKVTVKQLKEDYFKKIECFDSVEISGVEDRFNASLGTYHDLLKIIKDKDFLDNEENEDILEDIVLTLTLFEDREMIEERLKTYAHLFDDKVMKQLKRRRYTGWGRLSRKLINGIRDKQSGKTILDFLKSDGFANRNFMQLIHDDSLTFKEDIQKAQVSGQGDSLHEHIANLAGSPAIKKGILQTVKVVDELVKVMGRHKPENIVIEMARENQTTQKGQKNSRERMKRIEEGIKELGSQILKEHPVENTQLQNEKLYLYYLQNGRDMYVDQELDINRLSDYDVDHIVPQSFLKDDSIDNKVLTRSDKARGKSDNVPSEEVVKKMKNYWRQLLNAKLITQRKFDNLTKAERGGLSELDKAGFIKRQLVETRQITKHVAQILDSRMNTKYDENDKLIREVKVITLKSKLVSDFRKDFQFYKVREINNYHHAHDAYLNAVVGTALIKKYPKLESEFVYGDYKVYDVRKMIAKSEQEIGKATAKYFFYSNIMNFFKTEITLANGEIRKRPLIETNGETGEIVWDKGRDFATVRKVLSMPQVNIVKKTEVQTGGFSKESILPKRNSDKLIARKKDWDPKKYGGFDSPTVAYSVLVVAKVEKGKSKKLKSVKELLGITIMERSSFEKNPIDFLEAKGYKEVKKDLIIKLPKYSLFELENGRKRMLASAGELQKGNELALPSKYVNFLYLASHYEKLKGSPEDNEQKQLFVEQHKHYLDEIIEQISEFSKRVILADANLDKVLSAYNKHRDKPIREQAENIIHLFTLTNLGAPAAFKYFDTTIDRKRYTSTKEVLDATLIHQSITGLYETRIDLSQLGGDGGEAAAKGSSGGSGGLLGRDLLTKLKAQIQFSTEGPQVTWEDRPAMCLVLNLEEEYRLHEKPVPPSIDPSWLQLFPMVWAEKAGMGLANQVPPVVVELKSDASPVAVRQYPMSKEAREGIRPHIQRFLDLGILVPCQSPWNTPLLPVKKPGTNDYRPVQDLREVNKRVQDIHPTVPNPYNLLSSLPPSHTWYSVLDLKDAFFCLKLHPNSQPLFAFEWRDPEKGNTGQLTWTRLPQGFKNSPTLFNEALHRDLASFRALNPQVVMLQYVDDLLVAAPTYRDCKEGTRRLLQELSKLGYRVSAKKAQLCREEVTYLGYLLKGGKRWLTPARKATVMKIPTPTTPRQVREFLGKAGFCRLFIPGFASLAAPLYPLTRPKVPFTWTEAHQEAFGRIKEALLSAPALALPDLTKPFALYVDEKEGVARGVLTQTLGPWRRPVAYLSKKLDPVASGWPTCLKAIAAVALLLKDADKLTLGQNVLVIAPHNLESIVRQPPDRWMTNARMTHYQSLLLNERVSFAPPAILNPATLLPVESDDTPIHICSEILAEETGTRPDLRDQPLPGVPAWYTDGSSFIMDGRRQAGAAIVDNKRTVWASNLPEGTSAQKAELIALTQALRLAEGKSINIYTDSRYAFATAHVHGAIYKQRGWLTSAGKDIKNKEEILALLEAIHLPKRVAIIHCPGHQRGTDPVATGNRKADEAAKQAAQSTRILTETTKNAGKRTADGSEFEKRTADGSEFESPKKKAKVE

SEQ ID NO: 1691 - protein, 2125 aa, synthetic construct
MPAAKRVKLDGGDKKYSIGLDIGTNSVGWAVITDEYKVPSKKFKVLGNTDRHSIKKNLIGALLFDSGETAEATRLKRTARRRYTRRKNRICYLQEIFSNEMAKVDDSFFHRLEESFLVEEDKKHERHPIFGNIVDEVAYHEKYPTIYHLRKKLVDSTDKADLRLIYLALAHMIKFRGHFLIEGDLNPDNSDVDKLFIQLVQTYNQLFEENPINASGVDAKAILSARLSKSRRLENLIAQLPGEKKNGLFGNLIALSLGLTPNFKSNFDLAEDAKLQLSKDTYDDDLDNLLAQIGDQYADLFLAAKNLSDAILLSDILRVNTEITKAPLSASMIKRYDEHHQDLTLLKALVRQQLPEKYKEIFFDQSKNGYAGYIDGGASQEEFYKFIKPILEKMDGTEELLVKLNREDLLRKQRTFDNGSIPHQIHLGELHAILRRQEDFYPFLKDNREKIEKILTFRIPYYVGPLARGNSRFAWMTRKSEETITPWNFEEVVDKGASAQSFIERMTNFDKNLPNEKVLPKHSLLYEYFTVYNELTKVKYVTEGMRKPAFLSGEQKKAIVDLLFKTNRKVTVKQLKEDYFKKIECFDSVEISGVEDRFNASLGTYHDLLKIIKDKDFLDNEENEDILEDIVLTLTLFEDREMIEERLKTYAHLFDDKVMKQLKRRRYTGWGRLSRKLINGIRDKQSGKTILDFLKSDGFANRNFMQLIHDDSLTFKEDIQKAQVSGQGDSLHEHIANLAGSPAIKKGILQTVKVVDELVKVMGRHKPENIVIEMARENQTTQKGQKNSRERMKRIEEGIKELGSQILKEHPVENTQLQNEKLYLYYLQNGRDMYVDQELDINRLSDYDVDHIVPQSFLKDDSIDNKVLTRSDKARGKSDNVPSEEVVKKMKNYWRQLLNAKLITQRKFDNLTKAERGGLSELDKAGFIKRQLVETRQITKHVAQILDSRMNTKYDENDKLIREVKVITLKSKLVSDFRKDFQFYKVREINNYHHAHDAYLNAVVGTALIKKYPKLESEFVYGDYKVYDVRKMIAKSEQEIGKATAKYFFYSNIMNFFKTEITLANGEIRKRPLIETNGETGEIVWDKGRDFATVRKVLSMPQVNIVKKTEVQTGGFSKESILPKRNSDKLIARKKDWDPKKYGGFDSPTVAYSVLVVAKVEKGKSKKLKSVKELLGITIMERSSFEKNPIDFLEAKGYKEVKKDLIIKLPKYSLFELENGRKRMLASAGELQKGNELALPSKYVNFLYLASHYEKLKGSPEDNEQKQLFVEQHKHYLDEIIEQISEFSKRVILADANLDKVLSAYNKHRDKPIREQAENIIHLFTLTNLGAPAAFKYFDTTIDRKRYTSTKEVLDATLIHQSITGLYETRIDLSQLGGDGGPAPGGGGSSGGLLGRDLLTKLKAQIQFSTEGPQVTWEDRPAMCLVLNLEEEYRLHEKPVPPSIDPSWLQLFPMVWAEKAGMGLANQVPPVVVELKSDASPVAVRQYPMSKEAREGIRPHIQRFLDLGILVPCQSPWNTPLLPVKKPGTNDYRPVQDLREVNKRVQDIHPTVPNPYNLLSSLPPSHTWYSVLDLKDAFFCLKLHPNSQPLFAFEWRDPEKGNTGQLTWTRLPQGFKNSPTLFNEALHRDLASFRALNPQVVMLQYVDDLLVAAPTYRDCKEGTRRLLQELSKLGYRVSAKKAQLCREEVTYLGYLLKGGKRWLTPARKATVMKIPTPTTPRQVREFLGKAGFCRLFIPGFASLAAPLYPLTRPKVPFTWTEAHQEAFGRIKEALLSAPALALPDLTKPFALYVDEKEGVARGVLTQTLGPWRRPVAYLSKKLDPVASGWPTCLKAIAAVALLLKDADKLTLGQNVLVIAPHNLESIVRQPPDRWMTNARMTHYQSLLLNERVSFAPPAILNPATLLPVESDDTPIHICSEILAEETGTRPDLRDQPLPGVPAWYTDGSSFIMDGRRQAGAAIVDNKRTVWASNLPEGTSAQKAELIALTQALRLAEGKSINIYTDSRYAFATAHVHGAIYKQRGWLTSAGKDIKNKEEILALLEAIHLPKRVAIIHCPGHQRGTDPVATGNRKADEAAKQAAQSTRILTETTKNAGKRTADGSEFEKRTADGSEFESPKKKAKVE

SEQ ID NO: 1692 - protein, 2119 aa, synthetic construct
MPAAKRVKLDGGDKKYSIGLDIGTNSVGWAVITDEYKVPSKKFKVLGNTDRHSIKKNLIGALLFDSGETAEATRLKRTARRRYTRRKNRICYLQEIFSNEMAKVDDSFFHRLEESFLVEEDKKHERHPIFGNIVDEVAYHEKYPTIYHLRKKLVDSTDKADLRLIYLALAHMIKFRGHFLIEGDLNPDNSDVDKLFIQLVQTYNQLFEENPINASGVDAKAILSARLSKSRRLENLIAQLPGEKKNGLFGNLIALSLGLTPNFKSNFDLAEDAKLQLSKDTYDDDLDNLLAQIGDQYADLFLAAKNLSDAILLSDILRVNTEITKAPLSASMIKRYDEHHQDLTLLKALVRQQLPEKYKEIFFDQSKNGYAGYIDGGASQEEFYKFIKPILEKMDGTEELLVKLNREDLLRKQRTFDNGSIPHQIHLGELHAILRRQEDFYPFLKDNREKIEKILTFRIPYYVGPLARGNSRFAWMTRKSEETITPWNFEEVVDKGASAQSFIERMTNFDKNLPNEKVLPKHSLLYEYFTVYNELTKVKYVTEGMRKPAFLSGEQKKAIVDLLFKTNRKVTVKQLKEDYFKKIECFDSVEISGVEDRFNASLGTYHDLLKIIKDKDFLDNEENEDILEDIVLTLTLFEDREMIEERLKTYAHLFDDKVMKQLKRRRYTGWGRLSRKLINGIRDKQSGKTILDFLKSDGFANRNFMQLIHDDSLTFKEDIQKAQVSGQGDSLHEHIANLAGSPAIKKGILQTVKVVDELVKVMGRHKPENIVIEMARENQTTQKGQKNSRERMKRIEEGIKELGSQILKEHPVENTQLQNEKLYLYYLQNGRDMYVDQELDINRLSDYDVDHIVPQSFLKDDSIDNKVLTRSDKARGKSDNVPSEEVVKKMKNYWRQLLNAKLITQRKFDNLTKAERGGLSELDKAGFIKRQLVETRQITKHVAQILDSRMNTKYDENDKLIREVKVITLKSKLVSDFRKDFQFYKVREINNYHHAHDAYLNAVVGTALIKKYPKLESEFVYGDYKVYDVRKMIAKSEQEIGKATAKYFFYSNIMNFFKTEITLANGEIRKRPLIETNGETGEIVWDKGRDFATVRKVLSMPQVNIVKKTEVQTGGFSKESILPKRNSDKLIARKKDWDPKKYGGFDSPTVAYSVLVVAKVEKGKSKKLKSVKELLGITIMERSSFEKNPIDFLEAKGYKEVKKDLIIKLPKYSLFELENGRKRMLASAGELQKGNELALPSKYVNFLYLASHYEKLKGSPEDNEQKQLFVEQHKHYLDEIIEQISEFSKRVILADANLDKVLSAYNKHRDKPIREQAENIIHLFTLTNLGAPAAFKYFDTTIDRKRYTSTKEVLDATLIHQSITGLYETRIDLSQLGGDGGPAPGGLLGRDLLTKLKAQIQFSTEGPQVTWEDRPAMCLVLNLEEEYRLHEKPVPPSIDPSWLQLFPMVWAEKAGMGLANQVPPVVVELKSDASPVAVRQYPMSKEAREGIRPHIQRFLDLGILVPCQSPWNTPLLPVKKPGTNDYRPVQDLREVNKRVQDIHPTVPNPYNLLSSLPPSHTWYSVLDLKDAFFCLKLHPNSQPLFAFEWRDPEKGNTGQLTWTRLPQGFKNSPTLFNEALHRDLASFRALNPQVVMLQYVDDLLVAAPTYRDCKEGTRRLLQELSKLGYRVSAKKAQLCREEVTYLGYLLKGGKRWLTPARKATVMKIPTPTTPRQVREFLGKAGFCRLFIPGFASLAAPLYPLTRPKVPFTWTEAHQEAFGRIKEALLSAPALALPDLTKPFALYVDEKEGVARGVLTQTLGPWRRPVAYLSKKLDPVASGWPTCLKAIAAVALLLKDADKLTLGQNVLVIAPHNLESIVRQPPDRWMTNARMTHYQSLLLNERVSFAPPAILNPATLLPVESDDTPIHICSEILAEETGTRPDLRDQPLPGVPAWYTDGSSFIMDGRRQAGAAIVDNKRTVWASNLPEGTSAQKAELIALTQALRLAEGKSINIYTDSRYAFATAHVHGAIYKQRGWLTSAGKDIKNKEEILALLEAIHLPKRVAIIHCPGHQRGTDPVATGNRKADEAAKQAAQSTRILTETTKNAGKRTADGSEFEKRTADGSEFESPKKKAKVE

SEQ ID NO: 1693 - protein, 2128 aa, synthetic construct
MPAAKRVKLDGGDKKYSIGLDIGTNSVGWAVITDEYKVPSKKFKVLGNTDRHSIKKNLIGALLFDSGETAEATRLKRTARRRYTRRKNRICYLQEIFSNEMAKVDDSFFHRLEESFLVEEDKKHERHPIFGNIVDEVAYHEKYPTIYHLRKKLVDSTDKADLRLIYLALAHMIKFRGHFLIEGDLNPDNSDVDKLFIQLVQTYNQLFEENPINASGVDAKAILSARLSKSRRLENLIAQLPGEKKNGLFGNLIALSLGLTPNFKSNFDLAEDAKLQLSKDTYDDDLDNLLAQIGDQYADLFLAAKNLSDAILLSDILRVNTEITKAPLSASMIKRYDEHHQDLTLLKALVRQQLPEKYKEIFFDQSKNGYAGYIDGGASQEEFYKFIKPILEKMDGTEELLVKLNREDLLRKQRTFDNGSIPHQIHLGELHAILRRQEDFYPFLKDNREKIEKILTFRIPYYVGPLARGNSRFAWMTRKSEETITPWNFEEVVDKGASAQSFIERMTNFDKNLPNEKVLPKHSLLYEYFTVYNELTKVKYVTEGMRKPAFLSGEQKKAIVDLLFKTNRKVTVKQLKEDYFKKIECFDSVEISGVEDRFNASLGTYHDLLKIIKDKDFLDNEENEDILEDIVLTLTLFEDREMIEERLKTYAHLFDDKVMKQLKRRRYTGWGRLSRKLINGIRDKQSGKTILDFLKSDGFANRNFMQLIHDDSLTFKEDIQKAQVSGQGDSLHEHIANLAGSPAIKKGILQTVKVVDELVKVMGRHKPENIVIEMARENQTTQKGQKNSRERMKRIEEGIKELGSQILKEHPVENTQLQNEKLYLYYLQNGRDMYVDQELDINRLSDYDVDHIVPQSFLKDDSIDNKVLTRSDKARGKSDNVPSEEVVKKMKNYWRQLLNAKLITQRKFDNLTKAERGGLSELDKAGFIKRQLVETRQITKHVAQILDSRMNTKYDENDKLIREVKVITLKSKLVSDFRKDFQFYKVREINNYHHAHDAYLNAVVGTALIKKYPKLESEFVYGDYKVYDVRKMIAKSEQEIGKATAKYFFYSNIMNFFKTEITLANGEIRKRPLIETNGETGEIVWDKGRDFATVRKVLSMPQVNIVKKTEVQTGGFSKESILPKRNSDKLIARKKDWDPKKYGGFDSPTVAYSVLVVAKVEKGKSKKLKSVKELLGITIMERSSFEKNPIDFLEAKGYKEVKKDLIIKLPKYSLFELENGRKRMLASAGELQKGNELALPSKYVNFLYLASHYEKLKGSPEDNEQKQLFVEQHKHYLDEIIEQISEFSKRVILADANLDKVLSAYNKHRDKPIREQAENIIHLFTLTNLGAPAAFKYFDTTIDRKRYTSTKEVLDATLIHQSITGLYETRIDLSQLGGDGGGSAGSAAGSGEFGGLLGRDLLTKLKAQIQFSTEGPQVTWEDRPAMCLVLNLEEEYRLHEKPVPPSIDPSWLQLFPMVWAEKAGMGLANQVPPVVVELKSDASPVAVRQYPMSKEAREGIRPHIQRFLDLGILVPCQSPWNTPLLPVKKPGTNDYRPVQDLREVNKRVQDIHPTVPNPYNLLSSLPPSHTWYSVLDLKDAFFCLKLHPNSQPLFAFEWRDPEKGNTGQLTWTRLPQGFKNSPTLFNEALHRDLASFRALNPQVVMLQYVDDLLVAAPTYRDCKEGTRRLLQELSKLGYRVSAKKAQLCREEVTYLGYLLKGGKRWLTPARKATVMKIPTPTTPRQVREFLGKAGFCRLFIPGFASLAAPLYPLTRPKVPFTWTEAHQEAFGRIKEALLSAPALALPDLTKPFALYVDEKEGVARGVLTQTLGPWRRPVAYLSKKLDPVASGWPTCLKAIAAVALLLKDADKLTLGQNVLVIAPHNLESIVRQPPDRWMTNARMTHYQSLLLNERVSFAPPAILNPATLLPVESDDTPIHICSEILAEETGTRPDLRDQPLPGVPAWYTDGSSFIMDGRRQAGAAIVDNKRTVWASNLPEGTSAQKAELIALTQALRLAEGKSINIYTDSRYAFATAHVHGAIYKQRGWLTSAGKDIKNKEEILALLEAIHLPKRVAIIHCPGHQRGTDPVATGNRKADEAAKQAAQSTRILTETTKNAGKRTADGSEFEKRTADGSEFESPKKKAKVE

SEQ ID NO: 1694 - protein, 2125 aa, synthetic construct
MPAAKRVKLDGGDKKYSIGLDIGTNSVGWAVITDEYKVPSKKFKVLGNTDRHSIKKNLIGALLFDSGETAEATRLKRTARRRYTRRKNRICYLQEIFSNEMAKVDDSFFHRLEESFLVEEDKKHERHPIFGNIVDEVAYHEKYPTIYHLRKKLVDSTDKADLRLIYLALAHMIKFRGHFLIEGDLNPDNSDVDKLFIQLVQTYNQLFEENPINASGVDAKAILSARLSKSRRLENLIAQLPGEKKNGLFGNLIALSLGLTPNFKSNFDLAEDAKLQLSKDTYDDDLDNLLAQIGDQYADLFLAAKNLSDAILLSDILRVNTEITKAPLSASMIKRYDEHHQDLTLLKALVRQQLPEKYKEIFFDQSKNGYAGYIDGGASQEEFYKFIKPILEKMDGTEELLVKLNREDLLRKQRTFDNGSIPHQIHLGELHAILRRQEDFYPFLKDNREKIEKILTFRIPYYVGPLARGNSRFAWMTRKSEETITPWNFEEVVDKGASAQSFIERMTNFDKNLPNEKVLPKHSLLYEYFTVYNELTKVKYVTEGMRKPAFLSGEQKKAIVDLLFKTNRKVTVKQLKEDYFKKIECFDSVEISGVEDRFNASLGTYHDLLKIIKDKDFLDNEENEDILEDIVLTLTLFEDREMIEERLKTYAHLFDDKVMKQLKRRRYTGWGRLSRKLINGIRDKQSGKTILDFLKSDGFANRNFMQLIHDDSLTFKEDIQKAQVSGQGDSLHEHIANLAGSPAIKKGILQTVKVVDELVKVMGRHKPENIVIEMARENQTTQKGQKNSRERMKRIEEGIKELGSQILKEHPVENTQLQNEKLYLYYLQNGRDMYVDQELDINRLSDYDVDHIVPQSFLKDDSIDNKVLTRSDKARGKSDNVPSEEVVKKMKNYWRQLLNAKLITQRKFDNLTKAERGGLSELDKAGFIKRQLVETRQITKHVAQILDSRMNTKYDENDKLIREVKVITLKSKLVSDFRKDFQFYKVREINNYHHAHDAYLNAVVGTALIKKYPKLESEFVYGDYKVYDVRKMIAKSEQEIGKATAKYFFYSNIMNFFKTEITLANGEIRKRPLIETNGETGEIVWDKGRDFATVRKVLSMPQVNIVKKTEVQTGGFSKESILPKRNSDKLIARKKDWDPKKYGGFDSPTVAYSVLVVAKVEKGKSKKLKSVKELLGITIMERSSFEKNPIDFLEAKGYKEVKKDLIIKLPKYSLFELENGRKRMLASAGELQKGNELALPSKYVNFLYLASHYEKLKGSPEDNEQKQLFVEQHKHYLDEIIEQISEFSKRVILADANLDKVLSAYNKHRDKPIREQAENIIHLFTLTNLGAPAAFKYFDTTIDRKRYTSTKEVLDATLIHQSITGLYETRIDLSQLGGDGGGSSPAPGGGGGLLGRDLLTKLKAQIQFSTEGPQVTWEDRPAMCLVLNLEEEYRLHEKPVPPSIDPSWLQLFPMVWAEKAGMGLANQVPPVVVELKSDASPVAVRQYPMSKEAREGIRPHIQRFLDLGILVPCQSPWNTPLLPVKKPGTNDYRPVQDLREVNKRVQDIHPTVPNPYNLLSSLPPSHTWYSVLDLKDAFFCLKLHPNSQPLFAFEWRDPEKGNTGQLTWTRLPQGFKNSPTLFNEALHRDLASFRALNPQVVMLQYVDDLLVAAPTYRDCKEGTRRLLQELSKLGYRVSAKKAQLCREEVTYLGYLLKGGKRWLTPARKATVMKIPTPTTPRQVREFLGKAGFCRLFIPGFASLAAPLYPLTRPKVPFTWTEAHQEAFGRIKEALLSAPALALPDLTKPFALYVDEKEGVARGVLTQTLGPWRRPVAYLSKKLDPVASGWPTCLKAIAAVALLLKDADKLTLGQNVLVIAPHNLESIVRQPPDRWMTNARMTHYQSLLLNERVSFAPPAILNPATLLPVESDDTPIHICSEILAEETGTRPDLRDQPLPGVPAWYTDGSSFIMDGRRQAGAAIVDNKRTVWASNLPEGTSAQKAELIALTQALRLAEGKSINIYTDSRYAFATAHVHGAIYKQRGWLTSAGKDIKNKEEILALLEAIHLPKRVAIIHCPGHQRGTDPVATGNRKADEAAKQAAQSTRILTETTKNAGKRTADGSEFEKRTADGSEFESPKKKAKVE

SEQ ID NO: 1695 - protein, 2122 aa, synthetic construct
MPAAKRVKLDGGDKKYSIGLDIGTNSVGWAVITDEYKVPSKKFKVLGNTDRHSIKKNLIGALLFDSGETAEATRLKRTARRRYTRRKNRICYLQEIFSNEMAKVDDSFFHRLEESFLVEEDKKHERHPIFGNIVDEVAYHEKYPTIYHLRKKLVDSTDKADLRLIYLALAHMIKFRGHFLIEGDLNPDNSDVDKLFIQLVQTYNQLFEENPINASGVDAKAILSARLSKSRRLENLIAQLPGEKKNGLFGNLIALSLGLTPNFKSNFDLAEDAKLQLSKDTYDDDLDNLLAQIGDQYADLFLAAKNLSDAILLSDILRVNTEITKAPLSASMIKRYDEHHQDLTLLKALVRQQLPEKYKEIFFDQSKNGYAGYIDGGASQEEFYKFIKPILEKMDGTEELLVKLNREDLLRKQRTFDNGSIPHQIHLGELHAILRRQEDFYPFLKDNREKIEKILTFRIPYYVGPLARGNSRFAWMTRKSEETITPWNFEEVVDKGASAQSFIERMTNFDKNLPNEKVLPKHSLLYEYFTVYNELTKVKYVTEGMRKPAFLSGEQKKAIVDLLFKTNRKVTVKQLKEDYFKKIECFDSVEISGVEDRFNASLGTYHDLLKIIKDKDFLDNEENEDILEDIVLTLTLFEDREMIEERLKTYAHLFDDKVMKQLKRRRYTGWGRLSRKLINGIRDKQSGKTILDFLKSDGFANRNFMQLIHDDSLTFKEDIQKAQVSGQGDSLHEHIANLAGSPAIKKGILQTVKVVDELVKVMGRHKPENIVIEMARENQTTQKGQKNSRERMKRIEEGIKELGSQILKEHPVENTQLQNEKLYLYYLQNGRDMYVDQELDINRLSDYDVDHIVPQSFLKDDSIDNKVLTRSDKARGKSDNVPSEEVVKKMKNYWRQLLNAKLITQRKFDNLTKAERGGLSELDKAGFIKRQLVETRQITKHVAQILDSRMNTKYDENDKLIREVKVITLKSKLVSDFRKDFQFYKVREINNYHHAHDAYLNAVVGTALIKKYPKLESEFVYGDYKVYDVRKMIAKSEQEIGKATAKYFFYSNIMNFFKTEITLANGEIRKRPLIETNGETGEIVWDKGRDFATVRKVLSMPQVNIVKKTEVQTGGFSKESILPKRNSDKLIARKKDWDPKKYGGFDSPTVAYSVLVVAKVEKGKSKKLKSVKELLGITIMERSSFEKNPIDFLEAKGYKEVKKDLIIKLPKYSLFELENGRKRMLASAGELQKGNELALPSKYVNFLYLASHYEKLKGSPEDNEQKQLFVEQHKHYLDEIIEQISEFSKRVILADANLDKVLSAYNKHRDKPIREQAENIIHLFTLTNLGAPAAFKYFDTTIDRKRYTSTKEVLDATLIHQSITGLYETRIDLSQLGGDGGPAPGSSGGLLGRDLLTKLKAQIQFSTEGPQVTWEDRPAMCLVLNLEEEYRLHEKPVPPSIDPSWLQLFPMVWAEKAGMGLANQVPPVVVELKSDASPVAVRQYPMSKEAREGIRPHIQRFLDLGILVPCQSPWNTPLLPVKKPGTNDYRPVQDLREVNKRVQDIHPTVPNPYNLLSSLPPSHTWYSVLDLKDAFFCLKLHPNSQPLFAFEWRDPEKGNTGQLTWTRLPQGFKNSPTLFNEALHRDLASFRALNPQVVMLQYVDDLLVAAPTYRDCKEGTRRLLQELSKLGYRVSAKKAQLCREEVTYLGYLLKGGKRWLTPARKATVMKIPTPTTPRQVREFLGKAGFCRLFIPGFASLAAPLYPLTRPKVPFTWTEAHQEAFGRIKEALLSAPALALPDLTKPFALYVDEKEGVARGVLTQTLGPWRRPVAYLSKKLDPVASGWPTCLKAIAAVALLLKDADKLTLGQNVLVIAPHNLESIVRQPPDRWMTNARMTHYQSLLLNERVSFAPPAILNPATLLPVESDDTPIHICSEILAEETGTRPDLRDQPLPGVPAWYTDGSSFIMDGRRQAGAAIVDNKRTVWASNLPEGTSAQKAELIALTQALRLAEGKSINIYTDSRYAFATAHVHGAIYKQRGWLTSAGKDIKNKEEILALLEAIHLPKRVAIIHCPGHQRGTDPVATGNRKADEAAKQAAQSTRILTETTKNAGKRTADGSEFEKRTADGSEFESPKKKAKVE

SEQ ID NO: 1696 - protein, 2125 aa, synthetic construct
MPAAKRVKLDGGDKKYSIGLDIGTNSVGWAVITDEYKVPSKKFKVLGNTDRHSIKKNLIGALLFDSGETAEATRLKRTARRRYTRRKNRICYLQEIFSNEMAKVDDSFFHRLEESFLVEEDKKHERHPIFGNIVDEVAYHEKYPTIYHLRKKLVDSTDKADLRLIYLALAHMIKFRGHFLIEGDLNPDNSDVDKLFIQLVQTYNQLFEENPINASGVDAKAILSARLSKSRRLENLIAQLPGEKKNGLFGNLIALSLGLTPNFKSNFDLAEDAKLQLSKDTYDDDLDNLLAQIGDQYADLFLAAKNLSDAILLSDILRVNTEITKAPLSASMIKRYDEHHQDLTLLKALVRQQLPEKYKEIFFDQSKNGYAGYIDGGASQEEFYKFIKPILEKMDGTEELLVKLNREDLLRKQRTFDNGSIPHQIHLGELHAILRRQEDFYPFLKDNREKIEKILTFRIPYYVGPLARGNSRFAWMTRKSEETITPWNFEEVVDKGASAQSFIERMTNFDKNLPNEKVLPKHSLLYEYFTVYNELTKVKYVTEGMRKPAFLSGEQKKAIVDLLFKTNRKVTVKQLKEDYFKKIECFDSVEISGVEDRFNASLGTYHDLLKIIKDKDFLDNEENEDILEDIVLTLTLFEDREMIEERLKTYAHLFDDKVMKQLKRRRYTGWGRLSRKLINGIRDKQSGKTILDFLKSDGFANRNFMQLIHDDSLTFKEDIQKAQVSGQGDSLHEHIANLAGSPAIKKGILQTVKVVDELVKVMGRHKPENIVIEMARENQTTQKGQKNSRERMKRIEEGIKELGSQILKEHPVENTQLQNEKLYLYYLQNGRDMYVDQELDINRLSDYDVDHIVPQSFLKDDSIDNKVLTRSDKARGKSDNVPSEEVVKKMKNYWRQLLNAKLITQRKFDNLTKAERGGLSELDKAGFIKRQLVETRQITKHVAQILDSRMNTKYDENDKLIREVKVITLKSKLVSDFRKDFQFYKVREINNYHHAHDAYLNAVVGTALIKKYPKLESEFVYGDYKVYDVRKMIAKSEQEIGKATAKYFFYSNIMNFFKTEITLANGEIRKRPLIETNGETGEIVWDKGRDFATVRKVLSMPQVNIVKKTEVQTGGFSKESILPKRNSDKLIARKKDWDPKKYGGFDSPTVAYSVLVVAKVEKGKSKKLKSVKELLGITIMERSSFEKNPIDFLEAKGYKEVKKDLIIKLPKYSLFELENGRKRMLASAGELQKGNELALPSKYVNFLYLASHYEKLKGSPEDNEQKQLFVEQHKHYLDEIIEQISEFSKRVILADANLDKVLSAYNKHRDKPIREQAENIIHLFTLTNLGAPAAFKYFDTTIDRKRYTSTKEVLDATLIHQSITGLYETRIDLSQLGGDGGPAPAPAPAPGGLLGRDLLTKLKAQIQFSTEGPQVTWEDRPAMCLVLNLEEEYRLHEKPVPPSIDPSWLQLFPMVWAEKAGMGLANQVPPVVVELKSDASPVAVRQYPMSKEAREGIRPHIQRFLDLGILVPCQSPWNTPLLPVKKPGTNDYRPVQDLREVNKRVQDIHPTVPNPYNLLSSLPPSHTWYSVLDLKDAFFCLKLHPNSQPLFAFEWRDPEKGNTGQLTWTRLPQGFKNSPTLFNEALHRDLASFRALNPQVVMLQYVDDLLVAAPTYRDCKEGTRRLLQELSKLGYRVSAKKAQLCREEVTYLGYLLKGGKRWLTPARKATVMKIPTPTTPRQVREFLGKAGFCRLFIPGFASLAAPLYPLTRPKVPFTWTEAHQEAFGRIKEALLSAPALALPDLTKPFALYVDEKEGVARGVLTQTLGPWRRPVAYLSKKLDPVASGWPTCLKAIAAVALLLKDADKLTLGQNVLVIAPHNLESIVRQPPDRWMTNARMTHYQSLLLNERVSFAPPAILNPATLLPVESDDTPIHICSEILAEETGTRPDLRDQPLPGVPAWYTDGSSFIMDGRRQAGAAIVDNKRTVWASNLPEGTSAQKAELIALTQALRLAEGKSINIYTDSRYAFATAHVHGAIYKQRGWLTSAGKDIKNKEEILALLEAIHLPKRVAIIHCPGHQRGTDPVATGNRKADEAAKQAAQSTRILTETTKNAGKRTADGSEFEKRTADGSEFESPKKKAKVE

SEQ ID NO: 1697 - protein, 2119 aa, synthetic construct
MPAAKRVKLDGGDKKYSIGLDIGTNSVGWAVITDEYKVPSKKFKVLGNTDRHSIKKNLIGALLFDSGETAEATRLKRTARRRYTRRKNRICYLQEIFSNEMAKVDDSFFHRLEESFLVEEDKKHERHPIFGNIVDEVAYHEKYPTIYHLRKKLVDSTDKADLRLIYLALAHMIKFRGHFLIEGDLNPDNSDVDKLFIQLVQTYNQLFEENPINASGVDAKAILSARLSKSRRLENLIAQLPGEKKNGLFGNLIALSLGLTPNFKSNFDLAEDAKLQLSKDTYDDDLDNLLAQIGDQYADLFLAAKNLSDAILLSDILRVNTEITKAPLSASMIKRYDEHHQDLTLLKALVRQQLPEKYKEIFFDQSKNGYAGYIDGGASQEEFYKFIKPILEKMDGTEELLVKLNREDLLRKQRTFDNGSIPHQIHLGELHAILRRQEDFYPFLKDNREKIEKILTFRIPYYVGPLARGNSRFAWMTRKSEETITPWNFEEVVDKGASAQSFIERMTNFDKNLPNEKVLPKHSLLYEYFTVYNELTKVKYVTEGMRKPAFLSGEQKKAIVDLLFKTNRKVTVKQLKEDYFKKIECFDSVEISGVEDRFNASLGTYHDLLKIIKDKDFLDNEENEDILEDIVLTLTLFEDREMIEERLKTYAHLFDDKVMKQLKRRRYTGWGRLSRKLINGIRDKQSGKTILDFLKSDGFANRNFMQLIHDDSLTFKEDIQKAQVSGQGDSLHEHIANLAGSPAIKKGILQTVKVVDELVKVMGRHKPENIVIEMARENQTTQKGQKNSRERMKRIEEGIKELGSQILKEHPVENTQLQNEKLYLYYLQNGRDMYVDQELDINRLSDYDVDHIVPQSFLKDDSIDNKVLTRSDKARGKSDNVPSEEVVKKMKNYWRQLLNAKLITQRKFDNLTKAERGGLSELDKAGFIKRQLVETRQITKHVAQILDSRMNTKYDENDKLIREVKVITLKSKLVSDFRKDFQFYKVREINNYHHAHDAYLNAVVGTALIKKYPKLESEFVYGDYKVYDVRKMIAKSEQEIGKATAKYFFYSNIMNFFKTEITLANGEIRKRPLIETNGETGEIVWDKGRDFATVRKVLSMPQVNIVKKTEVQTGGFSKESILPKRNSDKLIARKKDWDPKKYGGFDSPTVAYSVLVVAKVEKGKSKKLKSVKELLGITIMERSSFEKNPIDFLEAKGYKEVKKDLIIKLPKYSLFELENGRKRMLASAGELQKGNELALPSKYVNFLYLASHYEKLKGSPEDNEQKQLFVEQHKHYLDEIIEQISEFSKRVILADANLDKVLSAYNKHRDKPIREQAENIIHLFTLTNLGAPAAFKYFDTTIDRKRYTSTKEVLDATLIHQSITGLYETRIDLSQLGGDGGGSSGGLLGRDLLTKLKAQIQFSTEGPQVTWEDRPAMCLVLNLEEEYRLHEKPVPPSIDPSWLQLFPMVWAEKAGMGLANQVPPVVVELKSDASPVAVRQYPMSKEAREGIRPHIQRFLDLGILVPCQSPWNTPLLPVKKPGTNDYRPVQDLREVNKRVQDIHPTVPNPYNLLSSLPPSHTWYSVLDLKDAFFCLKLHPNSQPLFAFEWRDPEKGNTGQLTWTRLPQGFKNSPTLFNEALHRDLASFRALNPQVVMLQYVDDLLVAAPTYRDCKEGTRRLLQELSKLGYRVSAKKAQLCREEVTYLGYLLKGGKRWLTPARKATVMKIPTPTTPRQVREFLGKAGFCRLFIPGFASLAAPLYPLTRPKVPFTWTEAHQEAFGRIKEALLSAPALALPDLTKPFALYVDEKEGVARGVLTQTLGPWRRPVAYLSKKLDPVASGWPTCLKAIAAVALLLKDADKLTLGQNVLVIAPHNLESIVRQPPDRWMTNARMTHYQSLLLNERVSFAPPAILNPATLLPVESDDTPIHICSEILAEETGTRPDLRDQPLPGVPAWYTDGSSFIMDGRRQAGAAIVDNKRTVWASNLPEGTSAQKAELIALTQALRLAEGKSINIYTDSRYAFATAHVHGAIYKQRGWLTSAGKDIKNKEEILALLEAIHLPKRVAIIHCPGHQRGTDPVATGNRKADEAAKQAAQSTRILTETTKNAGKRTADGSEFEKRTADGSEFESPKKKAKVE

SEQ ID NO: 1698 - protein, 2122 aa, synthetic construct
MPAAKRVKLDGGDKKYSIGLDIGTNSVGWAVITDEYKVPSKKFKVLGNTDRHSIKKNLIGALLFDSGETAEATRLKRTARRRYTRRKNRICYLQEIFSNEMAKVDDSFFHRLEESFLVEEDKKHERHPIFGNIVDEVAYHEKYPTIYHLRKKLVDSTDKADLRLIYLALAHMIKFRGHFLIEGDLNPDNSDVDKLFIQLVQTYNQLFEENPINASGVDAKAILSARLSKSRRLENLIAQLPGEKKNGLFGNLIALSLGLTPNFKSNFDLAEDAKLQLSKDTYDDDLDNLLAQIGDQYADLFLAAKNLSDAILLSDILRVNTEITKAPLSASMIKRYDEHHQDLTLLKALVRQQLPEKYKEIFFDQSKNGYAGYIDGGASQEEFYKFIKPILEKMDGTEELLVKLNREDLLRKQRTFDNGSIPHQIHLGELHAILRRQEDFYPFLKDNREKIEKILTFRIPYYVGPLARGNSRFAWMTRKSEETITPWNFEEVVDKGASAQSFIERMTNFDKNLPNEKVLPKHSLLYEYFTVYNELTKVKYVTEGMRKPAFLSGEQKKAIVDLLFKTNRKVTVKQLKEDYFKKIECFDSVEISGVEDRFNASLGTYHDLLKIIKDKDFLDNEENEDILEDIVLTLTLFEDREMIEERLKTYAHLFDDKVMKQLKRRRYTGWGRLSRKLINGIRDKQSGKTILDFLKSDGFANRNFMQLIHDDSLTFKEDIQKAQVSGQGDSLHEHIANLAGSPAIKKGILQTVKVVDELVKVMGRHKPENIVIEMARENQTTQKGQKNSRERMKRIEEGIKELGSQILKEHPVENTQLQNEKLYLYYLQNGRDMYVDQELDINRLSDYDVDHIVPQSFLKDDSIDNKVLTRSDKARGKSDNVPSEEVVKKMKNYWRQLLNAKLITQRKFDNLTKAERGGLSELDKAGFIKRQLVETRQITKHVAQILDSRMNTKYDENDKLIREVKVITLKSKLVSDFRKDFQFYKVREINNYHHAHDAYLNAVVGTALIKKYPKLESEFVYGDYKVYDVRKMIAKSEQEIGKATAKYFFYSNIMNFFKTEITLANGEIRKRPLIETNGETGEIVWDKGRDFATVRKVLSMPQVNIVKKTEVQTGGFSKESILPKRNSDKLIARKKDWDPKKYGGFDSPTVAYSVLVVAKVEKGKSKKLKSVKELLGITIMERSSFEKNPIDFLEAKGYKEVKKDLIIKLPKYSLFELENGRKRMLASAGELQKGNELALPSKYVNFLYLASHYEKLKGSPEDNEQKQLFVEQHKHYLDEIIEQISEFSKRVILADANLDKVLSAYNKHRDKPIREQAENIIHLFTLTNLGAPAAFKYFDTTIDRKRYTSTKEVLDATLIHQSITGLYETRIDLSQLGGDGGGSSGGGGGLLGRDLLTKLKAQIQFSTEGPQVTWEDRPAMCLVLNLEEEYRLHEKPVPPSIDPSWLQLFPMVWAEKAGMGLANQVPPVVVELKSDASPVAVRQYPMSKEAREGIRPHIQRFLDLGILVPCQSPWNTPLLPVKKPGTNDYRPVQDLREVNKRVQDIHPTVPNPYNLLSSLPPSHTWYSVLDLKDAFFCLKLHPNSQPLFAFEWRDPEKGNTGQLTWTRLPQGFKNSPTLFNEALHRDLASFRALNPQVVMLQYVDDLLVAAPTYRDCKEGTRRLLQELSKLGYRVSAKKAQLCREEVTYLGYLLKGGKRWLTPARKATVMKIPTPTTPRQVREFLGKAGFCRLFIPGFASLAAPLYPLTRPKVPFTWTEAHQEAFGRIKEALLSAPALALPDLTKPFALYVDEKEGVARGVLTQTLGPWRRPVAYLSKKLDPVASGWPTCLKAIAAVALLLKDADKLTLGQNVLVIAPHNLESIVRQPPDRWMTNARMTHYQSLLLNERVSFAPPAILNPATLLPVESDDTPIHICSEILAEETGTRPDLRDQPLPGVPAWYTDGSSFIMDGRRQAGAAIVDNKRTVWASNLPEGTSAQKAELIALTQALRLAEGKSINIYTDSRYAFATAHVHGAIYKQRGWLTSAGKDIKNKEEILALLEAIHLPKRVAIIHCPGHQRGTDPVATGNRKADEAAKQAAQSTRILTETTKNAGKRTADGSEFEKRTADGSEFESPKKKAKVE

SEQ ID NO: 1699 - protein, 2127 aa, synthetic construct
MPAAKRVKLDGGDKKYSIGLDIGTNSVGWAVITDEYKVPSKKFKVLGNTDRHSIKKNLIGALLFDSGETAEATRLKRTARRRYTRRKNRICYLQEIFSNEMAKVDDSFFHRLEESFLVEEDKKHERHPIFGNIVDEVAYHEKYPTIYHLRKKLVDSTDKADLRLIYLALAHMIKFRGHFLIEGDLNPDNSDVDKLFIQLVQTYNQLFEENPINASGVDAKAILSARLSKSRRLENLIAQLPGEKKNGLFGNLIALSLGLTPNFKSNFDLAEDAKLQLSKDTYDDDLDNLLAQIGDQYADLFLAAKNLSDAILLSDILRVNTEITKAPLSASMIKRYDEHHQDLTLLKALVRQQLPEKYKEIFFDQSKNGYAGYIDGGASQEEFYKFIKPILEKMDGTEELLVKLNREDLLRKQRTFDNGSIPHQIHLGELHAILRRQEDFYPFLKDNREKIEKILTFRIPYYVGPLARGNSRFAWMTRKSEETITPWNFEEVVDKGASAQSFIERMTNFDKNLPNEKVLPKHSLLYEYFTVYNELTKVKYVTEGMRKPAFLSGEQKKAIVDLLFKTNRKVTVKQLKEDYFKKIECFDSVEISGVEDRFNASLGTYHDLLKIIKDKDFLDNEENEDILEDIVLTLTLFEDREMIEERLKTYAHLFDDKVMKQLKRRRYTGWGRLSRKLINGIRDKQSGKTILDFLKSDGFANRNFMQLIHDDSLTFKEDIQKAQVSGQGDSLHEHIANLAGSPAIKKGILQTVKVVDELVKVMGRHKPENIVIEMARENQTTQKGQKNSRERMKRIEEGIKELGSQILKEHPVENTQLQNEKLYLYYLQNGRDMYVDQELDINRLSDYDVDHIVPQSFLKDDSIDNKVLTRSDKARGKSDNVPSEEVVKKMKNYWRQLLNAKLITQRKFDNLTKAERGGLSELDKAGFIKRQLVETRQITKHVAQILDSRMNTKYDENDKLIREVKVITLKSKLVSDFRKDFQFYKVREINNYHHAHDAYLNAVVGTALIKKYPKLESEFVYGDYKVYDVRKMIAKSEQEIGKATAKYFFYSNIMNFFKTEITLANGEIRKRPLIETNGETGEIVWDKGRDFATVRKVLSMPQVNIVKKTEVQTGGFSKESILPKRNSDKLIARKKDWDPKKYGGFDSPTVAYSVLVVAKVEKGKSKKLKSVKELLGITIMERSSFEKNPIDFLEAKGYKEVKKDLIIKLPKYSLFELENGRKRMLASAGELQKGNELALPSKYVNFLYLASHYEKLKGSPEDNEQKQLFVEQHKHYLDEIIEQISEFSKRVILADANLDKVLSAYNKHRDKPIREQAENIIHLFTLTNLGAPAAFKYFDTTIDRKRYTSTKEVLDATLIHQSITGLYETRIDLSQLGGDGGPAPEAAAKGSSGGLLGRDLLTKLKAQIQFSTEGPQVTWEDRPAMCLVLNLEEEYRLHEKPVPPSIDPSWLQLFPMVWAEKAGMGLANQVPPVVVELKSDASPVAVRQYPMSKEAREGIRPHIQRFLDLGILVPCQSPWNTPLLPVKKPGTNDYRPVQDLREVNKRVQDIHPTVPNPYNLLSSLPPSHTWYSVLDLKDAFFCLKLHPNSQPLFAFEWRDPEKGNTGQLTWTRLPQGFKNSPTLFNEALHRDLASFRALNPQVVMLQYVDDLLVAAPTYRDCKEGTRRLLQELSKLGYRVSAKKAQLCREEVTYLGYLLKGGKRWLTPARKATVMKIPTPTTPRQVREFLGKAGFCRLFIPGFASLAAPLYPLTRPKVPFTWTEAHQEAFGRIKEALLSAPALALPDLTKPFALYVDEKEGVARGVLTQTLGPWRRPVAYLSKKLDPVASGWPTCLKAIAAVALLLKDADKLTLGQNVLVIAPHNLESIVRQPPDRWMTNARMTHYQSLLLNERVSFAPPAILNPATLLPVESDDTPIHICSEILAEETGTRPDLRDQPLPGVPAWYTDGSSFIMDGRRQAGAAIVDNKRTVWASNLPEGTSAQKAELIALTQALRLAEGKSINIYTDSRYAFATAHVHGAIYKQRGWLTSAGKDIKNKEEILALLEAIHLPKRVAIIHCPGHQRGTDPVATGNRKADEAAKQAAQSTRILTETTKNAGKRTADGSEFEKRTADGSEFESPKKKAKVE

SEQ ID NO: 1700 - protein, 2127 aa, synthetic construct
MPAAKRVKLDGGDKKYSIGLDIGTNSVGWAVITDEYKVPSKKFKVLGNTDRHSIKKNLIGALLFDSGETAEATRLKRTARRRYTRRKNRICYLQEIFSNEMAKVDDSFFHRLEESFLVEEDKKHERHPIFGNIVDEVAYHEKYPTIYHLRKKLVDSTDKADLRLIYLALAHMIKFRGHFLIEGDLNPDNSDVDKLFIQLVQTYNQLFEENPINASGVDAKAILSARLSKSRRLENLIAQLPGEKKNGLFGNLIALSLGLTPNFKSNFDLAEDAKLQLSKDTYDDDLDNLLAQIGDQYADLFLAAKNLSDAILLSDILRVNTEITKAPLSASMIKRYDEHHQDLTLLKALVRQQLPEKYKEIFFDQSKNGYAGYIDGGASQEEFYKFIKPILEKMDGTEELLVKLNREDLLRKQRTFDNGSIPHQIHLGELHAILRRQEDFYPFLKDNREKIEKILTFRIPYYVGPLARGNSRFAWMTRKSEETITPWNFEEVVDKGASAQSFIERMTNFDKNLPNEKVLPKHSLLYEYFTVYNELTKVKYVTEGMRKPAFLSGEQKKAIVDLLFKTNRKVTVKQLKEDYFKKIECFDSVEISGVEDRFNASLGTYHDLLKIIKDKDFLDNEENEDILEDIVLTLTLFEDREMIEERLKTYAHLFDDKVMKQLKRRRYTGWGRLSRKLINGIRDKQSGKTILDFLKSDGFANRNFMQLIHDDSLTFKEDIQKAQVSGQGDSLHEHIANLAGSPAIKKGILQTVKVVDELVKVMGRHKPENIVIEMARENQTTQKGQKNSRERMKRIEEGIKELGSQILKEHPVENTQLQNEKLYLYYLQNGRDMYVDQELDINRLSDYDVDHIVPQSFLKDDSIDNKVLTRSDKARGKSDNVPSEEVVKKMKNYWRQLLNAKLITQRKFDNLTKAERGGLSELDKAGFIKRQLVETRQITKHVAQILDSRMNTKYDENDKLIREVKVITLKSKLVSDFRKDFQFYKVREINNYHHAHDAYLNAVVGTALIKKYPKLESEFVYGDYKVYDVRKMIAKSEQEIGKATAKYFFYSNIMNFFKTEITLANGEIRKRPLIETNGETGEIVWDKGRDFATVRKVLSMPQVNIVKKTEVQTGGFSKESILPKRNSDKLIARKKDWDPKKYGGFDSPTVAYSVLVVAKVEKGKSKKLKSVKELLGITIMERSSFEKNPIDFLEAKGYKEVKKDLIIKLPKYSLFELENGRKRMLASAGELQKGNELALPSKYVNFLYLASHYEKLKGSPEDNEQKQLFVEQHKHYLDEIIEQISEFSKRVILADANLDKVLSAYNKHRDKPIREQAENIIHLFTLTNLGAPAAFKYFDTTIDRKRYTSTKEVLDATLIHQSITGLYETRIDLSQLGGDGGEAAAKGSSGGGGGLLGRDLLTKLKAQIQFSTEGPQVTWEDRPAMCLVLNLEEEYRLHEKPVPPSIDPSWLQLFPMVWAEKAGMGLANQVPPVVVELKSDASPVAVRQYPMSKEAREGIRPHIQRFLDLGILVPCQSPWNTPLLPVKKPGTNDYRPVQDLREVNKRVQDIHPTVPNPYNLLSSLPPSHTWYSVLDLKDAFFCLKLHPNSQPLFAFEWRDPEKGNTGQLTWTRLPQGFKNSPTLFNEALHRDLASFRALNPQVVMLQYVDDLLVAAPTYRDCKEGTRRLLQELSKLGYRVSAKKAQLCREEVTYLGYLLKGGKRWLTPARKATVMKIPTPTTPRQVREFLGKAGFCRLFIPGFASLAAPLYPLTRPKVPFTWTEAHQEAFGRIKEALLSAPALALPDLTKPFALYVDEKEGVARGVLTQTLGPWRRPVAYLSKKLDPVASGWPTCLKAIAAVALLLKDADKLTLGQNVLVIAPHNLESIVRQPPDRWMTNARMTHYQSLLLNERVSFAPPAILNPATLLPVESDDTPIHICSEILAEETGTRPDLRDQPLPGVPAWYTDGSSFIMDGRRQAGAAIVDNKRTVWASNLPEGTSAQKAELIALTQALRLAEGKSINIYTDSRYAFATAHVHGAIYKQRGWLTSAGKDIKNKEEILALLEAIHLPKRVAIIHCPGHQRGTDPVATGNRKADEAAKQAAQSTRILTETTKNAGKRTADGSEFEKRTADGSEFESPKKKAKVE

SEQ ID NO: 1701 - protein, 2129 aa, synthetic construct
MPAAKRVKLDGGDKKYSIGLDIGTNSVGWAVITDEYKVPSKKFKVLGNTDRHSIKKNLIGALLFDSGETAEATRLKRTARRRYTRRKNRICYLQEIFSNEMAKVDDSFFHRLEESFLVEEDKKHERHPIFGNIVDEVAYHEKYPTIYHLRKKLVDSTDKADLRLIYLALAHMIKFRGHFLIEGDLNPDNSDVDKLFIQLVQTYNQLFEENPINASGVDAKAILSARLSKSRRLENLIAQLPGEKKNGLFGNLIALSLGLTPNFKSNFDLAEDAKLQLSKDTYDDDLDNLLAQIGDQYADLFLAAKNLSDAILLSDILRVNTEITKAPLSASMIKRYDEHHQDLTLLKALVRQQLPEKYKEIFFDQSKNGYAGYIDGGASQEEFYKFIKPILEKMDGTEELLVKLNREDLLRKQRTFDNGSIPHQIHLGELHAILRRQEDFYPFLKDNREKIEKILTFRIPYYVGPLARGNSRFAWMTRKSEETITPWNFEEVVDKGASAQSFIERMTNFDKNLPNEKVLPKHSLLYEYFTVYNELTKVKYVTEGMRKPAFLSGEQKKAIVDLLFKTNRKVTVKQLKEDYFKKIECFDSVEISGVEDRFNASLGTYHDLLKIIKDKDFLDNEENEDILEDIVLTLTLFEDREMIEERLKTYAHLFDDKVMKQLKRRRYTGWGRLSRKLINGIRDKQSGKTILDFLKSDGFANRNFMQLIHDDSLTFKEDIQKAQVSGQGDSLHEHIANLAGSPAIKKGILQTVKVVDELVKVMGRHKPENIVIEMARENQTTQKGQKNSRERMKRIEEGIKELGSQILKEHPVENTQLQNEKLYLYYLQNGRDMYVDQELDINRLSDYDVDHIVPQSFLKDDSIDNKVLTRSDKARGKSDNVPSEEVVKKMKNYWRQLLNAKLITQRKFDNLTKAERGGLSELDKAGFIKRQLVETRQITKHVAQILDSRMNTKYDENDKLIREVKVITLKSKLVSDFRKDFQFYKVREINNYHHAHDAYLNAVVGTALIKKYPKLESEFVYGDYKVYDVRKMIAKSEQEIGKATAKYFFYSNIMNFFKTEITLANGEIRKRPLIETNGETGEIVWDKGRDFATVRKVLSMPQVNIVKKTEVQTGGFSKESILPKRNSDKLIARKKDWDPKKYGGFDSPTVAYSVLVVAKVEKGKSKKLKSVKELLGITIMERSSFEKNPIDFLEAKGYKEVKKDLIIKLPKYSLFELENGRKRMLASAGELQKGNELALPSKYVNFLYLASHYEKLKGSPEDNEQKQLFVEQHKHYLDEIIEQISEFSKRVILADANLDKVLSAYNKHRDKPIREQAENIIHLFTLTNLGAPAAFKYFDTTIDRKRYTSTKEVLDATLIHQSITGLYETRIDLSQLGGDGGPAPAPAPAPAPAPGGLLGRDLLTKLKAQIQFSTEGPQVTWEDRPAMCLVLNLEEEYRLHEKPVPPSIDPSWLQLFPMVWAEKAGMGLANQVPPVVVELKSDASPVAVRQYPMSKEAREGIRPHIQRFLDLGILVPCQSPWNTPLLPVKKPGTNDYRPVQDLREVNKRVQDIHPTVPNPYNLLSSLPPSHTWYSVLDLKDAFFCLKLHPNSQPLFAFEWRDPEKGNTGQLTWTRLPQGFKNSPTLFNEALHRDLASFRALNPQVVMLQYVDDLLVAAPTYRDCKEGTRRLLQELSKLGYRVSAKKAQLCREEVTYLGYLLKGGKRWLTPARKATVMKIPTPTTPRQVREFLGKAGFCRLFIPGFASLAAPLYPLTRPKVPFTWTEAHQEAFGRIKEALLSAPALALPDLTKPFALYVDEKEGVARGVLTQTLGPWRRPVAYLSKKLDPVASGWPTCLKAIAAVALLLKDADKLTLGQNVLVIAPHNLESIVRQPPDRWMTNARMTHYQSLLLNERVSFAPPAILNPATLLPVESDDTPIHICSEILAEETGTRPDLRDQPLPGVPAWYTDGSSFIMDGRRQAGAAIVDNKRTVWASNLPEGTSAQKAELIALTQALRLAEGKSINIYTDSRYAFATAHVHGAIYKQRGWLTSAGKDIKNKEEILALLEAIHLPKRVAIIHCPGHQRGTDPVATGNRKADEAAKQAAQSTRILTETTKNAGKRTADGSEFEKRTADGSEFESPKKKAKVE

SEQ ID NO: 1702 - protein, 2127 aa, synthetic construct
MPAAKRVKLDGGDKKYSIGLDIGTNSVGWAVITDEYKVPSKKFKVLGNTDRHSIKKNLIGALLFDSGETAEATRLKRTARRRYTRRKNRICYLQEIFSNEMAKVDDSFFHRLEESFLVEEDKKHERHPIFGNIVDEVAYHEKYPTIYHLRKKLVDSTDKADLRLIYLALAHMIKFRGHFLIEGDLNPDNSDVDKLFIQLVQTYNQLFEENPINASGVDAKAILSARLSKSRRLENLIAQLPGEKKNGLFGNLIALSLGLTPNFKSNFDLAEDAKLQLSKDTYDDDLDNLLAQIGDQYADLFLAAKNLSDAILLSDILRVNTEITKAPLSASMIKRYDEHHQDLTLLKALVRQQLPEKYKEIFFDQSKNGYAGYIDGGASQEEFYKFIKPILEKMDGTEELLVKLNREDLLRKQRTFDNGSIPHQIHLGELHAILRRQEDFYPFLKDNREKIEKILTFRIPYYVGPLARGNSRFAWMTRKSEETITPWNFEEVVDKGASAQSFIERMTNFDKNLPNEKVLPKHSLLYEYFTVYNELTKVKYVTEGMRKPAFLSGEQKKAIVDLLFKTNRKVTVKQLKEDYFKKIECFDSVEISGVEDRFNASLGTYHDLLKIIKDKDFLDNEENEDILEDIVLTLTLFEDREMIEERLKTYAHLFDDKVMKQLKRRRYTGWGRLSRKLINGIRDKQSGKTILDFLKSDGFANRNFMQLIHDDSLTFKEDIQKAQVSGQGDSLHEHIANLAGSPAIKKGILQTVKVVDELVKVMGRHKPENIVIEMARENQTTQKGQKNSRERMKRIEEGIKELGSQILKEHPVENTQLQNEKLYLYYLQNGRDMYVDQELDINRLSDYDVDHIVPQSFLKDDSIDNKVLTRSDKARGKSDNVPSEEVVKKMKNYWRQLLNAKLITQRKFDNLTKAERGGLSELDKAGFIKRQLVETRQITKHVAQILDSRMNTKYDENDKLIREVKVITLKSKLVSDFRKDFQFYKVREINNYHHAHDAYLNAVVGTALIKKYPKLESEFVYGDYKVYDVRKMIAKSEQEIGKATAKYFFYSNIMNFFKTEITLANGEIRKRPLIETNGETGEIVWDKGRDFATVRKVLSMPQVNIVKKTEVQTGGFSKESILPKRNSDKLIARKKDWDPKKYGGFDSPTVAYSVLVVAKVEKGKSKKLKSVKELLGITIMERSSFEKNPIDFLEAKGYKEVKKDLIIKLPKYSLFELENGRKRMLASAGELQKGNELALPSKYVNFLYLASHYEKLKGSPEDNEQKQLFVEQHKHYLDEIIEQISEFSKRVILADANLDKVLSAYNKHRDKPIREQAENIIHLFTLTNLGAPAAFKYFDTTIDRKRYTSTKEVLDATLIHQSITGLYETRIDLSQLGGDGGGGGEAAAKGGSGGLLGRDLLTKLKAQIQFSTEGPQVTWEDRPAMCLVLNLEEEYRLHEKPVPPSIDPSWLQLFPMVWAEKAGMGLANQVPPVVVELKSDASPVAVRQYPMSKEAREGIRPHIQRFLDLGILVPCQSPWNTPLLPVKKPGTNDYRPVQDLREVNKRVQDIHPTVPNPYNLLSSLPPSHTWYSVLDLKDAFFCLKLHPNSQPLFAFEWRDPEKGNTGQLTWTRLPQGFKNSPTLFNEALHRDLASFRALNPQVVMLQYVDDLLVAAPTYRDCKEGTRRLLQELSKLGYRVSAKKAQLCREEVTYLGYLLKGGKRWLTPARKATVMKIPTPTTPRQVREFLGKAGFCRLFIPGFASLAAPLYPLTRPKVPFTWTEAHQEAFGRIKEALLSAPALALPDLTKPFALYVDEKEGVARGVLTQTLGPWRRPVAYLSKKLDPVASGWPTCLKAIAAVALLLKDADKLTLGQNVLVIAPHNLESIVRQPPDRWMTNARMTHYQSLLLNERVSFAPPAILNPATLLPVESDDTPIHICSEILAEETGTRPDLRDQPLPGVPAWYTDGSSFIMDGRRQAGAAIVDNKRTVWASNLPEGTSAQKAELIALTQALRLAEGKSINIYTDSRYAFATAHVHGAIYKQRGWLTSAGKDIKNKEEILALLEAIHLPKRVAIIHCPGHQRGTDPVATGNRKADEAAKQAAQSTRILTETTKNAGKRTADGSEFEKRTADGSEFESPKKKAKVE

SEQ ID NO: 1703 - protein, 2122 aa, synthetic construct
MPAAKRVKLDGGDKKYSIGLDIGTNSVGWAVITDEYKVPSKKFKVLGNTDRHSIKKNLIGALLFDSGETAEATRLKRTARRRYTRRKNRICYLQEIFSNEMAKVDDSFFHRLEESFLVEEDKKHERHPIFGNIVDEVAYHEKYPTIYHLRKKLVDSTDKADLRLIYLALAHMIKFRGHFLIEGDLNPDNSDVDKLFIQLVQTYNQLFEENPINASGVDAKAILSARLSKSRRLENLIAQLPGEKKNGLFGNLIALSLGLTPNFKSNFDLAEDAKLQLSKDTYDDDLDNLLAQIGDQYADLFLAAKNLSDAILLSDILRVNTEITKAPLSASMIKRYDEHHQDLTLLKALVRQQLPEKYKEIFFDQSKNGYAGYIDGGASQEEFYKFIKPILEKMDGTEELLVKLNREDLLRKQRTFDNGSIPHQIHLGELHAILRRQEDFYPFLKDNREKIEKILTFRIPYYVGPLARGNSRFAWMTRKSEETITPWNFEEVVDKGASAQSFIERMTNFDKNLPNEKVLPKHSLLYEYFTVYNELTKVKYVTEGMRKPAFLSGEQKKAIVDLLFKTNRKVTVKQLKEDYFKKIECFDSVEISGVEDRFNASLGTYHDLLKIIKDKDFLDNEENEDILEDIVLTLTLFEDREMIEERLKTYAHLFDDKVMKQLKRRRYTGWGRLSRKLINGIRDKQSGKTILDFLKSDGFANRNFMQLIHDDSLTFKEDIQKAQVSGQGDSLHEHIANLAGSPAIKKGILQTVKVVDELVKVMGRHKPENIVIEMARENQTTQKGQKNSRERMKRIEEGIKELGSQILKEHPVENTQLQNEKLYLYYLQNGRDMYVDQELDINRLSDYDVDHIVPQSFLKDDSIDNKVLTRSDKARGKSDNVPSEEVVKKMKNYWRQLLNAKLITQRKFDNLTKAERGGLSELDKAGFIKRQLVETRQITKHVAQILDSRMNTKYDENDKLIREVKVITLKSKLVSDFRKDFQFYKVREINNYHHAHDAYLNAVVGTALIKKYPKLESEFVYGDYKVYDVRKMIAKSEQEIGKATAKYFFYSNIMNFFKTEITLANGEIRKRPLIETNGETGEIVWDKGRDFATVRKVLSMPQVNIVKKTEVQTGGFSKESILPKRNSDKLIARKKDWDPKKYGGFDSPTVAYSVLVVAKVEKGKSKKLKSVKELLGITIMERSSFEKNPIDFLEAKGYKEVKKDLIIKLPKYSLFELENGRKRMLASAGELQKGNELALPSKYVNFLYLASHYEKLKGSPEDNEQKQLFVEQHKHYLDEIIEQISEFSKRVILADANLDKVLSAYNKHRDKPIREQAENIIHLFTLTNLGAPAAFKYFDTTIDRKRYTSTKEVLDATLIHQSITGLYETRIDLSQLGGDGGGGSPAPGGLLGRDLLTKLKAQIQFSTEGPQVTWEDRPAMCLVLNLEEEYRLHEKPVPPSIDPSWLQLFPMVWAEKAGMGLANQVPPVVVELKSDASPVAVRQYPMSKEAREGIRPHIQRFLDLGILVPCQSPWNTPLLPVKKPGTNDYRPVQDLREVNKRVQDIHPTVPNPYNLLSSLPPSHTWYSVLDLKDAFFCLKLHPNSQPLFAFEWRDPEKGNTGQLTWTRLPQGFKNSPTLFNEALHRDLASFRALNPQVVMLQYVDDLLVAAPTYRDCKEGTRRLLQELSKLGYRVSAKKAQLCREEVTYLGYLLKGGKRWLTPARKATVMKIPTPTTPRQVREFLGKAGFCRLFIPGFASLAAPLYPLTRPKVPFTWTEAHQEAFGRIKEALLSAPALALPDLTKPFALYVDEKEGVARGVLTQTLGPWRRPVAYLSKKLDPVASGWPTCLKAIAAVALLLKDADKLTLGQNVLVIAPHNLESIVRQPPDRWMTNARMTHYQSLLLNERVSFAPPAILNPATLLPVESDDTPIHICSEILAEETGTRPDLRDQPLPGVPAWYTDGSSFIMDGRRQAGAAIVDNKRTVWASNLPEGTSAQKAELIALTQALRLAEGKSINIYTDSRYAFATAHVHGAIYKQRGWLTSAGKDIKNKEEILALLEAIHLPKRVAIIHCPGHQRGTDPVATGNRKADEAAKQAAQSTRILTETTKNAGKRTADGSEFEKRTADGSEFESPKKKAKVE

SEQ ID NO: 1704 - protein, 2127 aa, synthetic construct
MPAAKRVKLDGGDKKYSIGLDIGTNSVGWAVITDEYKVPSKKFKVLGNTDRHSIKKNLIGALLFDSGETAEATRLKRTARRRYTRRKNRICYLQEIFSNEMAKVDDSFFHRLEESFLVEEDKKHERHPIFGNIVDEVAYHEKYPTIYHLRKKLVDSTDKADLRLIYLALAHMIKFRGHFLIEGDLNPDNSDVDKLFIQLVQTYNQLFEENPINASGVDAKAILSARLSKSRRLENLIAQLPGEKKNGLFGNLIALSLGLTPNFKSNFDLAEDAKLQLSKDTYDDDLDNLLAQIGDQYADLFLAAKNLSDAILLSDILRVNTEITKAPLSASMIKRYDEHHQDLTLLKALVRQQLPEKYKEIFFDQSKNGYAGYIDGGASQEEFYKFIKPILEKMDGTEELLVKLNREDLLRKQRTFDNGSIPHQIHLGELHAILRRQEDFYPFLKDNREKIEKILTFRIPYYVGPLARGNSRFAWMTRKSEETITPWNFEEVVDKGASAQSFIERMTNFDKNLPNEKVLPKHSLLYEYFTVYNELTKVKYVTEGMRKPAFLSGEQKKAIVDLLFKTNRKVTVKQLKEDYFKKIECFDSVEISGVEDRFNASLGTYHDLLKIIKDKDFLDNEENEDILEDIVLTLTLFEDREMIEERLKTYAHLFDDKVMKQLKRRRYTGWGRLSRKLINGIRDKQSGKTILDFLKSDGFANRNFMQLIHDDSLTFKEDIQKAQVSGQGDSLHEHIANLAGSPAIKKGILQTVKVVDELVKVMGRHKPENIVIEMARENQTTQKGQKNSRERMKRIEEGIKELGSQILKEHPVENTQLQNEKLYLYYLQNGRDMYVDQELDINRLSDYDVDHIVPQSFLKDDSIDNKVLTRSDKARGKSDNVPSEEVVKKMKNYWRQLLNAKLITQRKFDNLTKAERGGLSELDKAGFIKRQLVETRQITKHVAQILDSRMNTKYDENDKLIREVKVITLKSKLVSDFRKDFQFYKVREINNYHHAHDAYLNAVVGTALIKKYPKLESEFVYGDYKVYDVRKMIAKSEQEIGKATAKYFFYSNIMNFFKTEITLANGEIRKRPLIETNGETGEIVWDKGRDFATVRKVLSMPQVNIVKKTEVQTGGFSKESILPKRNSDKLIARKKDWDPKKYGGFDSPTVAYSVLVVAKVEKGKSKKLKSVKELLGITIMERSSFEKNPIDFLEAKGYKEVKKDLIIKLPKYSLFELENGRKRMLASAGELQKGNELALPSKYVNFLYLASHYEKLKGSPEDNEQKQLFVEQHKHYLDEIIEQISEFSKRVILADANLDKVLSAYNKHRDKPIREQAENIIHLFTLTNLGAPAAFKYFDTTIDRKRYTSTKEVLDATLIHQSITGLYETRIDLSQLGGDGGGGSEAAAKPAPGGLLGRDLLTKLKAQIQFSTEGPQVTWEDRPAMCLVLNLEEEYRLHEKPVPPSIDPSWLQLFPMVWAEKAGMGLANQVPPVVVELKSDASPVAVRQYPMSKEAREGIRPHIQRFLDLGILVPCQSPWNTPLLPVKKPGTNDYRPVQDLREVNKRVQDIHPTVPNPYNLLSSLPPSHTWYSVLDLKDAFFCLKLHPNSQPLFAFEWRDPEKGNTGQLTWTRLPQGFKNSPTLFNEALHRDLASFRALNPQVVMLQYVDDLLVAAPTYRDCKEGTRRLLQELSKLGYRVSAKKAQLCREEVTYLGYLLKGGKRWLTPARKATVMKIPTPTTPRQVREFLGKAGFCRLFIPGFASLAAPLYPLTRPKVPFTWTEAHQEAFGRIKEALLSAPALALPDLTKPFALYVDEKEGVARGVLTQTLGPWRRPVAYLSKKLDPVASGWPTCLKAIAAVALLLKDADKLTLGQNVLVIAPHNLESIVRQPPDRWMTNARMTHYQSLLLNERVSFAPPAILNPATLLPVESDDTPIHICSEILAEETGTRPDLRDQPLPGVPAWYTDGSSFIMDGRRQAGAAIVDNKRTVWASNLPEGTSAQKAELIALTQALRLAEGKSINIYTDSRYAFATAHVHGAIYKQRGWLTSAGKDIKNKEEILALLEAIHLPKRVAIIHCPGHQRGTDPVATGNRKADEAAKQAAQSTRILTETTKNAGKRTADGSEFEKRTADGSEFESPKKKAKVE

SEQ ID NO: 1705 - protein, 2121 aa, synthetic construct
MPAAKRVKLDGGDKKYSIGLDIGTNSVGWAVITDEYKVPSKKFKVLGNTDRHSIKKNLIGALLFDSGETAEATRLKRTARRRYTRRKNRICYLQEIFSNEMAKVDDSFFHRLEESFLVEEDKKHERHPIFGNIVDEVAYHEKYPTIYHLRKKLVDSTDKADLRLIYLALAHMIKFRGHFLIEGDLNPDNSDVDKLFIQLVQTYNQLFEENPINASGVDAKAILSARLSKSRRLENLIAQLPGEKKNGLFGNLIALSLGLTPNFKSNFDLAEDAKLQLSKDTYDDDLDNLLAQIGDQYADLFLAAKNLSDAILLSDILRVNTEITKAPLSASMIKRYDEHHQDLTLLKALVRQQLPEKYKEIFFDQSKNGYAGYIDGGASQEEFYKFIKPILEKMDGTEELLVKLNREDLLRKQRTFDNGSIPHQIHLGELHAILRRQEDFYPFLKDNREKIEKILTFRIPYYVGPLARGNSRFAWMTRKSEETITPWNFEEVVDKGASAQSFIERMTNFDKNLPNEKVLPKHSLLYEYFTVYNELTKVKYVTEGMRKPAFLSGEQKKAIVDLLFKTNRKVTVKQLKEDYFKKIECFDSVEISGVEDRFNASLGTYHDLLKIIKDKDFLDNEENEDILEDIVLTLTLFEDREMIEERLKTYAHLFDDKVMKQLKRRRYTGWGRLSRKLINGIRDKQSGKTILDFLKSDGFANRNFMQLIHDDSLTFKEDIQKAQVSGQGDSLHEHIANLAGSPAIKKGILQTVKVVDELVKVMGRHKPENIVIEMARENQTTQKGQKNSRERMKRIEEGIKELGSQILKEHPVENTQLQNEKLYLYYLQNGRDMYVDQELDINRLSDYDVDHIVPQSFLKDDSIDNKVLTRSDKARGKSDNVPSEEVVKKMKNYWRQLLNAKLITQRKFDNLTKAERGGLSELDKAGFIKRQLVETRQITKHVAQILDSRMNTKYDENDKLIREVKVITLKSKLVSDFRKDFQFYKVREINNYHHAHDAYLNAVVGTALIKKYPKLESEFVYGDYKVYDVRKMIAKSEQEIGKATAKYFFYSNIMNFFKTEITLANGEIRKRPLIETNGETGEIVWDKGRDFATVRKVLSMPQVNIVKKTEVQTGGFSKESILPKRNSDKLIARKKDWDPKKYGGFDSPTVAYSVLVVAKVEKGKSKKLKSVKELLGITIMERSSFEKNPIDFLEAKGYKEVKKDLIIKLPKYSLFELENGRKRMLASAGELQKGNELALPSKYVNFLYLASHYEKLKGSPEDNEQKQLFVEQHKHYLDEIIEQISEFSKRVILADANLDKVLSAYNKHRDKPIREQAENIIHLFTLTNLGAPAAFKYFDTTIDRKRYTSTKEVLDATLIHQSITGLYETRIDLSQLGGDGGGGGGSGGLLGRDLLTKLKAQIQFSTEGPQVTWEDRPAMCLVLNLEEEYRLHEKPVPPSIDPSWLQLFPMVWAEKAGMGLANQVPPVVVELKSDASPVAVRQYPMSKEAREGIRPHIQRFLDLGILVPCQSPWNTPLLPVKKPGTNDYRPVQDLREVNKRVQDIHPTVPNPYNLLSSLPPSHTWYSVLDLKDAFFCLKLHPNSQPLFAFEWRDPEKGNTGQLTWTRLPQGFKNSPTLFNEALHRDLASFRALNPQVVMLQYVDDLLVAAPTYRDCKEGTRRLLQELSKLGYRVSAKKAQLCREEVTYLGYLLKGGKRWLTPARKATVMKIPTPTTPRQVREFLGKAGFCRLFIPGFASLAAPLYPLTRPKVPFTWTEAHQEAFGRIKEALLSAPALALPDLTKPFALYVDEKEGVARGVLTQTLGPWRRPVAYLSKKLDPVASGWPTCLKAIAAVALLLKDADKLTLGQNVLVIAPHNLESIVRQPPDRWMTNARMTHYQSLLLNERVSFAPPAILNPATLLPVESDDTPIHICSEILAEETGTRPDLRDQPLPGVPAWYTDGSSFIMDGRRQAGAAIVDNKRTVWASNLPEGTSAQKAELIALTQALRLAEGKSINIYTDSRYAFATAHVHGAIYKQRGWLTSAGKDIKNKEEILALLEAIHLPKRVAIIHCPGHQRGTDPVATGNRKADEAAKQAAQSTRILTETTKNAGKRTADGSEFEKRTADGSEFESPKKKAKVE

SEQ ID NO: 1706 - protein, 2146 aa, synthetic construct
MPAAKRVKLDGGDKKYSIGLDIGTNSVGWAVITDEYKVPSKKFKVLGNTDRHSIKKNLIGALLFDSGETAEATRLKRTARRRYTRRKNRICYLQEIFSNEMAKVDDSFFHRLEESFLVEEDKKHERHPIFGNIVDEVAYHEKYPTIYHLRKKLVDSTDKADLRLIYLALAHMIKFRGHFLIEGDLNPDNSDVDKLFIQLVQTYNQLFEENPINASGVDAKAILSARLSKSRRLENLIAQLPGEKKNGLFGNLIALSLGLTPNFKSNFDLAEDAKLQLSKDTYDDDLDNLLAQIGDQYADLFLAAKNLSDAILLSDILRVNTEITKAPLSASMIKRYDEHHQDLTLLKALVRQQLPEKYKEIFFDQSKNGYAGYIDGGASQEEFYKFIKPILEKMDGTEELLVKLNREDLLRKQRTFDNGSIPHQIHLGELHAILRRQEDFYPFLKDNREKIEKILTFRIPYYVGPLARGNSRFAWMTRKSEETITPWNFEEVVDKGASAQSFIERMTNFDKNLPNEKVLPKHSLLYEYFTVYNELTKVKYVTEGMRKPAFLSGEQKKAIVDLLFKTNRKVTVKQLKEDYFKKIECFDSVEISGVEDRFNASLGTYHDLLKIIKDKDFLDNEENEDILEDIVLTLTLFEDREMIEERLKTYAHLFDDKVMKQLKRRRYTGWGRLSRKLINGIRDKQSGKTILDFLKSDGFANRNFMQLIHDDSLTFKEDIQKAQVSGQGDSLHEHIANLAGSPAIKKGILQTVKVVDELVKVMGRHKPENIVIEMARENQTTQKGQKNSRERMKRIEEGIKELGSQILKEHPVENTQLQNEKLYLYYLQNGRDMYVDQELDINRLSDYDVDHIVPQSFLKDDSIDNKVLTRSDKARGKSDNVPSEEVVKKMKNYWRQLLNAKLITQRKFDNLTKAERGGLSELDKAGFIKRQLVETRQITKHVAQILDSRMNTKYDENDKLIREVKVITLKSKLVSDFRKDFQFYKVREINNYHHAHDAYLNAVVGTALIKKYPKLESEFVYGDYKVYDVRKMIAKSEQEIGKATAKYFFYSNIMNFFKTEITLANGEIRKRPLIETNGETGEIVWDKGRDFATVRKVLSMPQVNIVKKTEVQTGGFSKESILPKRNSDKLIARKKDWDPKKYGGFDSPTVAYSVLVVAKVEKGKSKKLKSVKELLGITIMERSSFEKNPIDFLEAKGYKEVKKDLIIKLPKYSLFELENGRKRMLASAGELQKGNELALPSKYVNFLYLASHYEKLKGSPEDNEQKQLFVEQHKHYLDEIIEQISEFSKRVILADANLDKVLSAYNKHRDKPIREQAENIIHLFTLTNLGAPAAFKYFDTTIDRKRYTSTKEVLDATLIHQSITGLYETRIDLSQLGGDGGEAAAKEAAAKEAAAKEAAAKEAAAKEAAAKGGLLGRDLLTKLKAQIQFSTEGPQVTWEDRPAMCLVLNLEEEYRLHEKPVPPSIDPSWLQLFPMVWAEKAGMGLANQVPPVVVELKSDASPVAVRQYPMSKEAREGIRPHIQRFLDLGILVPCQSPWNTPLLPVKKPGTNDYRPVQDLREVNKRVQDIHPTVPNPYNLLSSLPPSHTWYSVLDLKDAFFCLKLHPNSQPLFAFEWRDPEKGNTGQLTWTRLPQGFKNSPTLFNEALHRDLASFRALNPQVVMLQYVDDLLVAAPTYRDCKEGTRRLLQELSKLGYRVSAKKAQLCREEVTYLGYLLKGGKRWLTPARKATVMKIPTPTTPRQVREFLGKAGFCRLFIPGFASLAAPLYPLTRPKVPFTWTEAHQEAFGRIKEALLSAPALALPDLTKPFALYVDEKEGVARGVLTQTLGPWRRPVAYLSKKLDPVASGWPTCLKAIAAVALLLKDADKLTLGQNVLVIAPHNLESIVRQPPDRWMTNARMTHYQSLLLNERVSFAPPAILNPATLLPVESDDTPIHICSEILAEETGTRPDLRDQPLPGVPAWYTDGSSFIMDGRRQAGAAIVDNKRTVWASNLPEGTSAQKAELIALTQALRLAEGKSINIYTDSRYAFATAHVHGAIYKQRGWLTSAGKDIKNKEEILALLEAIHLPKRVAIIHCPGHQRGTDPVATGNRKADEAAKQAAQSTRILTETTKNAGKRTADGSEFEKRTADGSEFESPKKKAKVE

SEQ ID NO: 1707 - protein, 2122 aa, synthetic construct
MPAAKRVKLDGGDKKYSIGLDIGTNSVGWAVITDEYKVPSKKFKVLGNTDRHSIKKNLIGALLFDSGETAEATRLKRTARRRYTRRKNRICYLQEIFSNEMAKVDDSFFHRLEESFLVEEDKKHERHPIFGNIVDEVAYHEKYPTIYHLRKKLVDSTDKADLRLIYLALAHMIKFRGHFLIEGDLNPDNSDVDKLFIQLVQTYNQLFEENPINASGVDAKAILSARLSKSRRLENLIAQLPGEKKNGLFGNLIALSLGLTPNFKSNFDLAEDAKLQLSKDTYDDDLDNLLAQIGDQYADLFLAAKNLSDAILLSDILRVNTEITKAPLSASMIKRYDEHHQDLTLLKALVRQQLPEKYKEIFFDQSKNGYAGYIDGGASQEEFYKFIKPILEKMDGTEELLVKLNREDLLRKQRTFDNGSIPHQIHLGELHAILRRQEDFYPFLKDNREKIEKILTFRIPYYVGPLARGNSRFAWMTRKSEETITPWNFEEVVDKGASAQSFIERMTNFDKNLPNEKVLPKHSLLYEYFTVYNELTKVKYVTEGMRKPAFLSGEQKKAIVDLLFKTNRKVTVKQLKEDYFKKIECFDSVEISGVEDRFNASLGTYHDLLKIIKDKDFLDNEENEDILEDIVLTLTLFEDREMIEERLKTYAHLFDDKVMKQLKRRRYTGWGRLSRKLINGIRDKQSGKTILDFLKSDGFANRNFMQLIHDDSLTFKEDIQKAQVSGQGDSLHEHIANLAGSPAIKKGILQTVKVVDELVKVMGRHKPENIVIEMARENQTTQKGQKNSRERMKRIEEGIKELGSQILKEHPVENTQLQNEKLYLYYLQNGRDMYVDQELDINRLSDYDVDHIVPQSFLKDDSIDNKVLTRSDKARGKSDNVPSEEVVKKMKNYWRQLLNAKLITQRKFDNLTKAERGGLSELDKAGFIKRQLVETRQITKHVAQILDSRMNTKYDENDKLIREVKVITLKSKLVSDFRKDFQFYKVREINNYHHAHDAYLNAVVGTALIKKYPKLESEFVYGDYKVYDVRKMIAKSEQEIGKATAKYFFYSNIMNFFKTEITLANGEIRKRPLIETNGETGEIVWDKGRDFATVRKVLSMPQVNIVKKTEVQTGGFSKESILPKRNSDKLIARKKDWDPKKYGGFDSPTVAYSVLVVAKVEKGKSKKLKSVKELLGITIMERSSFEKNPIDFLEAKGYKEVKKDLIIKLPKYSLFELENGRKRMLASAGELQKGNELALPSKYVNFLYLASHYEKLKGSPEDNEQKQLFVEQHKHYLDEIIEQISEFSKRVILADANLDKVLSAYNKHRDKPIREQAENIIHLFTLTNLGAPAAFKYFDTTIDRKRYTSTKEVLDATLIHQSITGLYETRIDLSQLGGDGGGGGGGGGGLLGRDLLTKLKAQIQFSTEGPQVTWEDRPAMCLVLNLEEEYRLHEKPVPPSIDPSWLQLFPMVWAEKAGMGLANQVPPVVVELKSDASPVAVRQYPMSKEAREGIRPHIQRFLDLGILVPCQSPWNTPLLPVKKPGTNDYRPVQDLREVNKRVQDIHPTVPNPYNLLSSLPPSHTWYSVLDLKDAFFCLKLHPNSQPLFAFEWRDPEKGNTGQLTWTRLPQGFKNSPTLFNEALHRDLASFRALNPQVVMLQYVDDLLVAAPTYRDCKEGTRRLLQELSKLGYRVSAKKAQLCREEVTYLGYLLKGGKRWLTPARKATVMKIPTPTTPRQVREFLGKAGFCRLFIPGFASLAAPLYPLTRPKVPFTWTEAHQEAFGRIKEALLSAPALALPDLTKPFALYVDEKEGVARGVLTQTLGPWRRPVAYLSKKLDPVASGWPTCLKAIAAVALLLKDADKLTLGQNVLVIAPHNLESIVRQPPDRWMTNARMTHYQSLLLNERVSFAPPAILNPATLLPVESDDTPIHICSEILAEETGTRPDLRDQPLPGVPAWYTDGSSFIMDGRRQAGAAIVDNKRTVWASNLPEGTSAQKAELIALTQALRLAEGKSINIYTDSRYAFATAHVHGAIYKQRGWLTSAGKDIKNKEEILALLEAIHLPKRVAIIHCPGHQRGTDPVATGNRKADEAAKQAAQSTRILTETTKNAGKRTADGSEFEKRTADGSEFESPKKKAKVE

SEQ ID NO: 1708 - protein, 2127 aa, synthetic construct
MPAAKRVKLDGGDKKYSIGLDIGTNSVGWAVITDEYKVPSKKFKVLGNTDRHSIKKNLIGALLFDSGETAEATRLKRTARRRYTRRKNRICYLQEIFSNEMAKVDDSFFHRLEESFLVEEDKKHERHPIFGNIVDEVAYHEKYPTIYHLRKKLVDSTDKADLRLIYLALAHMIKFRGHFLIEGDLNPDNSDVDKLFIQLVQTYNQLFEENPINASGVDAKAILSARLSKSRRLENLIAQLPGEKKNGLFGNLIALSLGLTPNFKSNFDLAEDAKLQLSKDTYDDDLDNLLAQIGDQYADLFLAAKNLSDAILLSDILRVNTEITKAPLSASMIKRYDEHHQDLTLLKALVRQQLPEKYKEIFFDQSKNGYAGYIDGGASQEEFYKFIKPILEKMDGTEELLVKLNREDLLRKQRTFDNGSIPHQIHLGELHAILRRQEDFYPFLKDNREKIEKILTFRIPYYVGPLARGNSRFAWMTRKSEETITPWNFEEVVDKGASAQSFIERMTNFDKNLPNEKVLPKHSLLYEYFTVYNELTKVKYVTEGMRKPAFLSGEQKKAIVDLLFKTNRKVTVKQLKEDYFKKIECFDSVEISGVEDRFNASLGTYHDLLKIIKDKDFLDNEENEDILEDIVLTLTLFEDREMIEERLKTYAHLFDDKVMKQLKRRRYTGWGRLSRKLINGIRDKQSGKTILDFLKSDGFANRNFMQLIHDDSLTFKEDIQKAQVSGQGDSLHEHIANLAGSPAIKKGILQTVKVVDELVKVMGRHKPENIVIEMARENQTTQKGQKNSRERMKRIEEGIKELGSQILKEHPVENTQLQNEKLYLYYLQNGRDMYVDQELDINRLSDYDVDHIVPQSFLKDDSIDNKVLTRSDKARGKSDNVPSEEVVKKMKNYWRQLLNAKLITQRKFDNLTKAERGGLSELDKAGFIKRQLVETRQITKHVAQILDSRMNTKYDENDKLIREVKVITLKSKLVSDFRKDFQFYKVREINNYHHAHDAYLNAVVGTALIKKYPKLESEFVYGDYKVYDVRKMIAKSEQEIGKATAKYFFYSNIMNFFKTEITLANGEIRKRPLIETNGETGEIVWDKGRDFATVRKVLSMPQVNIVKKTEVQTGGFSKESILPKRNSDKLIARKKDWDPKKYGGFDSPTVAYSVLVVAKVEKGKSKKLKSVKELLGITIMERSSFEKNPIDFLEAKGYKEVKKDLIIKLPKYSLFELENGRKRMLASAGELQKGNELALPSKYVNFLYLASHYEKLKGSPEDNEQKQLFVEQHKHYLDEIIEQISEFSKRVILADANLDKVLSAYNKHRDKPIREQAENIIHLFTLTNLGAPAAFKYFDTTIDRKRYTSTKEVLDATLIHQSITGLYETRIDLSQLGGDGGGSSGGGEAAAKGGLLGRDLLTKLKAQIQFSTEGPQVTWEDRPAMCLVLNLEEEYRLHEKPVPPSIDPSWLQLFPMVWAEKAGMGLANQVPPVVVELKSDASPVAVRQYPMSKEAREGIRPHIQRFLDLGILVPCQSPWNTPLLPVKKPGTNDYRPVQDLREVNKRVQDIHPTVPNPYNLLSSLPPSHTWYSVLDLKDAFFCLKLHPNSQPLFAFEWRDPEKGNTGQLTWTRLPQGFKNSPTLFNEALHRDLASFRALNPQVVMLQYVDDLLVAAPTYRDCKEGTRRLLQELSKLGYRVSAKKAQLCREEVTYLGYLLKGGKRWLTPARKATVMKIPTPTTPRQVREFLGKAGFCRLFIPGFASLAAPLYPLTRPKVPFTWTEAHQEAFGRIKEALLSAPALALPDLTKPFALYVDEKEGVARGVLTQTLGPWRRPVAYLSKKLDPVASGWPTCLKAIAAVALLLKDADKLTLGQNVLVIAPHNLESIVRQPPDRWMTNARMTHYQSLLLNERVSFAPPAILNPATLLPVESDDTPIHICSEILAEETGTRPDLRDQPLPGVPAWYTDGSSFIMDGRRQAGAAIVDNKRTVWASNLPEGTSAQKAELIALTQALRLAEGKSINIYTDSRYAFATAHVHGAIYKQRGWLTSAGKDIKNKEEILALLEAIHLPKRVAIIHCPGHQRGTDPVATGNRKADEAAKQAAQSTRILTETTKNAGKRTADGSEFEKRTADGSEFESPKKKAKVE

SEQ ID NO: 1709 - protein, 2124 aa, synthetic construct
MPAAKRVKLDGGDKKYSIGLDIGTNSVGWAVITDEYKVPSKKFKVLGNTDRHSIKKNLIGALLFDSGETAEATRLKRTARRRYTRRKNRICYLQEIFSNEMAKVDDSFFHRLEESFLVEEDKKHERHPIFGNIVDEVAYHEKYPTIYHLRKKLVDSTDKADLRLIYLALAHMIKFRGHFLIEGDLNPDNSDVDKLFIQLVQTYNQLFEENPINASGVDAKAILSARLSKSRRLENLIAQLPGEKKNGLFGNLIALSLGLTPNFKSNFDLAEDAKLQLSKDTYDDDLDNLLAQIGDQYADLFLAAKNLSDAILLSDILRVNTEITKAPLSASMIKRYDEHHQDLTLLKALVRQQLPEKYKEIFFDQSKNGYAGYIDGGASQEEFYKFIKPILEKMDGTEELLVKLNREDLLRKQRTFDNGSIPHQIHLGELHAILRRQEDFYPFLKDNREKIEKILTFRIPYYVGPLARGNSRFAWMTRKSEETITPWNFEEVVDKGASAQSFIERMTNFDKNLPNEKVLPKHSLLYEYFTVYNELTKVKYVTEGMRKPAFLSGEQKKAIVDLLFKTNRKVTVKQLKEDYFKKIECFDSVEISGVEDRFNASLGTYHDLLKIIKDKDFLDNEENEDILEDIVLTLTLFEDREMIEERLKTYAHLFDDKVMKQLKRRRYTGWGRLSRKLINGIRDKQSGKTILDFLKSDGFANRNFMQLIHDDSLTFKEDIQKAQVSGQGDSLHEHIANLAGSPAIKKGILQTVKVVDELVKVMGRHKPENIVIEMARENQTTQKGQKNSRERMKRIEEGIKELGSQILKEHPVENTQLQNEKLYLYYLQNGRDMYVDQELDINRLSDYDVDHIVPQSFLKDDSIDNKVLTRSDKARGKSDNVPSEEVVKKMKNYWRQLLNAKLITQRKFDNLTKAERGGLSELDKAGFIKRQLVETRQITKHVAQILDSRMNTKYDENDKLIREVKVITLKSKLVSDFRKDFQFYKVREINNYHHAHDAYLNAVVGTALIKKYPKLESEFVYGDYKVYDVRKMIAKSEQEIGKATAKYFFYSNIMNFFKTEITLANGEIRKRPLIETNGETGEIVWDKGRDFATVRKVLSMPQVNIVKKTEVQTGGFSKESILPKRNSDKLIARKKDWDPKKYGGFDSPTVAYSVLVVAKVEKGKSKKLKSVKELLGITIMERSSFEKNPIDFLEAKGYKEVKKDLIIKLPKYSLFELENGRKRMLASAGELQKGNELALPSKYVNFLYLASHYEKLKGSPEDNEQKQLFVEQHKHYLDEIIEQISEFSKRVILADANLDKVLSAYNKHRDKPIREQAENIIHLFTLTNLGAPAAFKYFDTTIDRKRYTSTKEVLDATLIHQSITGLYETRIDLSQLGGDGGGSSEAAAKGGLLGRDLLTKLKAQIQFSTEGPQVTWEDRPAMCLVLNLEEEYRLHEKPVPPSIDPSWLQLFPMVWAEKAGMGLANQVPPVVVELKSDASPVAVRQYPMSKEAREGIRPHIQRFLDLGILVPCQSPWNTPLLPVKKPGTNDYRPVQDLREVNKRVQDIHPTVPNPYNLLSSLPPSHTWYSVLDLKDAFFCLKLHPNSQPLFAFEWRDPEKGNTGQLTWTRLPQGFKNSPTLFNEALHRDLASFRALNPQVVMLQYVDDLLVAAPTYRDCKEGTRRLLQELSKLGYRVSAKKAQLCREEVTYLGYLLKGGKRWLTPARKATVMKIPTPTTPRQVREFLGKAGFCRLFIPGFASLAAPLYPLTRPKVPFTWTEAHQEAFGRIKEALLSAPALALPDLTKPFALYVDEKEGVARGVLTQTLGPWRRPVAYLSKKLDPVASGWPTCLKAIAAVALLLKDADKLTLGQNVLVIAPHNLESIVRQPPDRWMTNARMTHYQSLLLNERVSFAPPAILNPATLLPVESDDTPIHICSEILAEETGTRPDLRDQPLPGVPAWYTDGSSFIMDGRRQAGAAIVDNKRTVWASNLPEGTSAQKAELIALTQALRLAEGKSINIYTDSRYAFATAHVHGAIYKQRGWLTSAGKDIKNKEEILALLEAIHLPKRVAIIHCPGHQRGTDPVATGNRKADEAAKQAAQSTRILTETTKNAGKRTADGSEFEKRTADGSEFESPKKKAKVE

SEQ ID NO: 1710 - protein, 2125 aa, synthetic construct
MPAAKRVKLDGGDKKYSIGLDIGTNSVGWAVITDEYKVPSKKFKVLGNTDRHSIKKNLIGALLFDSGETAEATRLKRTARRRYTRRKNRICYLQEIFSNEMAKVDDSFFHRLEESFLVEEDKKHERHPIFGNIVDEVAYHEKYPTIYHLRKKLVDSTDKADLRLIYLALAHMIKFRGHFLIEGDLNPDNSDVDKLFIQLVQTYNQLFEENPINASGVDAKAILSARLSKSRRLENLIAQLPGEKKNGLFGNLIALSLGLTPNFKSNFDLAEDAKLQLSKDTYDDDLDNLLAQIGDQYADLFLAAKNLSDAILLSDILRVNTEITKAPLSASMIKRYDEHHQDLTLLKALVRQQLPEKYKEIFFDQSKNGYAGYIDGGASQEEFYKFIKPILEKMDGTEELLVKLNREDLLRKQRTFDNGSIPHQIHLGELHAILRRQEDFYPFLKDNREKIEKILTFRIPYYVGPLARGNSRFAWMTRKSEETITPWNFEEVVDKGASAQSFIERMTNFDKNLPNEKVLPKHSLLYEYFTVYNELTKVKYVTEGMRKPAFLSGEQKKAIVDLLFKTNRKVTVKQLKEDYFKKIECFDSVEISGVEDRFNASLGTYHDLLKIIKDKDFLDNEENEDILEDIVLTLTLFEDREMIEERLKTYAHLFDDKVMKQLKRRRYTGWGRLSRKLINGIRDKQSGKTILDFLKSDGFANRNFMQLIHDDSLTFKEDIQKAQVSGQGDSLHEHIANLAGSPAIKKGILQTVKVVDELVKVMGRHKPENIVIEMARENQTTQKGQKNSRERMKRIEEGIKELGSQILKEHPVENTQLQNEKLYLYYLQNGRDMYVDQELDINRLSDYDVDHIVPQSFLKDDSIDNKVLTRSDKARGKSDNVPSEEVVKKMKNYWRQLLNAKLITQRKFDNLTKAERGGLSELDKAGFIKRQLVETRQITKHVAQILDSRMNTKYDENDKLIREVKVITLKSKLVSDFRKDFQFYKVREINNYHHAHDAYLNAVVGTALIKKYPKLESEFVYGDYKVYDVRKMIAKSEQEIGKATAKYFFYSNIMNFFKTEITLANGEIRKRPLIETNGETGEIVWDKGRDFATVRKVLSMPQVNIVKKTEVQTGGFSKESILPKRNSDKLIARKKDWDPKKYGGFDSPTVAYSVLVVAKVEKGKSKKLKSVKELLGITIMERSSFEKNPIDFLEAKGYKEVKKDLIIKLPKYSLFELENGRKRMLASAGELQKGNELALPSKYVNFLYLASHYEKLKGSPEDNEQKQLFVEQHKHYLDEIIEQISEFSKRVILADANLDKVLSAYNKHRDKPIREQAENIIHLFTLTNLGAPAAFKYFDTTIDRKRYTSTKEVLDATLIHQSITGLYETRIDLSQLGGDGGGGGPAPGGSGGLLGRDLLTKLKAQIQFSTEGPQVTWEDRPAMCLVLNLEEEYRLHEKPVPPSIDPSWLQLFPMVWAEKAGMGLANQVPPVVVELKSDASPVAVRQYPMSKEAREGIRPHIQRFLDLGILVPCQSPWNTPLLPVKKPGTNDYRPVQDLREVNKRVQDIHPTVPNPYNLLSSLPPSHTWYSVLDLKDAFFCLKLHPNSQPLFAFEWRDPEKGNTGQLTWTRLPQGFKNSPTLFNEALHRDLASFRALNPQVVMLQYVDDLLVAAPTYRDCKEGTRRLLQELSKLGYRVSAKKAQLCREEVTYLGYLLKGGKRWLTPARKATVMKIPTPTTPRQVREFLGKAGFCRLFIPGFASLAAPLYPLTRPKVPFTWTEAHQEAFGRIKEALLSAPALALPDLTKPFALYVDEKEGVARGVLTQTLGPWRRPVAYLSKKLDPVASGWPTCLKAIAAVALLLKDADKLTLGQNVLVIAPHNLESIVRQPPDRWMTNARMTHYQSLLLNERVSFAPPAILNPATLLPVESDDTPIHICSEILAEETGTRPDLRDQPLPGVPAWYTDGSSFIMDGRRQAGAAIVDNKRTVWASNLPEGTSAQKAELIALTQALRLAEGKSINIYTDSRYAFATAHVHGAIYKQRGWLTSAGKDIKNKEEILALLEAIHLPKRVAIIHCPGHQRGTDPVATGNRKADEAAKQAAQSTRILTETTKNAGKRTADGSEFEKRTADGSEFESPKKKAKVE

SEQ ID NO: 1711 - protein, 2127 aa, synthetic construct
MPAAKRVKLDGGDKKYSIGLDIGTNSVGWAVITDEYKVPSKKFKVLGNTDRHSIKKNLIGALLFDSGETAEATRLKRTARRRYTRRKNRICYLQEIFSNEMAKVDDSFFHRLEESFLVEEDKKHERHPIFGNIVDEVAYHEKYPTIYHLRKKLVDSTDKADLRLIYLALAHMIKFRGHFLIEGDLNPDNSDVDKLFIQLVQTYNQLFEENPINASGVDAKAILSARLSKSRRLENLIAQLPGEKKNGLFGNLIALSLGLTPNFKSNFDLAEDAKLQLSKDTYDDDLDNLLAQIGDQYADLFLAAKNLSDAILLSDILRVNTEITKAPLSASMIKRYDEHHQDLTLLKALVRQQLPEKYKEIFFDQSKNGYAGYIDGGASQEEFYKFIKPILEKMDGTEELLVKLNREDLLRKQRTFDNGSIPHQIHLGELHAILRRQEDFYPFLKDNREKIEKILTFRIPYYVGPLARGNSRFAWMTRKSEETITPWNFEEVVDKGASAQSFIERMTNFDKNLPNEKVLPKHSLLYEYFTVYNELTKVKYVTEGMRKPAFLSGEQKKAIVDLLFKTNRKVTVKQLKEDYFKKIECFDSVEISGVEDRFNASLGTYHDLLKIIKDKDFLDNEENEDILEDIVLTLTLFEDREMIEERLKTYAHLFDDKVMKQLKRRRYTGWGRLSRKLINGIRDKQSGKTILDFLKSDGFANRNFMQLIHDDSLTFKEDIQKAQVSGQGDSLHEHIANLAGSPAIKKGILQTVKVVDELVKVMGRHKPENIVIEMARENQTTQKGQKNSRERMKRIEEGIKELGSQILKEHPVENTQLQNEKLYLYYLQNGRDMYVDQELDINRLSDYDVDHIVPQSFLKDDSIDNKVLTRSDKARGKSDNVPSEEVVKKMKNYWRQLLNAKLITQRKFDNLTKAERGGLSELDKAGFIKRQLVETRQITKHVAQILDSRMNTKYDENDKLIREVKVITLKSKLVSDFRKDFQFYKVREINNYHHAHDAYLNAVVGTALIKKYPKLESEFVYGDYKVYDVRKMIAKSEQEIGKATAKYFFYSNIMNFFKTEITLANGEIRKRPLIETNGETGEIVWDKGRDFATVRKVLSMPQVNIVKKTEVQTGGFSKESILPKRNSDKLIARKKDWDPKKYGGFDSPTVAYSVLVVAKVEKGKSKKLKSVKELLGITIMERSSFEKNPIDFLEAKGYKEVKKDLIIKLPKYSLFELENGRKRMLASAGELQKGNELALPSKYVNFLYLASHYEKLKGSPEDNEQKQLFVEQHKHYLDEIIEQISEFSKRVILADANLDKVLSAYNKHRDKPIREQAENIIHLFTLTNLGAPAAFKYFDTTIDRKRYTSTKEVLDATLIHQSITGLYETRIDLSQLGGDGGGSSEAAAKPAPGGLLGRDLLTKLKAQIQFSTEGPQVTWEDRPAMCLVLNLEEEYRLHEKPVPPSIDPSWLQLFPMVWAEKAGMGLANQVPPVVVELKSDASPVAVRQYPMSKEAREGIRPHIQRFLDLGILVPCQSPWNTPLLPVKKPGTNDYRPVQDLREVNKRVQDIHPTVPNPYNLLSSLPPSHTWYSVLDLKDAFFCLKLHPNSQPLFAFEWRDPEKGNTGQLTWTRLPQGFKNSPTLFNEALHRDLASFRALNPQVVMLQYVDDLLVAAPTYRDCKEGTRRLLQELSKLGYRVSAKKAQLCREEVTYLGYLLKGGKRWLTPARKATVMKIPTPTTPRQVREFLGKAGFCRLFIPGFASLAAPLYPLTRPKVPFTWTEAHQEAFGRIKEALLSAPALALPDLTKPFALYVDEKEGVARGVLTQTLGPWRRPVAYLSKKLDPVASGWPTCLKAIAAVALLLKDADKLTLGQNVLVIAPHNLESIVRQPPDRWMTNARMTHYQSLLLNERVSFAPPAILNPATLLPVESDDTPIHICSEILAEETGTRPDLRDQPLPGVPAWYTDGSSFIMDGRRQAGAAIVDNKRTVWASNLPEGTSAQKAELIALTQALRLAEGKSINIYTDSRYAFATAHVHGAIYKQRGWLTSAGKDIKNKEEILALLEAIHLPKRVAIIHCPGHQRGTDPVATGNRKADEAAKQAAQSTRILTETTKNAGKRTADGSEFEKRTADGSEFESPKKKAKVE

SEQ ID NO: 1712 - protein, 2131 aa, synthetic construct
MPAAKRVKLDGGDKKYSIGLDIGTNSVGWAVITDEYKVPSKKFKVLGNTDRHSIKKNLIGALLFDSGETAEATRLKRTARRRYTRRKNRICYLQEIFSNEMAKVDDSFFHRLEESFLVEEDKKHERHPIFGNIVDEVAYHEKYPTIYHLRKKLVDSTDKADLRLIYLALAHMIKFRGHFLIEGDLNPDNSDVDKLFIQLVQTYNQLFEENPINASGVDAKAILSARLSKSRRLENLIAQLPGEKKNGLFGNLIALSLGLTPNFKSNFDLAEDAKLQLSKDTYDDDLDNLLAQIGDQYADLFLAAKNLSDAILLSDILRVNTEITKAPLSASMIKRYDEHHQDLTLLKALVRQQLPEKYKEIFFDQSKNGYAGYIDGGASQEEFYKFIKPILEKMDGTEELLVKLNREDLLRKQRTFDNGSIPHQIHLGELHAILRRQEDFYPFLKDNREKIEKILTFRIPYYVGPLARGNSRFAWMTRKSEETITPWNFEEVVDKGASAQSFIERMTNFDKNLPNEKVLPKHSLLYEYFTVYNELTKVKYVTEGMRKPAFLSGEQKKAIVDLLFKTNRKVTVKQLKEDYFKKIECFDSVEISGVEDRFNASLGTYHDLLKIIKDKDFLDNEENEDILEDIVLTLTLFEDREMIEERLKTYAHLFDDKVMKQLKRRRYTGWGRLSRKLINGIRDKQSGKTILDFLKSDGFANRNFMQLIHDDSLTFKEDIQKAQVSGQGDSLHEHIANLAGSPAIKKGILQTVKVVDELVKVMGRHKPENIVIEMARENQTTQKGQKNSRERMKRIEEGIKELGSQILKEHPVENTQLQNEKLYLYYLQNGRDMYVDQELDINRLSDYDVDHIVPQSFLKDDSIDNKVLTRSDKARGKSDNVPSEEVVKKMKNYWRQLLNAKLITQRKFDNLTKAERGGLSELDKAGFIKRQLVETRQITKHVAQILDSRMNTKYDENDKLIREVKVITLKSKLVSDFRKDFQFYKVREINNYHHAHDAYLNAVVGTALIKKYPKLESEFVYGDYKVYDVRKMIAKSEQEIGKATAKYFFYSNIMNFFKTEITLANGEIRKRPLIETNGETGEIVWDKGRDFATVRKVLSMPQVNIVKKTEVQTGGFSKESILPKRNSDKLIARKKDWDPKKYGGFDSPTVAYSVLVVAKVEKGKSKKLKSVKELLGITIMERSSFEKNPIDFLEAKGYKEVKKDLIIKLPKYSLFELENGRKRMLASAGELQKGNELALPSKYVNFLYLASHYEKLKGSPEDNEQKQLFVEQHKHYLDEIIEQISEFSKRVILADANLDKVLSAYNKHRDKPIREQAENIIHLFTLTNLGAPAAFKYFDTTIDRKRYTSTKEVLDATLIHQSITGLYETRIDLSQLGGDGGEAAAKGGGGSEAAAKGGLLGRDLLTKLKAQIQFSTEGPQVTWEDRPAMCLVLNLEEEYRLHEKPVPPSIDPSWLQLFPMVWAEKAGMGLANQVPPVVVELKSDASPVAVRQYPMSKEAREGIRPHIQRFLDLGILVPCQSPWNTPLLPVKKPGTNDYRPVQDLREVNKRVQDIHPTVPNPYNLLSSLPPSHTWYSVLDLKDAFFCLKLHPNSQPLFAFEWRDPEKGNTGQLTWTRLPQGFKNSPTLFNEALHRDLASFRALNPQVVMLQYVDDLLVAAPTYRDCKEGTRRLLQELSKLGYRVSAKKAQLCREEVTYLGYLLKGGKRWLTPARKATVMKIPTPTTPRQVREFLGKAGFCRLFIPGFASLAAPLYPLTRPKVPFTWTEAHQEAFGRIKEALLSAPALALPDLTKPFALYVDEKEGVARGVLTQTLGPWRRPVAYLSKKLDPVASGWPTCLKAIAAVALLLKDADKLTLGQNVLVIAPHNLESIVRQPPDRWMTNARMTHYQSLLLNERVSFAPPAILNPATLLPVESDDTPIHICSEILAEETGTRPDLRDQPLPGVPAWYTDGSSFIMDGRRQAGAAIVDNKRTVWASNLPEGTSAQKAELIALTQALRLAEGKSINIYTDSRYAFATAHVHGAIYKQRGWLTSAGKDIKNKEEILALLEAIHLPKRVAIIHCPGHQRGTDPVATGNRKADEAAKQAAQSTRILTETTKNAGKRTADGSEFEKRTADGSEFESPKKKAKVE

SEQ ID NO: 1713 - protein, 2127 aa, synthetic construct
MPAAKRVKLDGGDKKYSIGLDIGTNSVGWAVITDEYKVPSKKFKVLGNTDRHSIKKNLIGALLFDSGETAEATRLKRTARRRYTRRKNRICYLQEIFSNEMAKVDDSFFHRLEESFLVEEDKKHERHPIFGNIVDEVAYHEKYPTIYHLRKKLVDSTDKADLRLIYLALAHMIKFRGHFLIEGDLNPDNSDVDKLFIQLVQTYNQLFEENPINASGVDAKAILSARLSKSRRLENLIAQLPGEKKNGLFGNLIALSLGLTPNFKSNFDLAEDAKLQLSKDTYDDDLDNLLAQIGDQYADLFLAAKNLSDAILLSDILRVNTEITKAPLSASMIKRYDEHHQDLTLLKALVRQQLPEKYKEIFFDQSKNGYAGYIDGGASQEEFYKFIKPILEKMDGTEELLVKLNREDLLRKQRTFDNGSIPHQIHLGELHAILRRQEDFYPFLKDNREKIEKILTFRIPYYVGPLARGNSRFAWMTRKSEETITPWNFEEVVDKGASAQSFIERMTNFDKNLPNEKVLPKHSLLYEYFTVYNELTKVKYVTEGMRKPAFLSGEQKKAIVDLLFKTNRKVTVKQLKEDYFKKIECFDSVEISGVEDRFNASLGTYHDLLKIIKDKDFLDNEENEDILEDIVLTLTLFEDREMIEERLKTYAHLFDDKVMKQLKRRRYTGWGRLSRKLINGIRDKQSGKTILDFLKSDGFANRNFMQLIHDDSLTFKEDIQKAQVSGQGDSLHEHIANLAGSPAIKKGILQTVKVVDELVKVMGRHKPENIVIEMARENQTTQKGQKNSRERMKRIEEGIKELGSQILKEHPVENTQLQNEKLYLYYLQNGRDMYVDQELDINRLSDYDVDHIVPQSFLKDDSIDNKVLTRSDKARGKSDNVPSEEVVKKMKNYWRQLLNAKLITQRKFDNLTKAERGGLSELDKAGFIKRQLVETRQITKHVAQILDSRMNTKYDENDKLIREVKVITLKSKLVSDFRKDFQFYKVREINNYHHAHDAYLNAVVGTALIKKYPKLESEFVYGDYKVYDVRKMIAKSEQEIGKATAKYFFYSNIMNFFKTEITLANGEIRKRPLIETNGETGEIVWDKGRDFATVRKVLSMPQVNIVKKTEVQTGGFSKESILPKRNSDKLIARKKDWDPKKYGGFDSPTVAYSVLVVAKVEKGKSKKLKSVKELLGITIMERSSFEKNPIDFLEAKGYKEVKKDLIIKLPKYSLFELENGRKRMLASAGELQKGNELALPSKYVNFLYLASHYEKLKGSPEDNEQKQLFVEQHKHYLDEIIEQISEFSKRVILADANLDKVLSAYNKHRDKPIREQAENIIHLFTLTNLGAPAAFKYFDTTIDRKRYTSTKEVLDATLIHQSITGLYETRIDLSQLGGDGGGSSGGSEAAAKGGLLGRDLLTKLKAQIQFSTEGPQVTWEDRPAMCLVLNLEEEYRLHEKPVPPSIDPSWLQLFPMVWAEKAGMGLANQVPPVVVELKSDASPVAVRQYPMSKEAREGIRPHIQRFLDLGILVPCQSPWNTPLLPVKKPGTNDYRPVQDLREVNKRVQDIHPTVPNPYNLLSSLPPSHTWYSVLDLKDAFFCLKLHPNSQPLFAFEWRDPEKGNTGQLTWTRLPQGFKNSPTLFNEALHRDLASFRALNPQVVMLQYVDDLLVAAPTYRDCKEGTRRLLQELSKLGYRVSAKKAQLCREEVTYLGYLLKGGKRWLTPARKATVMKIPTPTTPRQVREFLGKAGFCRLFIPGFASLAAPLYPLTRPKVPFTWTEAHQEAFGRIKEALLSAPALALPDLTKPFALYVDEKEGVARGVLTQTLGPWRRPVAYLSKKLDPVASGWPTCLKAIAAVALLLKDADKLTLGQNVLVIAPHNLESIVRQPPDRWMTNARMTHYQSLLLNERVSFAPPAILNPATLLPVESDDTPIHICSEILAEETGTRPDLRDQPLPGVPAWYTDGSSFIMDGRRQAGAAIVDNKRTVWASNLPEGTSAQKAELIALTQALRLAEGKSINIYTDSRYAFATAHVHGAIYKQRGWLTSAGKDIKNKEEILALLEAIHLPKRVAIIHCPGHQRGTDPVATGNRKADEAAKQAAQSTRILTETTKNAGKRTADGSEFEKRTADGSEFESPKKKAKVE

SEQ ID NO: 1714 - protein, 2125 aa, synthetic construct
MPAAKRVKLDGGDKKYSIGLDIGTNSVGWAVITDEYKVPSKKFKVLGNTDRHSIKKNLIGALLFDSGETAEATRLKRTARRRYTRRKNRICYLQEIFSNEMAKVDDSFFHRLEESFLVEEDKKHERHPIFGNIVDEVAYHEKYPTIYHLRKKLVDSTDKADLRLIYLALAHMIKFRGHFLIEGDLNPDNSDVDKLFIQLVQTYNQLFEENPINASGVDAKAILSARLSKSRRLENLIAQLPGEKKNGLFGNLIALSLGLTPNFKSNFDLAEDAKLQLSKDTYDDDLDNLLAQIGDQYADLFLAAKNLSDAILLSDILRVNTEITKAPLSASMIKRYDEHHQDLTLLKALVRQQLPEKYKEIFFDQSKNGYAGYIDGGASQEEFYKFIKPILEKMDGTEELLVKLNREDLLRKQRTFDNGSIPHQIHLGELHAILRRQEDFYPFLKDNREKIEKILTFRIPYYVGPLARGNSRFAWMTRKSEETITPWNFEEVVDKGASAQSFIERMTNFDKNLPNEKVLPKHSLLYEYFTVYNELTKVKYVTEGMRKPAFLSGEQKKAIVDLLFKTNRKVTVKQLKEDYFKKIECFDSVEISGVEDRFNASLGTYHDLLKIIKDKDFLDNEENEDILEDIVLTLTLFEDREMIEERLKTYAHLFDDKVMKQLKRRRYTGWGRLSRKLINGIRDKQSGKTILDFLKSDGFANRNFMQLIHDDSLTFKEDIQKAQVSGQGDSLHEHIANLAGSPAIKKGILQTVKVVDELVKVMGRHKPENIVIEMARENQTTQKGQKNSRERMKRIEEGIKELGSQILKEHPVENTQLQNEKLYLYYLQNGRDMYVDQELDINRLSDYDVDHIVPQSFLKDDSIDNKVLTRSDKARGKSDNVPSEEVVKKMKNYWRQLLNAKLITQRKFDNLTKAERGGLSELDKAGFIKRQLVETRQITKHVAQILDSRMNTKYDENDKLIREVKVITLKSKLVSDFRKDFQFYKVREINNYHHAHDAYLNAVVGTALIKKYPKLESEFVYGDYKVYDVRKMIAKSEQEIGKATAKYFFYSNIMNFFKTEITLANGEIRKRPLIETNGETGEIVWDKGRDFATVRKVLSMPQVNIVKKTEVQTGGFSKESILPKRNSDKLIARKKDWDPKKYGGFDSPTVAYSVLVVAKVEKGKSKKLKSVKELLGITIMERSSFEKNPIDFLEAKGYKEVKKDLIIKLPKYSLFELENGRKRMLASAGELQKGNELALPSKYVNFLYLASHYEKLKGSPEDNEQKQLFVEQHKHYLDEIIEQISEFSKRVILADANLDKVLSAYNKHRDKPIREQAENIIHLFTLTNLGAPAAFKYFDTTIDRKRYTSTKEVLDATLIHQSITGLYETRIDLSQLGGDGGGSSGSSGSSGGLLGRDLLTKLKAQIQFSTEGPQVTWEDRPAMCLVLNLEEEYRLHEKPVPPSIDPSWLQLFPMVWAEKAGMGLANQVPPVVVELKSDASPVAVRQYPMSKEAREGIRPHIQRFLDLGILVPCQSPWNTPLLPVKKPGTNDYRPVQDLREVNKRVQDIHPTVPNPYNLLSSLPPSHTWYSVLDLKDAFFCLKLHPNSQPLFAFEWRDPEKGNTGQLTWTRLPQGFKNSPTLFNEALHRDLASFRALNPQVVMLQYVDDLLVAAPTYRDCKEGTRRLLQELSKLGYRVSAKKAQLCREEVTYLGYLLKGGKRWLTPARKATVMKIPTPTTPRQVREFLGKAGFCRLFIPGFASLAAPLYPLTRPKVPFTWTEAHQEAFGRIKEALLSAPALALPDLTKPFALYVDEKEGVARGVLTQTLGPWRRPVAYLSKKLDPVASGWPTCLKAIAAVALLLKDADKLTLGQNVLVIAPHNLESIVRQPPDRWMTNARMTHYQSLLLNERVSFAPPAILNPATLLPVESDDTPIHICSEILAEETGTRPDLRDQPLPGVPAWYTDGSSFIMDGRRQAGAAIVDNKRTVWASNLPEGTSAQKAELIALTQALRLAEGKSINIYTDSRYAFATAHVHGAIYKQRGWLTSAGKDIKNKEEILALLEAIHLPKRVAIIHCPGHQRGTDPVATGNRKADEAAKQAAQSTRILTETTKNAGKRTADGSEFEKRTADGSEFESPKKKAKVE

SEQ ID NO: 1715 - protein, 2127 aa, synthetic construct
MPAAKRVKLDGGDKKYSIGLDIGTNSVGWAVITDEYKVPSKKFKVLGNTDRHSIKKNLIGALLFDSGETAEATRLKRTARRRYTRRKNRICYLQEIFSNEMAKVDDSFFHRLEESFLVEEDKKHERHPIFGNIVDEVAYHEKYPTIYHLRKKLVDSTDKADLRLIYLALAHMIKFRGHFLIEGDLNPDNSDVDKLFIQLVQTYNQLFEENPINASGVDAKAILSARLSKSRRLENLIAQLPGEKKNGLFGNLIALSLGLTPNFKSNFDLAEDAKLQLSKDTYDDDLDNLLAQIGDQYADLFLAAKNLSDAILLSDILRVNTEITKAPLSASMIKRYDEHHQDLTLLKALVRQQLPEKYKEIFFDQSKNGYAGYIDGGASQEEFYKFIKPILEKMDGTEELLVKLNREDLLRKQRTFDNGSIPHQIHLGELHAILRRQEDFYPFLKDNREKIEKILTFRIPYYVGPLARGNSRFAWMTRKSEETITPWNFEEVVDKGASAQSFIERMTNFDKNLPNEKVLPKHSLLYEYFTVYNELTKVKYVTEGMRKPAFLSGEQKKAIVDLLFKTNRKVTVKQLKEDYFKKIECFDSVEISGVEDRFNASLGTYHDLLKIIKDKDFLDNEENEDILEDIVLTLTLFEDREMIEERLKTYAHLFDDKVMKQLKRRRYTGWGRLSRKLINGIRDKQSGKTILDFLKSDGFANRNFMQLIHDDSLTFKEDIQKAQVSGQGDSLHEHIANLAGSPAIKKGILQTVKVVDELVKVMGRHKPENIVIEMARENQTTQKGQKNSRERMKRIEEGIKELGSQILKEHPVENTQLQNEKLYLYYLQNGRDMYVDQELDINRLSDYDVDHIVPQSFLKDDSIDNKVLTRSDKARGKSDNVPSEEVVKKMKNYWRQLLNAKLITQRKFDNLTKAERGGLSELDKAGFIKRQLVETRQITKHVAQILDSRMNTKYDENDKLIREVKVITLKSKLVSDFRKDFQFYKVREINNYHHAHDAYLNAVVGTALIKKYPKLESEFVYGDYKVYDVRKMIAKSEQEIGKATAKYFFYSNIMNFFKTEITLANGEIRKRPLIETNGETGEIVWDKGRDFATVRKVLSMPQVNIVKKTEVQTGGFSKESILPKRNSDKLIARKKDWDPKKYGGFDSPTVAYSVLVVAKVEKGKSKKLKSVKELLGITIMERSSFEKNPIDFLEAKGYKEVKKDLIIKLPKYSLFELENGRKRMLASAGELQKGNELALPSKYVNFLYLASHYEKLKGSPEDNEQKQLFVEQHKHYLDEIIEQISEFSKRVILADANLDKVLSAYNKHRDKPIREQAENIIHLFTLTNLGAPAAFKYFDTTIDRKRYTSTKEVLDATLIHQSITGLYETRIDLSQLGGDGGEAAAKGGSGSSGGLLGRDLLTKLKAQIQFSTEGPQVTWEDRPAMCLVLNLEEEYRLHEKPVPPSIDPSWLQLFPMVWAEKAGMGLANQVPPVVVELKSDASPVAVRQYPMSKEAREGIRPHIQRFLDLGILVPCQSPWNTPLLPVKKPGTNDYRPVQDLREVNKRVQDIHPTVPNPYNLLSSLPPSHTWYSVLDLKDAFFCLKLHPNSQPLFAFEWRDPEKGNTGQLTWTRLPQGFKNSPTLFNEALHRDLASFRALNPQVVMLQYVDDLLVAAPTYRDCKEGTRRLLQELSKLGYRVSAKKAQLCREEVTYLGYLLKGGKRWLTPARKATVMKIPTPTTPRQVREFLGKAGFCRLFIPGFASLAAPLYPLTRPKVPFTWTEAHQEAFGRIKEALLSAPALALPDLTKPFALYVDEKEGVARGVLTQTLGPWRRPVAYLSKKLDPVASGWPTCLKAIAAVALLLKDADKLTLGQNVLVIAPHNLESIVRQPPDRWMTNARMTHYQSLLLNERVSFAPPAILNPATLLPVESDDTPIHICSEILAEETGTRPDLRDQPLPGVPAWYTDGSSFIMDGRRQAGAAIVDNKRTVWASNLPEGTSAQKAELIALTQALRLAEGKSINIYTDSRYAFATAHVHGAIYKQRGWLTSAGKDIKNKEEILALLEAIHLPKRVAIIHCPGHQRGTDPVATGNRKADEAAKQAAQSTRILTETTKNAGKRTADGSEFEKRTADGSEFESPKKKAKVE

SEQ ID NO: 1716 - protein, 2127 aa, synthetic construct
MPAAKRVKLDGGDKKYSIGLDIGTNSVGWAVITDEYKVPSKKFKVLGNTDRHSIKKNLIGALLFDSGETAEATRLKRTARRRYTRRKNRICYLQEIFSNEMAKVDDSFFHRLEESFLVEEDKKHERHPIFGNIVDEVAYHEKYPTIYHLRKKLVDSTDKADLRLIYLALAHMIKFRGHFLIEGDLNPDNSDVDKLFIQLVQTYNQLFEENPINASGVDAKAILSARLSKSRRLENLIAQLPGEKKNGLFGNLIALSLGLTPNFKSNFDLAEDAKLQLSKDTYDDDLDNLLAQIGDQYADLFLAAKNLSDAILLSDILRVNTEITKAPLSASMIKRYDEHHQDLTLLKALVRQQLPEKYKEIFFDQSKNGYAGYIDGGASQEEFYKFIKPILEKMDGTEELLVKLNREDLLRKQRTFDNGSIPHQIHLGELHAILRRQEDFYPFLKDNREKIEKILTFRIPYYVGPLARGNSRFAWMTRKSEETITPWNFEEVVDKGASAQSFIERMTNFDKNLPNEKVLPKHSLLYEYFTVYNELTKVKYVTEGMRKPAFLSGEQKKAIVDLLFKTNRKVTVKQLKEDYFKKIECFDSVEISGVEDRFNASLGTYHDLLKIIKDKDFLDNEENEDILEDIVLTLTLFEDREMIEERLKTYAHLFDDKVMKQLKRRRYTGWGRLSRKLINGIRDKQSGKTILDFLKSDGFANRNFMQLIHDDSLTFKEDIQKAQVSGQGDSLHEHIANLAGSPAIKKGILQTVKVVDELVKVMGRHKPENIVIEMARENQTTQKGQKNSRERMKRIEEGIKELGSQILKEHPVENTQLQNEKLYLYYLQNGRDMYVDQELDINRLSDYDVDHIVPQSFLKDDSIDNKVLTRSDKARGKSDNVPSEEVVKKMKNYWRQLLNAKLITQRKFDNLTKAERGGLSELDKAGFIKRQLVETRQITKHVAQILDSRMNTKYDENDKLIREVKVITLKSKLVSDFRKDFQFYKVREINNYHHAHDAYLNAVVGTALIKKYPKLESEFVYGDYKVYDVRKMIAKSEQEIGKATAKYFFYSNIMNFFKTEITLANGEIRKRPLIETNGETGEIVWDKGRDFATVRKVLSMPQVNIVKKTEVQTGGFSKESILPKRNSDKLIARKKDWDPKKYGGFDSPTVAYSVLVVAKVEKGKSKKLKSVKELLGITIMERSSFEKNPIDFLEAKGYKEVKKDLIIKLPKYSLFELENGRKRMLASAGELQKGNELALPSKYVNFLYLASHYEKLKGSPEDNEQKQLFVEQHKHYLDEIIEQISEFSKRVILADANLDKVLSAYNKHRDKPIREQAENIIHLFTLTNLGAPAAFKYFDTTIDRKRYTSTKEVLDATLIHQSITGLYETRIDLSQLGGDGGGGSGSSEAAAKGGLLGRDLLTKLKAQIQFSTEGPQVTWEDRPAMCLVLNLEEEYRLHEKPVPPSIDPSWLQLFPMVWAEKAGMGLANQVPPVVVELKSDASPVAVRQYPMSKEAREGIRPHIQRFLDLGILVPCQSPWNTPLLPVKKPGTNDYRPVQDLREVNKRVQDIHPTVPNPYNLLSSLPPSHTWYSVLDLKDAFFCLKLHPNSQPLFAFEWRDPEKGNTGQLTWTRLPQGFKNSPTLFNEALHRDLASFRALNPQVVMLQYVDDLLVAAPTYRDCKEGTRRLLQELSKLGYRVSAKKAQLCREEVTYLGYLLKGGKRWLTPARKATVMKIPTPTTPRQVREFLGKAGFCRLFIPGFASLAAPLYPLTRPKVPFTWTEAHQEAFGRIKEALLSAPALALPDLTKPFALYVDEKEGVARGVLTQTLGPWRRPVAYLSKKLDPVASGWPTCLKAIAAVALLLKDADKLTLGQNVLVIAPHNLESIVRQPPDRWMTNARMTHYQSLLLNERVSFAPPAILNPATLLPVESDDTPIHICSEILAEETGTRPDLRDQPLPGVPAWYTDGSSFIMDGRRQAGAAIVDNKRTVWASNLPEGTSAQKAELIALTQALRLAEGKSINIYTDSRYAFATAHVHGAIYKQRGWLTSAGKDIKNKEEILALLEAIHLPKRVAIIHCPGHQRGTDPVATGNRKADEAAKQAAQSTRILTETTKNAGKRTADGSEFEKRTADGSEFESPKKKAKVE

SEQ ID NO: 1717 - protein, 2127 aa, synthetic construct
MPAAKRVKLDGGDKKYSIGLDIGTNSVGWAVITDEYKVPSKKFKVLGNTDRHSIKKNLIGALLFDSGETAEATRLKRTARRRYTRRKNRICYLQEIFSNEMAKVDDSFFHRLEESFLVEEDKKHERHPIFGNIVDEVAYHEKYPTIYHLRKKLVDSTDKADLRLIYLALAHMIKFRGHFLIEGDLNPDNSDVDKLFIQLVQTYNQLFEENPINASGVDAKAILSARLSKSRRLENLIAQLPGEKKNGLFGNLIALSLGLTPNFKSNFDLAEDAKLQLSKDTYDDDLDNLLAQIGDQYADLFLAAKNLSDAILLSDILRVNTEITKAPLSASMIKRYDEHHQDLTLLKALVRQQLPEKYKEIFFDQSKNGYAGYIDGGASQEEFYKFIKPILEKMDGTEELLVKLNREDLLRKQRTFDNGSIPHQIHLGELHAILRRQEDFYPFLKDNREKIEKILTFRIPYYVGPLARGNSRFAWMTRKSEETITPWNFEEVVDKGASAQSFIERMTNFDKNLPNEKVLPKHSLLYEYFTVYNELTKVKYVTEGMRKPAFLSGEQKKAIVDLLFKTNRKVTVKQLKEDYFKKIECFDSVEISGVEDRFNASLGTYHDLLKIIKDKDFLDNEENEDILEDIVLTLTLFEDREMIEERLKTYAHLFDDKVMKQLKRRRYTGWGRLSRKLINGIRDKQSGKTILDFLKSDGFANRNFMQLIHDDSLTFKEDIQKAQVSGQGDSLHEHIANLAGSPAIKKGILQTVKVVDELVKVMGRHKPENIVIEMARENQTTQKGQKNSRERMKRIEEGIKELGSQILKEHPVENTQLQNEKLYLYYLQNGRDMYVDQELDINRLSDYDVDHIVPQSFLKDDSIDNKVLTRSDKARGKSDNVPSEEVVKKMKNYWRQLLNAKLITQRKFDNLTKAERGGLSELDKAGFIKRQLVETRQITKHVAQILDSRMNTKYDENDKLIREVKVITLKSKLVSDFRKDFQFYKVREINNYHHAHDAYLNAVVGTALIKKYPKLESEFVYGDYKVYDVRKMIAKSEQEIGKATAKYFFYSNIMNFFKTEITLANGEIRKRPLIETNGETGEIVWDKGRDFATVRKVLSMPQVNIVKKTEVQTGGFSKESILPKRNSDKLIARKKDWDPKKYGGFDSPTVAYSVLVVAKVEKGKSKKLKSVKELLGITIMERSSFEKNPIDFLEAKGYKEVKKDLIIKLPKYSLFELENGRKRMLASAGELQKGNELALPSKYVNFLYLASHYEKLKGSPEDNEQKQLFVEQHKHYLDEIIEQISEFSKRVILADANLDKVLSAYNKHRDKPIREQAENIIHLFTLTNLGAPAAFKYFDTTIDRKRYTSTKEVLDATLIHQSITGLYETRIDLSQLGGDGGGGSEAAAKGGGGGLLGRDLLTKLKAQIQFSTEGPQVTWEDRPAMCLVLNLEEEYRLHEKPVPPSIDPSWLQLFPMVWAEKAGMGLANQVPPVVVELKSDASPVAVRQYPMSKEAREGIRPHIQRFLDLGILVPCQSPWNTPLLPVKKPGTNDYRPVQDLREVNKRVQDIHPTVPNPYNLLSSLPPSHTWYSVLDLKDAFFCLKLHPNSQPLFAFEWRDPEKGNTGQLTWTRLPQGFKNSPTLFNEALHRDLASFRALNPQVVMLQYVDDLLVAAPTYRDCKEGTRRLLQELSKLGYRVSAKKAQLCREEVTYLGYLLKGGKRWLTPARKATVMKIPTPTTPRQVREFLGKAGFCRLFIPGFASLAAPLYPLTRPKVPFTWTEAHQEAFGRIKEALLSAPALALPDLTKPFALYVDEKEGVARGVLTQTLGPWRRPVAYLSKKLDPVASGWPTCLKAIAAVALLLKDADKLTLGQNVLVIAPHNLESIVRQPPDRWMTNARMTHYQSLLLNERVSFAPPAILNPATLLPVESDDTPIHICSEILAEETGTRPDLRDQPLPGVPAWYTDGSSFIMDGRRQAGAAIVDNKRTVWASNLPEGTSAQKAELIALTQALRLAEGKSINIYTDSRYAFATAHVHGAIYKQRGWLTSAGKDIKNKEEILALLEAIHLPKRVAIIHCPGHQRGTDPVATGNRKADEAAKQAAQSTRILTETTKNAGKRTADGSEFEKRTADGSEFESPKKKAKVE

SEQ ID NO: 1718 - protein, 2127 aa, synthetic construct
MPAAKRVKLDGGDKKYSIGLDIGTNSVGWAVITDEYKVPSKKFKVLGNTDRHSIKKNLIGALLFDSGETAEATRLKRTARRRYTRRKNRICYLQEIFSNEMAKVDDSFFHRLEESFLVEEDKKHERHPIFGNIVDEVAYHEKYPTIYHLRKKLVDSTDKADLRLIYLALAHMIKFRGHFLIEGDLNPDNSDVDKLFIQLVQTYNQLFEENPINASGVDAKAILSARLSKSRRLENLIAQLPGEKKNGLFGNLIALSLGLTPNFKSNFDLAEDAKLQLSKDTYDDDLDNLLAQIGDQYADLFLAAKNLSDAILLSDILRVNTEITKAPLSASMIKRYDEHHQDLTLLKALVRQQLPEKYKEIFFDQSKNGYAGYIDGGASQEEFYKFIKPILEKMDGTEELLVKLNREDLLRKQRTFDNGSIPHQIHLGELHAILRRQEDFYPFLKDNREKIEKILTFRIPYYVGPLARGNSRFAWMTRKSEETITPWNFEEVVDKGASAQSFIERMTNFDKNLPNEKVLPKHSLLYEYFTVYNELTKVKYVTEGMRKPAFLSGEQKKAIVDLLFKTNRKVTVKQLKEDYFKKIECFDSVEISGVEDRFNASLGTYHDLLKIIKDKDFLDNEENEDILEDIVLTLTLFEDREMIEERLKTYAHLFDDKVMKQLKRRRYTGWGRLSRKLINGIRDKQSGKTILDFLKSDGFANRNFMQLIHDDSLTFKEDIQKAQVSGQGDSLHEHIANLAGSPAIKKGILQTVKVVDELVKVMGRHKPENIVIEMARENQTTQKGQKNSRERMKRIEEGIKELGSQILKEHPVENTQLQNEKLYLYYLQNGRDMYVDQELDINRLSDYDVDHIVPQSFLKDDSIDNKVLTRSDKARGKSDNVPSEEVVKKMKNYWRQLLNAKLITQRKFDNLTKAERGGLSELDKAGFIKRQLVETRQITKHVAQILDSRMNTKYDENDKLIREVKVITLKSKLVSDFRKDFQFYKVREINNYHHAHDAYLNAVVGTALIKKYPKLESEFVYGDYKVYDVRKMIAKSEQEIGKATAKYFFYSNIMNFFKTEITLANGEIRKRPLIETNGETGEIVWDKGRDFATVRKVLSMPQVNIVKKTEVQTGGFSKESILPKRNSDKLIARKKDWDPKKYGGFDSPTVAYSVLVVAKVEKGKSKKLKSVKELLGITIMERSSFEKNPIDFLEAKGYKEVKKDLIIKLPKYSLFELENGRKRMLASAGELQKGNELALPSKYVNFLYLASHYEKLKGSPEDNEQKQLFVEQHKHYLDEIIEQISEFSKRVILADANLDKVLSAYNKHRDKPIREQAENIIHLFTLTNLGAPAAFKYFDTTIDRKRYTSTKEVLDATLIHQSITGLYETRIDLSQLGGDGGPAPGGSEAAAKGGLLGRDLLTKLKAQIQFSTEGPQVTWEDRPAMCLVLNLEEEYRLHEKPVPPSIDPSWLQLFPMVWAEKAGMGLANQVPPVVVELKSDASPVAVRQYPMSKEAREGIRPHIQRFLDLGILVPCQSPWNTPLLPVKKPGTNDYRPVQDLREVNKRVQDIHPTVPNPYNLLSSLPPSHTWYSVLDLKDAFFCLKLHPNSQPLFAFEWRDPEKGNTGQLTWTRLPQGFKNSPTLFNEALHRDLASFRALNPQVVMLQYVDDLLVAAPTYRDCKEGTRRLLQELSKLGYRVSAKKAQLCREEVTYLGYLLKGGKRWLTPARKATVMKIPTPTTPRQVREFLGKAGFCRLFIPGFASLAAPLYPLTRPKVPFTWTEAHQEAFGRIKEALLSAPALALPDLTKPFALYVDEKEGVARGVLTQTLGPWRRPVAYLSKKLDPVASGWPTCLKAIAAVALLLKDADKLTLGQNVLVIAPHNLESIVRQPPDRWMTNARMTHYQSLLLNERVSFAPPAILNPATLLPVESDDTPIHICSEILAEETGTRPDLRDQPLPGVPAWYTDGSSFIMDGRRQAGAAIVDNKRTVWASNLPEGTSAQKAELIALTQALRLAEGKSINIYTDSRYAFATAHVHGAIYKQRGWLTSAGKDIKNKEEILALLEAIHLPKRVAIIHCPGHQRGTDPVATGNRKADEAAKQAAQSTRILTETTKNAGKRTADGSEFEKRTADGSEFESPKKKAKVE

SEQ ID NO: 1719 - protein, 2125 aa, synthetic construct
MPAAKRVKLDGGDKKYSIGLDIGTNSVGWAVITDEYKVPSKKFKVLGNTDRHSIKKNLIGALLFDSGETAEATRLKRTARRRYTRRKNRICYLQEIFSNEMAKVDDSFFHRLEESFLVEEDKKHERHPIFGNIVDEVAYHEKYPTIYHLRKKLVDSTDKADLRLIYLALAHMIKFRGHFLIEGDLNPDNSDVDKLFIQLVQTYNQLFEENPINASGVDAKAILSARLSKSRRLENLIAQLPGEKKNGLFGNLIALSLGLTPNFKSNFDLAEDAKLQLSKDTYDDDLDNLLAQIGDQYADLFLAAKNLSDAILLSDILRVNTEITKAPLSASMIKRYDEHHQDLTLLKALVRQQLPEKYKEIFFDQSKNGYAGYIDGGASQEEFYKFIKPILEKMDGTEELLVKLNREDLLRKQRTFDNGSIPHQIHLGELHAILRRQEDFYPFLKDNREKIEKILTFRIPYYVGPLARGNSRFAWMTRKSEETITPWNFEEVVDKGASAQSFIERMTNFDKNLPNEKVLPKHSLLYEYFTVYNELTKVKYVTEGMRKPAFLSGEQKKAIVDLLFKTNRKVTVKQLKEDYFKKIECFDSVEISGVEDRFNASLGTYHDLLKIIKDKDFLDNEENEDILEDIVLTLTLFEDREMIEERLKTYAHLFDDKVMKQLKRRRYTGWGRLSRKLINGIRDKQSGKTILDFLKSDGFANRNFMQLIHDDSLTFKEDIQKAQVSGQGDSLHEHIANLAGSPAIKKGILQTVKVVDELVKVMGRHKPENIVIEMARENQTTQKGQKNSRERMKRIEEGIKELGSQILKEHPVENTQLQNEKLYLYYLQNGRDMYVDQELDINRLSDYDVDHIVPQSFLKDDSIDNKVLTRSDKARGKSDNVPSEEVVKKMKNYWRQLLNAKLITQRKFDNLTKAERGGLSELDKAGFIKRQLVETRQITKHVAQILDSRMNTKYDENDKLIREVKVITLKSKLVSDFRKDFQFYKVREINNYHHAHDAYLNAVVGTALIKKYPKLESEFVYGDYKVYDVRKMIAKSEQEIGKATAKYFFYSNIMNFFKTEITLANGEIRKRPLIETNGETGEIVWDKGRDFATVRKVLSMPQVNIVKKTEVQTGGFSKESILPKRNSDKLIARKKDWDPKKYGGFDSPTVAYSVLVVAKVEKGKSKKLKSVKELLGITIMERSSFEKNPIDFLEAKGYKEVKKDLIIKLPKYSLFELENGRKRMLASAGELQKGNELALPSKYVNFLYLASHYEKLKGSPEDNEQKQLFVEQHKHYLDEIIEQISEFSKRVILADANLDKVLSAYNKHRDKPIREQAENIIHLFTLTNLGAPAAFKYFDTTIDRKRYTSTKEVLDATLIHQSITGLYETRIDLSQLGGDGGPAPGSSGGGGGLLGRDLLTKLKAQIQFSTEGPQVTWEDRPAMCLVLNLEEEYRLHEKPVPPSIDPSWLQLFPMVWAEKAGMGLANQVPPVVVELKSDASPVAVRQYPMSKEAREGIRPHIQRFLDLGILVPCQSPWNTPLLPVKKPGTNDYRPVQDLREVNKRVQDIHPTVPNPYNLLSSLPPSHTWYSVLDLKDAFFCLKLHPNSQPLFAFEWRDPEKGNTGQLTWTRLPQGFKNSPTLFNEALHRDLASFRALNPQVVMLQYVDDLLVAAPTYRDCKEGTRRLLQELSKLGYRVSAKKAQLCREEVTYLGYLLKGGKRWLTPARKATVMKIPTPTTPRQVREFLGKAGFCRLFIPGFASLAAPLYPLTRPKVPFTWTEAHQEAFGRIKEALLSAPALALPDLTKPFALYVDEKEGVARGVLTQTLGPWRRPVAYLSKKLDPVASGWPTCLKAIAAVALLLKDADKLTLGQNVLVIAPHNLESIVRQPPDRWMTNARMTHYQSLLLNERVSFAPPAILNPATLLPVESDDTPIHICSEILAEETGTRPDLRDQPLPGVPAWYTDGSSFIMDGRRQAGAAIVDNKRTVWASNLPEGTSAQKAELIALTQALRLAEGKSINIYTDSRYAFATAHVHGAIYKQRGWLTSAGKDIKNKEEILALLEAIHLPKRVAIIHCPGHQRGTDPVATGNRKADEAAKQAAQSTRILTETTKNAGKRTADGSEFEKRTADGSEFESPKKKAKVE

SEQ ID NO: 1720 - protein, 2126 aa, synthetic construct
MPAAKRVKLDGGDKKYSIGLDIGTNSVGWAVITDEYKVPSKKFKVLGNTDRHSIKKNLIGALLFDSGETAEATRLKRTARRRYTRRKNRICYLQEIFSNEMAKVDDSFFHRLEESFLVEEDKKHERHPIFGNIVDEVAYHEKYPTIYHLRKKLVDSTDKADLRLIYLALAHMIKFRGHFLIEGDLNPDNSDVDKLFIQLVQTYNQLFEENPINASGVDAKAILSARLSKSRRLENLIAQLPGEKKNGLFGNLIALSLGLTPNFKSNFDLAEDAKLQLSKDTYDDDLDNLLAQIGDQYADLFLAAKNLSDAILLSDILRVNTEITKAPLSASMIKRYDEHHQDLTLLKALVRQQLPEKYKEIFFDQSKNGYAGYIDGGASQEEFYKFIKPILEKMDGTEELLVKLNREDLLRKQRTFDNGSIPHQIHLGELHAILRRQEDFYPFLKDNREKIEKILTFRIPYYVGPLARGNSRFAWMTRKSEETITPWNFEEVVDKGASAQSFIERMTNFDKNLPNEKVLPKHSLLYEYFTVYNELTKVKYVTEGMRKPAFLSGEQKKAIVDLLFKTNRKVTVKQLKEDYFKKIECFDSVEISGVEDRFNASLGTYHDLLKIIKDKDFLDNEENEDILEDIVLTLTLFEDREMIEERLKTYAHLFDDKVMKQLKRRRYTGWGRLSRKLINGIRDKQSGKTILDFLKSDGFANRNFMQLIHDDSLTFKEDIQKAQVSGQGDSLHEHIANLAGSPAIKKGILQTVKVVDELVKVMGRHKPENIVIEMARENQTTQKGQKNSRERMKRIEEGIKELGSQILKEHPVENTQLQNEKLYLYYLQNGRDMYVDQELDINRLSDYDVDHIVPQSFLKDDSIDNKVLTRSDKARGKSDNVPSEEVVKKMKNYWRQLLNAKLITQRKFDNLTKAERGGLSELDKAGFIKRQLVETRQITKHVAQILDSRMNTKYDENDKLIREVKVITLKSKLVSDFRKDFQFYKVREINNYHHAHDAYLNAVVGTALIKKYPKLESEFVYGDYKVYDVRKMIAKSEQEIGKATAKYFFYSNIMNFFKTEITLANGEIRKRPLIETNGETGEIVWDKGRDFATVRKVLSMPQVNIVKKTEVQTGGFSKESILPKRNSDKLIARKKDWDPKKYGGFDSPTVAYSVLVVAKVEKGKSKKLKSVKELLGITIMERSSFEKNPIDFLEAKGYKEVKKDLIIKLPKYSLFELENGRKRMLASAGELQKGNELALPSKYVNFLYLASHYEKLKGSPEDNEQKQLFVEQHKHYLDEIIEQISEFSKRVILADANLDKVLSAYNKHRDKPIREQAENIIHLFTLTNLGAPAAFKYFDTTIDRKRYTSTKEVLDATLIHQSITGLYETRIDLSQLGGDGGGGGGSGGGGSGGLLGRDLLTKLKAQIQFSTEGPQVTWEDRPAMCLVLNLEEEYRLHEKPVPPSIDPSWLQLFPMVWAEKAGMGLANQVPPVVVELKSDASPVAVRQYPMSKEAREGIRPHIQRFLDLGILVPCQSPWNTPLLPVKKPGTNDYRPVQDLREVNKRVQDIHPTVPNPYNLLSSLPPSHTWYSVLDLKDAFFCLKLHPNSQPLFAFEWRDPEKGNTGQLTWTRLPQGFKNSPTLFNEALHRDLASFRALNPQVVMLQYVDDLLVAAPTYRDCKEGTRRLLQELSKLGYRVSAKKAQLCREEVTYLGYLLKGGKRWLTPARKATVMKIPTPTTPRQVREFLGKAGFCRLFIPGFASLAAPLYPLTRPKVPFTWTEAHQEAFGRIKEALLSAPALALPDLTKPFALYVDEKEGVARGVLTQTLGPWRRPVAYLSKKLDPVASGWPTCLKAIAAVALLLKDADKLTLGQNVLVIAPHNLESIVRQPPDRWMTNARMTHYQSLLLNERVSFAPPAILNPATLLPVESDDTPIHICSEILAEETGTRPDLRDQPLPGVPAWYTDGSSFIMDGRRQAGAAIVDNKRTVWASNLPEGTSAQKAELIALTQALRLAEGKSINIYTDSRYAFATAHVHGAIYKQRGWLTSAGKDIKNKEEILALLEAIHLPKRVAIIHCPGHQRGTDPVATGNRKADEAAKQAAQSTRILTETTKNAGKRTADGSEFEKRTADGSEFESPKKKAKVE

SEQ ID NO: 1721 - protein, 2127 aa, synthetic construct
MPAAKRVKLDGGDKKYSIGLDIGTNSVGWAVITDEYKVPSKKFKVLGNTDRHSIKKNLIGALLFDSGETAEATRLKRTARRRYTRRKNRICYLQEIFSNEMAKVDDSFFHRLEESFLVEEDKKHERHPIFGNIVDEVAYHEKYPTIYHLRKKLVDSTDKADLRLIYLALAHMIKFRGHFLIEGDLNPDNSDVDKLFIQLVQTYNQLFEENPINASGVDAKAILSARLSKSRRLENLIAQLPGEKKNGLFGNLIALSLGLTPNFKSNFDLAEDAKLQLSKDTYDDDLDNLLAQIGDQYADLFLAAKNLSDAILLSDILRVNTEITKAPLSASMIKRYDEHHQDLTLLKALVRQQLPEKYKEIFFDQSKNGYAGYIDGGASQEEFYKFIKPILEKMDGTEELLVKLNREDLLRKQRTFDNGSIPHQIHLGELHAILRRQEDFYPFLKDNREKIEKILTFRIPYYVGPLARGNSRFAWMTRKSEETITPWNFEEVVDKGASAQSFIERMTNFDKNLPNEKVLPKHSLLYEYFTVYNELTKVKYVTEGMRKPAFLSGEQKKAIVDLLFKTNRKVTVKQLKEDYFKKIECFDSVEISGVEDRFNASLGTYHDLLKIIKDKDFLDNEENEDILEDIVLTLTLFEDREMIEERLKTYAHLFDDKVMKQLKRRRYTGWGRLSRKLINGIRDKQSGKTILDFLKSDGFANRNFMQLIHDDSLTFKEDIQKAQVSGQGDSLHEHIANLAGSPAIKKGILQTVKVVDELVKVMGRHKPENIVIEMARENQTTQKGQKNSRERMKRIEEGIKELGSQILKEHPVENTQLQNEKLYLYYLQNGRDMYVDQELDINRLSDYDVDHIVPQSFLKDDSIDNKVLTRSDKARGKSDNVPSEEVVKKMKNYWRQLLNAKLITQRKFDNLTKAERGGLSELDKAGFIKRQLVETRQITKHVAQILDSRMNTKYDENDKLIREVKVITLKSKLVSDFRKDFQFYKVREINNYHHAHDAYLNAVVGTALIKKYPKLESEFVYGDYKVYDVRKMIAKSEQEIGKATAKYFFYSNIMNFFKTEITLANGEIRKRPLIETNGETGEIVWDKGRDFATVRKVLSMPQVNIVKKTEVQTGGFSKESILPKRNSDKLIARKKDWDPKKYGGFDSPTVAYSVLVVAKVEKGKSKKLKSVKELLGITIMERSSFEKNPIDFLEAKGYKEVKKDLIIKLPKYSLFELENGRKRMLASAGELQKGNELALPSKYVNFLYLASHYEKLKGSPEDNEQKQLFVEQHKHYLDEIIEQISEFSKRVILADANLDKVLSAYNKHRDKPIREQAENIIHLFTLTNLGAPAAFKYFDTTIDRKRYTSTKEVLDATLIHQSITGLYETRIDLSQLGGDGGGSSPAPEAAAKGGLLGRDLLTKLKAQIQFSTEGPQVTWEDRPAMCLVLNLEEEYRLHEKPVPPSIDPSWLQLFPMVWAEKAGMGLANQVPPVVVELKSDASPVAVRQYPMSKEAREGIRPHIQRFLDLGILVPCQSPWNTPLLPVKKPGTNDYRPVQDLREVNKRVQDIHPTVPNPYNLLSSLPPSHTWYSVLDLKDAFFCLKLHPNSQPLFAFEWRDPEKGNTGQLTWTRLPQGFKNSPTLFNEALHRDLASFRALNPQVVMLQYVDDLLVAAPTYRDCKEGTRRLLQELSKLGYRVSAKKAQLCREEVTYLGYLLKGGKRWLTPARKATVMKIPTPTTPRQVREFLGKAGFCRLFIPGFASLAAPLYPLTRPKVPFTWTEAHQEAFGRIKEALLSAPALALPDLTKPFALYVDEKEGVARGVLTQTLGPWRRPVAYLSKKLDPVASGWPTCLKAIAAVALLLKDADKLTLGQNVLVIAPHNLESIVRQPPDRWMTNARMTHYQSLLLNERVSFAPPAILNPATLLPVESDDTPIHICSEILAEETGTRPDLRDQPLPGVPAWYTDGSSFIMDGRRQAGAAIVDNKRTVWASNLPEGTSAQKAELIALTQALRLAEGKSINIYTDSRYAFATAHVHGAIYKQRGWLTSAGKDIKNKEEILALLEAIHLPKRVAIIHCPGHQRGTDPVATGNRKADEAAKQAAQSTRILTETTKNAGKRTADGSEFEKRTADGSEFESPKKKAKVE

SEQ ID NO: 1722 - protein, 2127 aa, synthetic construct
MPAAKRVKLDGGDKKYSIGLDIGTNSVGWAVITDEYKVPSKKFKVLGNTDRHSIKKNLIGALLFDSGETAEATRLKRTARRRYTRRKNRICYLQEIFSNEMAKVDDSFFHRLEESFLVEEDKKHERHPIFGNIVDEVAYHEKYPTIYHLRKKLVDSTDKADLRLIYLALAHMIKFRGHFLIEGDLNPDNSDVDKLFIQLVQTYNQLFEENPINASGVDAKAILSARLSKSRRLENLIAQLPGEKKNGLFGNLIALSLGLTPNFKSNFDLAEDAKLQLSKDTYDDDLDNLLAQIGDQYADLFLAAKNLSDAILLSDILRVNTEITKAPLSASMIKRYDEHHQDLTLLKALVRQQLPEKYKEIFFDQSKNGYAGYIDGGASQEEFYKFIKPILEKMDGTEELLVKLNREDLLRKQRTFDNGSIPHQIHLGELHAILRRQEDFYPFLKDNREKIEKILTFRIPYYVGPLARGNSRFAWMTRKSEETITPWNFEEVVDKGASAQSFIERMTNFDKNLPNEKVLPKHSLLYEYFTVYNELTKVKYVTEGMRKPAFLSGEQKKAIVDLLFKTNRKVTVKQLKEDYFKKIECFDSVEISGVEDRFNASLGTYHDLLKIIKDKDFLDNEENEDILEDIVLTLTLFEDREMIEERLKTYAHLFDDKVMKQLKRRRYTGWGRLSRKLINGIRDKQSGKTILDFLKSDGFANRNFMQLIHDDSLTFKEDIQKAQVSGQGDSLHEHIANLAGSPAIKKGILQTVKVVDELVKVMGRHKPENIVIEMARENQTTQKGQKNSRERMKRIEEGIKELGSQILKEHPVENTQLQNEKLYLYYLQNGRDMYVDQELDINRLSDYDVDHIVPQSFLKDDSIDNKVLTRSDKARGKSDNVPSEEVVKKMKNYWRQLLNAKLITQRKFDNLTKAERGGLSELDKAGFIKRQLVETRQITKHVAQILDSRMNTKYDENDKLIREVKVITLKSKLVSDFRKDFQFYKVREINNYHHAHDAYLNAVVGTALIKKYPKLESEFVYGDYKVYDVRKMIAKSEQEIGKATAKYFFYSNIMNFFKTEITLANGEIRKRPLIETNGETGEIVWDKGRDFATVRKVLSMPQVNIVKKTEVQTGGFSKESILPKRNSDKLIARKKDWDPKKYGGFDSPTVAYSVLVVAKVEKGKSKKLKSVKELLGITIMERSSFEKNPIDFLEAKGYKEVKKDLIIKLPKYSLFELENGRKRMLASAGELQKGNELALPSKYVNFLYLASHYEKLKGSPEDNEQKQLFVEQHKHYLDEIIEQISEFSKRVILADANLDKVLSAYNKHRDKPIREQAENIIHLFTLTNLGAPAAFKYFDTTIDRKRYTSTKEVLDATLIHQSITGLYETRIDLSQLGGDGGGGSEAAAKGSSGGLLGRDLLTKLKAQIQFSTEGPQVTWEDRPAMCLVLNLEEEYRLHEKPVPPSIDPSWLQLFPMVWAEKAGMGLANQVPPVVVELKSDASPVAVRQYPMSKEAREGIRPHIQRFLDLGILVPCQSPWNTPLLPVKKPGTNDYRPVQDLREVNKRVQDIHPTVPNPYNLLSSLPPSHTWYSVLDLKDAFFCLKLHPNSQPLFAFEWRDPEKGNTGQLTWTRLPQGFKNSPTLFNEALHRDLASFRALNPQVVMLQYVDDLLVAAPTYRDCKEGTRRLLQELSKLGYRVSAKKAQLCREEVTYLGYLLKGGKRWLTPARKATVMKIPTPTTPRQVREFLGKAGFCRLFIPGFASLAAPLYPLTRPKVPFTWTEAHQEAFGRIKEALLSAPALALPDLTKPFALYVDEKEGVARGVLTQTLGPWRRPVAYLSKKLDPVASGWPTCLKAIAAVALLLKDADKLTLGQNVLVIAPHNLESIVRQPPDRWMTNARMTHYQSLLLNERVSFAPPAILNPATLLPVESDDTPIHICSEILAEETGTRPDLRDQPLPGVPAWYTDGSSFIMDGRRQAGAAIVDNKRTVWASNLPEGTSAQKAELIALTQALRLAEGKSINIYTDSRYAFATAHVHGAIYKQRGWLTSAGKDIKNKEEILALLEAIHLPKRVAIIHCPGHQRGTDPVATGNRKADEAAKQAAQSTRILTETTKNAGKRTADGSEFEKRTADGSEFESPKKKAKVE

SEQ ID NO: 1723 - protein, 2127 aa, synthetic construct
MPAAKRVKLDGGDKKYSIGLDIGTNSVGWAVITDEYKVPSKKFKVLGNTDRHSIKKNLIGALLFDSGETAEATRLKRTARRRYTRRKNRICYLQEIFSNEMAKVDDSFFHRLEESFLVEEDKKHERHPIFGNIVDEVAYHEKYPTIYHLRKKLVDSTDKADLRLIYLALAHMIKFRGHFLIEGDLNPDNSDVDKLFIQLVQTYNQLFEENPINASGVDAKAILSARLSKSRRLENLIAQLPGEKKNGLFGNLIALSLGLTPNFKSNFDLAEDAKLQLSKDTYDDDLDNLLAQIGDQYADLFLAAKNLSDAILLSDILRVNTEITKAPLSASMIKRYDEHHQDLTLLKALVRQQLPEKYKEIFFDQSKNGYAGYIDGGASQEEFYKFIKPILEKMDGTEELLVKLNREDLLRKQRTFDNGSIPHQIHLGELHAILRRQEDFYPFLKDNREKIEKILTFRIPYYVGPLARGNSRFAWMTRKSEETITPWNFEEVVDKGASAQSFIERMTNFDKNLPNEKVLPKHSLLYEYFTVYNELTKVKYVTEGMRKPAFLSGEQKKAIVDLLFKTNRKVTVKQLKEDYFKKIECFDSVEISGVEDRFNASLGTYHDLLKIIKDKDFLDNEENEDILEDIVLTLTLFEDREMIEERLKTYAHLFDDKVMKQLKRRRYTGWGRLSRKLINGIRDKQSGKTILDFLKSDGFANRNFMQLIHDDSLTFKEDIQKAQVSGQGDSLHEHIANLAGSPAIKKGILQTVKVVDELVKVMGRHKPENIVIEMARENQTTQKGQKNSRERMKRIEEGIKELGSQILKEHPVENTQLQNEKLYLYYLQNGRDMYVDQELDINRLSDYDVDHIVPQSFLKDDSIDNKVLTRSDKARGKSDNVPSEEVVKKMKNYWRQLLNAKLITQRKFDNLTKAERGGLSELDKAGFIKRQLVETRQITKHVAQILDSRMNTKYDENDKLIREVKVITLKSKLVSDFRKDFQFYKVREINNYHHAHDAYLNAVVGTALIKKYPKLESEFVYGDYKVYDVRKMIAKSEQEIGKATAKYFFYSNIMNFFKTEITLANGEIRKRPLIETNGETGEIVWDKGRDFATVRKVLSMPQVNIVKKTEVQTGGFSKESILPKRNSDKLIARKKDWDPKKYGGFDSPTVAYSVLVVAKVEKGKSKKLKSVKELLGITIMERSSFEKNPIDFLEAKGYKEVKKDLIIKLPKYSLFELENGRKRMLASAGELQKGNELALPSKYVNFLYLASHYEKLKGSPEDNEQKQLFVEQHKHYLDEIIEQISEFSKRVILADANLDKVLSAYNKHRDKPIREQAENIIHLFTLTNLGAPAAFKYFDTTIDRKRYTSTKEVLDATLIHQSITGLYETRIDLSQLGGDGGEAAAKPAPGGSGGLLGRDLLTKLKAQIQFSTEGPQVTWEDRPAMCLVLNLEEEYRLHEKPVPPSIDPSWLQLFPMVWAEKAGMGLANQVPPVVVELKSDASPVAVRQYPMSKEAREGIRPHIQRFLDLGILVPCQSPWNTPLLPVKKPGTNDYRPVQDLREVNKRVQDIHPTVPNPYNLLSSLPPSHTWYSVLDLKDAFFCLKLHPNSQPLFAFEWRDPEKGNTGQLTWTRLPQGFKNSPTLFNEALHRDLASFRALNPQVVMLQYVDDLLVAAPTYRDCKEGTRRLLQELSKLGYRVSAKKAQLCREEVTYLGYLLKGGKRWLTPARKATVMKIPTPTTPRQVREFLGKAGFCRLFIPGFASLAAPLYPLTRPKVPFTWTEAHQEAFGRIKEALLSAPALALPDLTKPFALYVDEKEGVARGVLTQTLGPWRRPVAYLSKKLDPVASGWPTCLKAIAAVALLLKDADKLTLGQNVLVIAPHNLESIVRQPPDRWMTNARMTHYQSLLLNERVSFAPPAILNPATLLPVESDDTPIHICSEILAEETGTRPDLRDQPLPGVPAWYTDGSSFIMDGRRQAGAAIVDNKRTVWASNLPEGTSAQKAELIALTQALRLAEGKSINIYTDSRYAFATAHVHGAIYKQRGWLTSAGKDIKNKEEILALLEAIHLPKRVAIIHCPGHQRGTDPVATGNRKADEAAKQAAQSTRILTETTKNAGKRTADGSEFEKRTADGSEFESPKKKAKVE

SEQ ID NO: 1724 - protein, 2125 aa, synthetic construct
MPAAKRVKLDGGDKKYSIGLDIGTNSVGWAVITDEYKVPSKKFKVLGNTDRHSIKKNLIGALLFDSGETAEATRLKRTARRRYTRRKNRICYLQEIFSNEMAKVDDSFFHRLEESFLVEEDKKHERHPIFGNIVDEVAYHEKYPTIYHLRKKLVDSTDKADLRLIYLALAHMIKFRGHFLIEGDLNPDNSDVDKLFIQLVQTYNQLFEENPINASGVDAKAILSARLSKSRRLENLIAQLPGEKKNGLFGNLIALSLGLTPNFKSNFDLAEDAKLQLSKDTYDDDLDNLLAQIGDQYADLFLAAKNLSDAILLSDILRVNTEITKAPLSASMIKRYDEHHQDLTLLKALVRQQLPEKYKEIFFDQSKNGYAGYIDGGASQEEFYKFIKPILEKMDGTEELLVKLNREDLLRKQRTFDNGSIPHQIHLGELHAILRRQEDFYPFLKDNREKIEKILTFRIPYYVGPLARGNSRFAWMTRKSEETITPWNFEEVVDKGASAQSFIERMTNFDKNLPNEKVLPKHSLLYEYFTVYNELTKVKYVTEGMRKPAFLSGEQKKAIVDLLFKTNRKVTVKQLKEDYFKKIECFDSVEISGVEDRFNASLGTYHDLLKIIKDKDFLDNEENEDILEDIVLTLTLFEDREMIEERLKTYAHLFDDKVMKQLKRRRYTGWGRLSRKLINGIRDKQSGKTILDFLKSDGFANRNFMQLIHDDSLTFKEDIQKAQVSGQGDSLHEHIANLAGSPAIKKGILQTVKVVDELVKVMGRHKPENIVIEMARENQTTQKGQKNSRERMKRIEEGIKELGSQILKEHPVENTQLQNEKLYLYYLQNGRDMYVDQELDINRLSDYDVDHIVPQSFLKDDSIDNKVLTRSDKARGKSDNVPSEEVVKKMKNYWRQLLNAKLITQRKFDNLTKAERGGLSELDKAGFIKRQLVETRQITKHVAQILDSRMNTKYDENDKLIREVKVITLKSKLVSDFRKDFQFYKVREINNYHHAHDAYLNAVVGTALIKKYPKLESEFVYGDYKVYDVRKMIAKSEQEIGKATAKYFFYSNIMNFFKTEITLANGEIRKRPLIETNGETGEIVWDKGRDFATVRKVLSMPQVNIVKKTEVQTGGFSKESILPKRNSDKLIARKKDWDPKKYGGFDSPTVAYSVLVVAKVEKGKSKKLKSVKELLGITIMERSSFEKNPIDFLEAKGYKEVKKDLIIKLPKYSLFELENGRKRMLASAGELQKGNELALPSKYVNFLYLASHYEKLKGSPEDNEQKQLFVEQHKHYLDEIIEQISEFSKRVILADANLDKVLSAYNKHRDKPIREQAENIIHLFTLTNLGAPAAFKYFDTTIDRKRYTSTKEVLDATLIHQSITGLYETRIDLSQLGGDGGGGSGSSGGGGGLLGRDLLTKLKAQIQFSTEGPQVTWEDRPAMCLVLNLEEEYRLHEKPVPPSIDPSWLQLFPMVWAEKAGMGLANQVPPVVVELKSDASPVAVRQYPMSKEAREGIRPHIQRFLDLGILVPCQSPWNTPLLPVKKPGTNDYRPVQDLREVNKRVQDIHPTVPNPYNLLSSLPPSHTWYSVLDLKDAFFCLKLHPNSQPLFAFEWRDPEKGNTGQLTWTRLPQGFKNSPTLFNEALHRDLASFRALNPQVVMLQYVDDLLVAAPTYRDCKEGTRRLLQELSKLGYRVSAKKAQLCREEVTYLGYLLKGGKRWLTPARKATVMKIPTPTTPRQVREFLGKAGFCRLFIPGFASLAAPLYPLTRPKVPFTWTEAHQEAFGRIKEALLSAPALALPDLTKPFALYVDEKEGVARGVLTQTLGPWRRPVAYLSKKLDPVASGWPTCLKAIAAVALLLKDADKLTLGQNVLVIAPHNLESIVRQPPDRWMTNARMTHYQSLLLNERVSFAPPAILNPATLLPVESDDTPIHICSEILAEETGTRPDLRDQPLPGVPAWYTDGSSFIMDGRRQAGAAIVDNKRTVWASNLPEGTSAQKAELIALTQALRLAEGKSINIYTDSRYAFATAHVHGAIYKQRGWLTSAGKDIKNKEEILALLEAIHLPKRVAIIHCPGHQRGTDPVATGNRKADEAAKQAAQSTRILTETTKNAGKRTADGSEFEKRTADGSEFESPKKKAKVE

SEQ ID NO: 1725 - protein, 2127 aa, synthetic construct
MPAAKRVKLDGGDKKYSIGLDIGTNSVGWAVITDEYKVPSKKFKVLGNTDRHSIKKNLIGALLFDSGETAEATRLKRTARRRYTRRKNRICYLQEIFSNEMAKVDDSFFHRLEESFLVEEDKKHERHPIFGNIVDEVAYHEKYPTIYHLRKKLVDSTDKADLRLIYLALAHMIKFRGHFLIEGDLNPDNSDVDKLFIQLVQTYNQLFEENPINASGVDAKAILSARLSKSRRLENLIAQLPGEKKNGLFGNLIALSLGLTPNFKSNFDLAEDAKLQLSKDTYDDDLDNLLAQIGDQYADLFLAAKNLSDAILLSDILRVNTEITKAPLSASMIKRYDEHHQDLTLLKALVRQQLPEKYKEIFFDQSKNGYAGYIDGGASQEEFYKFIKPILEKMDGTEELLVKLNREDLLRKQRTFDNGSIPHQIHLGELHAILRRQEDFYPFLKDNREKIEKILTFRIPYYVGPLARGNSRFAWMTRKSEETITPWNFEEVVDKGASAQSFIERMTNFDKNLPNEKVLPKHSLLYEYFTVYNELTKVKYVTEGMRKPAFLSGEQKKAIVDLLFKTNRKVTVKQLKEDYFKKIECFDSVEISGVEDRFNASLGTYHDLLKIIKDKDFLDNEENEDILEDIVLTLTLFEDREMIEERLKTYAHLFDDKVMKQLKRRRYTGWGRLSRKLINGIRDKQSGKTILDFLKSDGFANRNFMQLIHDDSLTFKEDIQKAQVSGQGDSLHEHIANLAGSPAIKKGILQTVKVVDELVKVMGRHKPENIVIEMARENQTTQKGQKNSRERMKRIEEGIKELGSQILKEHPVENTQLQNEKLYLYYLQNGRDMYVDQELDINRLSDYDVDHIVPQSFLKDDSIDNKVLTRSDKARGKSDNVPSEEVVKKMKNYWRQLLNAKLITQRKFDNLTKAERGGLSELDKAGFIKRQLVETRQITKHVAQILDSRMNTKYDENDKLIREVKVITLKSKLVSDFRKDFQFYKVREINNYHHAHDAYLNAVVGTALIKKYPKLESEFVYGDYKVYDVRKMIAKSEQEIGKATAKYFFYSNIMNFFKTEITLANGEIRKRPLIETNGETGEIVWDKGRDFATVRKVLSMPQVNIVKKTEVQTGGFSKESILPKRNSDKLIARKKDWDPKKYGGFDSPTVAYSVLVVAKVEKGKSKKLKSVKELLGITIMERSSFEKNPIDFLEAKGYKEVKKDLIIKLPKYSLFELENGRKRMLASAGELQKGNELALPSKYVNFLYLASHYEKLKGSPEDNEQKQLFVEQHKHYLDEIIEQISEFSKRVILADANLDKVLSAYNKHRDKPIREQAENIIHLFTLTNLGAPAAFKYFDTTIDRKRYTSTKEVLDATLIHQSITGLYETRIDLSQLGGDGGGSSEAAAKGGSGGLLGRDLLTKLKAQIQFSTEGPQVTWEDRPAMCLVLNLEEEYRLHEKPVPPSIDPSWLQLFPMVWAEKAGMGLANQVPPVVVELKSDASPVAVRQYPMSKEAREGIRPHIQRFLDLGILVPCQSPWNTPLLPVKKPGTNDYRPVQDLREVNKRVQDIHPTVPNPYNLLSSLPPSHTWYSVLDLKDAFFCLKLHPNSQPLFAFEWRDPEKGNTGQLTWTRLPQGFKNSPTLFNEALHRDLASFRALNPQVVMLQYVDDLLVAAPTYRDCKEGTRRLLQELSKLGYRVSAKKAQLCREEVTYLGYLLKGGKRWLTPARKATVMKIPTPTTPRQVREFLGKAGFCRLFIPGFASLAAPLYPLTRPKVPFTWTEAHQEAFGRIKEALLSAPALALPDLTKPFALYVDEKEGVARGVLTQTLGPWRRPVAYLSKKLDPVASGWPTCLKAIAAVALLLKDADKLTLGQNVLVIAPHNLESIVRQPPDRWMTNARMTHYQSLLLNERVSFAPPAILNPATLLPVESDDTPIHICSEILAEETGTRPDLRDQPLPGVPAWYTDGSSFIMDGRRQAGAAIVDNKRTVWASNLPEGTSAQKAELIALTQALRLAEGKSINIYTDSRYAFATAHVHGAIYKQRGWLTSAGKDIKNKEEILALLEAIHLPKRVAIIHCPGHQRGTDPVATGNRKADEAAKQAAQSTRILTETTKNAGKRTADGSEFEKRTADGSEFESPKKKAKVE

SEQ ID NO: 1726 - protein, 2127 aa, synthetic construct
MPAAKRVKLDGGDKKYSIGLDIGTNSVGWAVITDEYKVPSKKFKVLGNTDRHSIKKNLIGALLFDSGETAEATRLKRTARRRYTRRKNRICYLQEIFSNEMAKVDDSFFHRLEESFLVEEDKKHERHPIFGNIVDEVAYHEKYPTIYHLRKKLVDSTDKADLRLIYLALAHMIKFRGHFLIEGDLNPDNSDVDKLFIQLVQTYNQLFEENPINASGVDAKAILSARLSKSRRLENLIAQLPGEKKNGLFGNLIALSLGLTPNFKSNFDLAEDAKLQLSKDTYDDDLDNLLAQIGDQYADLFLAAKNLSDAILLSDILRVNTEITKAPLSASMIKRYDEHHQDLTLLKALVRQQLPEKYKEIFFDQSKNGYAGYIDGGASQEEFYKFIKPILEKMDGTEELLVKLNREDLLRKQRTFDNGSIPHQIHLGELHAILRRQEDFYPFLKDNREKIEKILTFRIPYYVGPLARGNSRFAWMTRKSEETITPWNFEEVVDKGASAQSFIERMTNFDKNLPNEKVLPKHSLLYEYFTVYNELTKVKYVTEGMRKPAFLSGEQKKAIVDLLFKTNRKVTVKQLKEDYFKKIECFDSVEISGVEDRFNASLGTYHDLLKIIKDKDFLDNEENEDILEDIVLTLTLFEDREMIEERLKTYAHLFDDKVMKQLKRRRYTGWGRLSRKLINGIRDKQSGKTILDFLKSDGFANRNFMQLIHDDSLTFKEDIQKAQVSGQGDSLHEHIANLAGSPAIKKGILQTVKVVDELVKVMGRHKPENIVIEMARENQTTQKGQKNSRERMKRIEEGIKELGSQILKEHPVENTQLQNEKLYLYYLQNGRDMYVDQELDINRLSDYDVDHIVPQSFLKDDSIDNKVLTRSDKARGKSDNVPSEEVVKKMKNYWRQLLNAKLITQRKFDNLTKAERGGLSELDKAGFIKRQLVETRQITKHVAQILDSRMNTKYDENDKLIREVKVITLKSKLVSDFRKDFQFYKVREINNYHHAHDAYLNAVVGTALIKKYPKLESEFVYGDYKVYDVRKMIAKSEQEIGKATAKYFFYSNIMNFFKTEITLANGEIRKRPLIETNGETGEIVWDKGRDFATVRKVLSMPQVNIVKKTEVQTGGFSKESILPKRNSDKLIARKKDWDPKKYGGFDSPTVAYSVLVVAKVEKGKSKKLKSVKELLGITIMERSSFEKNPIDFLEAKGYKEVKKDLIIKLPKYSLFELENGRKRMLASAGELQKGNELALPSKYVNFLYLASHYEKLKGSPEDNEQKQLFVEQHKHYLDEIIEQISEFSKRVILADANLDKVLSAYNKHRDKPIREQAENIIHLFTLTNLGAPAAFKYFDTTIDRKRYTSTKEVLDATLIHQSITGLYETRIDLSQLGGDGGGGGGSSEAAAKGGLLGRDLLTKLKAQIQFSTEGPQVTWEDRPAMCLVLNLEEEYRLHEKPVPPSIDPSWLQLFPMVWAEKAGMGLANQVPPVVVELKSDASPVAVRQYPMSKEAREGIRPHIQRFLDLGILVPCQSPWNTPLLPVKKPGTNDYRPVQDLREVNKRVQDIHPTVPNPYNLLSSLPPSHTWYSVLDLKDAFFCLKLHPNSQPLFAFEWRDPEKGNTGQLTWTRLPQGFKNSPTLFNEALHRDLASFRALNPQVVMLQYVDDLLVAAPTYRDCKEGTRRLLQELSKLGYRVSAKKAQLCREEVTYLGYLLKGGKRWLTPARKATVMKIPTPTTPRQVREFLGKAGFCRLFIPGFASLAAPLYPLTRPKVPFTWTEAHQEAFGRIKEALLSAPALALPDLTKPFALYVDEKEGVARGVLTQTLGPWRRPVAYLSKKLDPVASGWPTCLKAIAAVALLLKDADKLTLGQNVLVIAPHNLESIVRQPPDRWMTNARMTHYQSLLLNERVSFAPPAILNPATLLPVESDDTPIHICSEILAEETGTRPDLRDQPLPGVPAWYTDGSSFIMDGRRQAGAAIVDNKRTVWASNLPEGTSAQKAELIALTQALRLAEGKSINIYTDSRYAFATAHVHGAIYKQRGWLTSAGKDIKNKEEILALLEAIHLPKRVAIIHCPGHQRGTDPVATGNRKADEAAKQAAQSTRILTETTKNAGKRTADGSEFEKRTADGSEFESPKKKAKVE

SEQ ID NO: 1727 - protein, 2121 aa, synthetic construct
MPAAKRVKLDGGDKKYSIGLDIGTNSVGWAVITDEYKVPSKKFKVLGNTDRHSIKKNLIGALLFDSGETAEATRLKRTARRRYTRRKNRICYLQEIFSNEMAKVDDSFFHRLEESFLVEEDKKHERHPIFGNIVDEVAYHEKYPTIYHLRKKLVDSTDKADLRLIYLALAHMIKFRGHFLIEGDLNPDNSDVDKLFIQLVQTYNQLFEENPINASGVDAKAILSARLSKSRRLENLIAQLPGEKKNGLFGNLIALSLGLTPNFKSNFDLAEDAKLQLSKDTYDDDLDNLLAQIGDQYADLFLAAKNLSDAILLSDILRVNTEITKAPLSASMIKRYDEHHQDLTLLKALVRQQLPEKYKEIFFDQSKNGYAGYIDGGASQEEFYKFIKPILEKMDGTEELLVKLNREDLLRKQRTFDNGSIPHQIHLGELHAILRRQEDFYPFLKDNREKIEKILTFRIPYYVGPLARGNSRFAWMTRKSEETITPWNFEEVVDKGASAQSFIERMTNFDKNLPNEKVLPKHSLLYEYFTVYNELTKVKYVTEGMRKPAFLSGEQKKAIVDLLFKTNRKVTVKQLKEDYFKKIECFDSVEISGVEDRFNASLGTYHDLLKIIKDKDFLDNEENEDILEDIVLTLTLFEDREMIEERLKTYAHLFDDKVMKQLKRRRYTGWGRLSRKLINGIRDKQSGKTILDFLKSDGFANRNFMQLIHDDSLTFKEDIQKAQVSGQGDSLHEHIANLAGSPAIKKGILQTVKVVDELVKVMGRHKPENIVIEMARENQTTQKGQKNSRERMKRIEEGIKELGSQILKEHPVENTQLQNEKLYLYYLQNGRDMYVDQELDINRLSDYDVDHIVPQSFLKDDSIDNKVLTRSDKARGKSDNVPSEEVVKKMKNYWRQLLNAKLITQRKFDNLTKAERGGLSELDKAGFIKRQLVETRQITKHVAQILDSRMNTKYDENDKLIREVKVITLKSKLVSDFRKDFQFYKVREINNYHHAHDAYLNAVVGTALIKKYPKLESEFVYGDYKVYDVRKMIAKSEQEIGKATAKYFFYSNIMNFFKTEITLANGEIRKRPLIETNGETGEIVWDKGRDFATVRKVLSMPQVNIVKKTEVQTGGFSKESILPKRNSDKLIARKKDWDPKKYGGFDSPTVAYSVLVVAKVEKGKSKKLKSVKELLGITIMERSSFEKNPIDFLEAKGYKEVKKDLIIKLPKYSLFELENGRKRMLASAGELQKGNELALPSKYVNFLYLASHYEKLKGSPEDNEQKQLFVEQHKHYLDEIIEQISEFSKRVILADANLDKVLSAYNKHRDKPIREQAENIIHLFTLTNLGAPAAFKYFDTTIDRKRYTSTKEVLDATLIHQSITGLYETRIDLSQLGGDGGPAPAPGGLLGRDLLTKLKAQIQFSTEGPQVTWEDRPAMCLVLNLEEEYRLHEKPVPPSIDPSWLQLFPMVWAEKAGMGLANQVPPVVVELKSDASPVAVRQYPMSKEAREGIRPHIQRFLDLGILVPCQSPWNTPLLPVKKPGTNDYRPVQDLREVNKRVQDIHPTVPNPYNLLSSLPPSHTWYSVLDLKDAFFCLKLHPNSQPLFAFEWRDPEKGNTGQLTWTRLPQGFKNSPTLFNEALHRDLASFRALNPQVVMLQYVDDLLVAAPTYRDCKEGTRRLLQELSKLGYRVSAKKAQLCREEVTYLGYLLKGGKRWLTPARKATVMKIPTPTTPRQVREFLGKAGFCRLFIPGFASLAAPLYPLTRPKVPFTWTEAHQEAFGRIKEALLSAPALALPDLTKPFALYVDEKEGVARGVLTQTLGPWRRPVAYLSKKLDPVASGWPTCLKAIAAVALLLKDADKLTLGQNVLVIAPHNLESIVRQPPDRWMTNARMTHYQSLLLNERVSFAPPAILNPATLLPVESDDTPIHICSEILAEETGTRPDLRDQPLPGVPAWYTDGSSFIMDGRRQAGAAIVDNKRTVWASNLPEGTSAQKAELIALTQALRLAEGKSINIYTDSRYAFATAHVHGAIYKQRGWLTSAGKDIKNKEEILALLEAIHLPKRVAIIHCPGHQRGTDPVATGNRKADEAAKQAAQSTRILTETTKNAGKRTADGSEFEKRTADGSEFESPKKKAKVE

SEQ ID NO: 1728 - protein, 2122 aa, synthetic construct
MPAAKRVKLDGGDKKYSIGLDIGTNSVGWAVITDEYKVPSKKFKVLGNTDRHSIKKNLIGALLFDSGETAEATRLKRTARRRYTRRKNRICYLQEIFSNEMAKVDDSFFHRLEESFLVEEDKKHERHPIFGNIVDEVAYHEKYPTIYHLRKKLVDSTDKADLRLIYLALAHMIKFRGHFLIEGDLNPDNSDVDKLFIQLVQTYNQLFEENPINASGVDAKAILSARLSKSRRLENLIAQLPGEKKNGLFGNLIALSLGLTPNFKSNFDLAEDAKLQLSKDTYDDDLDNLLAQIGDQYADLFLAAKNLSDAILLSDILRVNTEITKAPLSASMIKRYDEHHQDLTLLKALVRQQLPEKYKEIFFDQSKNGYAGYIDGGASQEEFYKFIKPILEKMDGTEELLVKLNREDLLRKQRTFDNGSIPHQIHLGELHAILRRQEDFYPFLKDNREKIEKILTFRIPYYVGPLARGNSRFAWMTRKSEETITPWNFEEVVDKGASAQSFIERMTNFDKNLPNEKVLPKHSLLYEYFTVYNELTKVKYVTEGMRKPAFLSGEQKKAIVDLLFKTNRKVTVKQLKEDYFKKIECFDSVEISGVEDRFNASLGTYHDLLKIIKDKDFLDNEENEDILEDIVLTLTLFEDREMIEERLKTYAHLFDDKVMKQLKRRRYTGWGRLSRKLINGIRDKQSGKTILDFLKSDGFANRNFMQLIHDDSLTFKEDIQKAQVSGQGDSLHEHIANLAGSPAIKKGILQTVKVVDELVKVMGRHKPENIVIEMARENQTTQKGQKNSRERMKRIEEGIKELGSQILKEHPVENTQLQNEKLYLYYLQNGRDMYVDQELDINRLSDYDVDHIVPQSFLKDDSIDNKVLTRSDKARGKSDNVPSEEVVKKMKNYWRQLLNAKLITQRKFDNLTKAERGGLSELDKAGFIKRQLVETRQITKHVAQILDSRMNTKYDENDKLIREVKVITLKSKLVSDFRKDFQFYKVREINNYHHAHDAYLNAVVGTALIKKYPKLESEFVYGDYKVYDVRKMIAKSEQEIGKATAKYFFYSNIMNFFKTEITLANGEIRKRPLIETNGETGEIVWDKGRDFATVRKVLSMPQVNIVKKTEVQTGGFSKESILPKRNSDKLIARKKDWDPKKYGGFDSPTVAYSVLVVAKVEKGKSKKLKSVKELLGITIMERSSFEKNPIDFLEAKGYKEVKKDLIIKLPKYSLFELENGRKRMLASAGELQKGNELALPSKYVNFLYLASHYEKLKGSPEDNEQKQLFVEQHKHYLDEIIEQISEFSKRVILADANLDKVLSAYNKHRDKPIREQAENIIHLFTLTNLGAPAAFKYFDTTIDRKRYTSTKEVLDATLIHQSITGLYETRIDLSQLGGDGGPAPGGSGGLLGRDLLTKLKAQIQFSTEGPQVTWEDRPAMCLVLNLEEEYRLHEKPVPPSIDPSWLQLFPMVWAEKAGMGLANQVPPVVVELKSDASPVAVRQYPMSKEAREGIRPHIQRFLDLGILVPCQSPWNTPLLPVKKPGTNDYRPVQDLREVNKRVQDIHPTVPNPYNLLSSLPPSHTWYSVLDLKDAFFCLKLHPNSQPLFAFEWRDPEKGNTGQLTWTRLPQGFKNSPTLFNEALHRDLASFRALNPQVVMLQYVDDLLVAAPTYRDCKEGTRRLLQELSKLGYRVSAKKAQLCREEVTYLGYLLKGGKRWLTPARKATVMKIPTPTTPRQVREFLGKAGFCRLFIPGFASLAAPLYPLTRPKVPFTWTEAHQEAFGRIKEALLSAPALALPDLTKPFALYVDEKEGVARGVLTQTLGPWRRPVAYLSKKLDPVASGWPTCLKAIAAVALLLKDADKLTLGQNVLVIAPHNLESIVRQPPDRWMTNARMTHYQSLLLNERVSFAPPAILNPATLLPVESDDTPIHICSEILAEETGTRPDLRDQPLPGVPAWYTDGSSFIMDGRRQAGAAIVDNKRTVWASNLPEGTSAQKAELIALTQALRLAEGKSINIYTDSRYAFATAHVHGAIYKQRGWLTSAGKDIKNKEEILALLEAIHLPKRVAIIHCPGHQRGTDPVATGNRKADEAAKQAAQSTRILTETTKNAGKRTADGSEFEKRTADGSEFESPKKKAKVE

SEQ ID NO: 1729 - protein, 2131 aa, synthetic construct
MPAAKRVKLDGGDKKYSIGLDIGTNSVGWAVITDEYKVPSKKFKVLGNTDRHSIKKNLIGALLFDSGETAEATRLKRTARRRYTRRKNRICYLQEIFSNEMAKVDDSFFHRLEESFLVEEDKKHERHPIFGNIVDEVAYHEKYPTIYHLRKKLVDSTDKADLRLIYLALAHMIKFRGHFLIEGDLNPDNSDVDKLFIQLVQTYNQLFEENPINASGVDAKAILSARLSKSRRLENLIAQLPGEKKNGLFGNLIALSLGLTPNFKSNFDLAEDAKLQLSKDTYDDDLDNLLAQIGDQYADLFLAAKNLSDAILLSDILRVNTEITKAPLSASMIKRYDEHHQDLTLLKALVRQQLPEKYKEIFFDQSKNGYAGYIDGGASQEEFYKFIKPILEKMDGTEELLVKLNREDLLRKQRTFDNGSIPHQIHLGELHAILRRQEDFYPFLKDNREKIEKILTFRIPYYVGPLARGNSRFAWMTRKSEETITPWNFEEVVDKGASAQSFIERMTNFDKNLPNEKVLPKHSLLYEYFTVYNELTKVKYVTEGMRKPAFLSGEQKKAIVDLLFKTNRKVTVKQLKEDYFKKIECFDSVEISGVEDRFNASLGTYHDLLKIIKDKDFLDNEENEDILEDIVLTLTLFEDREMIEERLKTYAHLFDDKVMKQLKRRRYTGWGRLSRKLINGIRDKQSGKTILDFLKSDGFANRNFMQLIHDDSLTFKEDIQKAQVSGQGDSLHEHIANLAGSPAIKKGILQTVKVVDELVKVMGRHKPENIVIEMARENQTTQKGQKNSRERMKRIEEGIKELGSQILKEHPVENTQLQNEKLYLYYLQNGRDMYVDQELDINRLSDYDVDHIVPQSFLKDDSIDNKVLTRSDKARGKSDNVPSEEVVKKMKNYWRQLLNAKLITQRKFDNLTKAERGGLSELDKAGFIKRQLVETRQITKHVAQILDSRMNTKYDENDKLIREVKVITLKSKLVSDFRKDFQFYKVREINNYHHAHDAYLNAVVGTALIKKYPKLESEFVYGDYKVYDVRKMIAKSEQEIGKATAKYFFYSNIMNFFKTEITLANGEIRKRPLIETNGETGEIVWDKGRDFATVRKVLSMPQVNIVKKTEVQTGGFSKESILPKRNSDKLIARKKDWDPKKYGGFDSPTVAYSVLVVAKVEKGKSKKLKSVKELLGITIMERSSFEKNPIDFLEAKGYKEVKKDLIIKLPKYSLFELENGRKRMLASAGELQKGNELALPSKYVNFLYLASHYEKLKGSPEDNEQKQLFVEQHKHYLDEIIEQISEFSKRVILADANLDKVLSAYNKHRDKPIREQAENIIHLFTLTNLGAPAAFKYFDTTIDRKRYTSTKEVLDATLIHQSITGLYETRIDLSQLGGDGGGGGGSGGGGSGGGGSGGLLGRDLLTKLKAQIQFSTEGPQVTWEDRPAMCLVLNLEEEYRLHEKPVPPSIDPSWLQLFPMVWAEKAGMGLANQVPPVVVELKSDASPVAVRQYPMSKEAREGIRPHIQRFLDLGILVPCQSPWNTPLLPVKKPGTNDYRPVQDLREVNKRVQDIHPTVPNPYNLLSSLPPSHTWYSVLDLKDAFFCLKLHPNSQPLFAFEWRDPEKGNTGQLTWTRLPQGFKNSPTLFNEALHRDLASFRALNPQVVMLQYVDDLLVAAPTYRDCKEGTRRLLQELSKLGYRVSAKKAQLCREEVTYLGYLLKGGKRWLTPARKATVMKIPTPTTPRQVREFLGKAGFCRLFIPGFASLAAPLYPLTRPKVPFTWTEAHQEAFGRIKEALLSAPALALPDLTKPFALYVDEKEGVARGVLTQTLGPWRRPVAYLSKKLDPVASGWPTCLKAIAAVALLLKDADKLTLGQNVLVIAPHNLESIVRQPPDRWMTNARMTHYQSLLLNERVSFAPPAILNPATLLPVESDDTPIHICSEILAEETGTRPDLRDQPLPGVPAWYTDGSSFIMDGRRQAGAAIVDNKRTVWASNLPEGTSAQKAELIALTQALRLAEGKSINIYTDSRYAFATAHVHGAIYKQRGWLTSAGKDIKNKEEILALLEAIHLPKRVAIIHCPGHQRGTDPVATGNRKADEAAKQAAQSTRILTETTKNAGKRTADGSEFEKRTADGSEFESPKKKAKVE

SEQ ID NO: 1730 - protein, 2125 aa, synthetic construct
MPAAKRVKLDGGDKKYSIGLDIGTNSVGWAVITDEYKVPSKKFKVLGNTDRHSIKKNLIGALLFDSGETAEATRLKRTARRRYTRRKNRICYLQEIFSNEMAKVDDSFFHRLEESFLVEEDKKHERHPIFGNIVDEVAYHEKYPTIYHLRKKLVDSTDKADLRLIYLALAHMIKFRGHFLIEGDLNPDNSDVDKLFIQLVQTYNQLFEENPINASGVDAKAILSARLSKSRRLENLIAQLPGEKKNGLFGNLIALSLGLTPNFKSNFDLAEDAKLQLSKDTYDDDLDNLLAQIGDQYADLFLAAKNLSDAILLSDILRVNTEITKAPLSASMIKRYDEHHQDLTLLKALVRQQLPEKYKEIFFDQSKNGYAGYIDGGASQEEFYKFIKPILEKMDGTEELLVKLNREDLLRKQRTFDNGSIPHQIHLGELHAILRRQEDFYPFLKDNREKIEKILTFRIPYYVGPLARGNSRFAWMTRKSEETITPWNFEEVVDKGASAQSFIERMTNFDKNLPNEKVLPKHSLLYEYFTVYNELTKVKYVTEGMRKPAFLSGEQKKAIVDLLFKTNRKVTVKQLKEDYFKKIECFDSVEISGVEDRFNASLGTYHDLLKIIKDKDFLDNEENEDILEDIVLTLTLFEDREMIEERLKTYAHLFDDKVMKQLKRRRYTGWGRLSRKLINGIRDKQSGKTILDFLKSDGFANRNFMQLIHDDSLTFKEDIQKAQVSGQGDSLHEHIANLAGSPAIKKGILQTVKVVDELVKVMGRHKPENIVIEMARENQTTQKGQKNSRERMKRIEEGIKELGSQILKEHPVENTQLQNEKLYLYYLQNGRDMYVDQELDINRLSDYDVDHIVPQSFLKDDSIDNKVLTRSDKARGKSDNVPSEEVVKKMKNYWRQLLNAKLITQRKFDNLTKAERGGLSELDKAGFIKRQLVETRQITKHVAQILDSRMNTKYDENDKLIREVKVITLKSKLVSDFRKDFQFYKVREINNYHHAHDAYLNAVVGTALIKKYPKLESEFVYGDYKVYDVRKMIAKSEQEIGKATAKYFFYSNIMNFFKTEITLANGEIRKRPLIETNGETGEIVWDKGRDFATVRKVLSMPQVNIVKKTEVQTGGFSKESILPKRNSDKLIARKKDWDPKKYGGFDSPTVAYSVLVVAKVEKGKSKKLKSVKELLGITIMERSSFEKNPIDFLEAKGYKEVKKDLIIKLPKYSLFELENGRKRMLASAGELQKGNELALPSKYVNFLYLASHYEKLKGSPEDNEQKQLFVEQHKHYLDEIIEQISEFSKRVILADANLDKVLSAYNKHRDKPIREQAENIIHLFTLTNLGAPAAFKYFDTTIDRKRYTSTKEVLDATLIHQSITGLYETRIDLSQLGGDGGGGSPAPGGGGGLLGRDLLTKLKAQIQFSTEGPQVTWEDRPAMCLVLNLEEEYRLHEKPVPPSIDPSWLQLFPMVWAEKAGMGLANQVPPVVVELKSDASPVAVRQYPMSKEAREGIRPHIQRFLDLGILVPCQSPWNTPLLPVKKPGTNDYRPVQDLREVNKRVQDIHPTVPNPYNLLSSLPPSHTWYSVLDLKDAFFCLKLHPNSQPLFAFEWRDPEKGNTGQLTWTRLPQGFKNSPTLFNEALHRDLASFRALNPQVVMLQYVDDLLVAAPTYRDCKEGTRRLLQELSKLGYRVSAKKAQLCREEVTYLGYLLKGGKRWLTPARKATVMKIPTPTTPRQVREFLGKAGFCRLFIPGFASLAAPLYPLTRPKVPFTWTEAHQEAFGRIKEALLSAPALALPDLTKPFALYVDEKEGVARGVLTQTLGPWRRPVAYLSKKLDPVASGWPTCLKAIAAVALLLKDADKLTLGQNVLVIAPHNLESIVRQPPDRWMTNARMTHYQSLLLNERVSFAPPAILNPATLLPVESDDTPIHICSEILAEETGTRPDLRDQPLPGVPAWYTDGSSFIMDGRRQAGAAIVDNKRTVWASNLPEGTSAQKAELIALTQALRLAEGKSINIYTDSRYAFATAHVHGAIYKQRGWLTSAGKDIKNKEEILALLEAIHLPKRVAIIHCPGHQRGTDPVATGNRKADEAAKQAAQSTRILTETTKNAGKRTADGSEFEKRTADGSEFESPKKKAKVE

SEQ ID NO: 1731 - protein, 2122 aa, synthetic construct
MPAAKRVKLDGGDKKYSIGLDIGTNSVGWAVITDEYKVPSKKFKVLGNTDRHSIKKNLIGALLFDSGETAEATRLKRTARRRYTRRKNRICYLQEIFSNEMAKVDDSFFHRLEESFLVEEDKKHERHPIFGNIVDEVAYHEKYPTIYHLRKKLVDSTDKADLRLIYLALAHMIKFRGHFLIEGDLNPDNSDVDKLFIQLVQTYNQLFEENPINASGVDAKAILSARLSKSRRLENLIAQLPGEKKNGLFGNLIALSLGLTPNFKSNFDLAEDAKLQLSKDTYDDDLDNLLAQIGDQYADLFLAAKNLSDAILLSDILRVNTEITKAPLSASMIKRYDEHHQDLTLLKALVRQQLPEKYKEIFFDQSKNGYAGYIDGGASQEEFYKFIKPILEKMDGTEELLVKLNREDLLRKQRTFDNGSIPHQIHLGELHAILRRQEDFYPFLKDNREKIEKILTFRIPYYVGPLARGNSRFAWMTRKSEETITPWNFEEVVDKGASAQSFIERMTNFDKNLPNEKVLPKHSLLYEYFTVYNELTKVKYVTEGMRKPAFLSGEQKKAIVDLLFKTNRKVTVKQLKEDYFKKIECFDSVEISGVEDRFNASLGTYHDLLKIIKDKDFLDNEENEDILEDIVLTLTLFEDREMIEERLKTYAHLFDDKVMKQLKRRRYTGWGRLSRKLINGIRDKQSGKTILDFLKSDGFANRNFMQLIHDDSLTFKEDIQKAQVSGQGDSLHEHIANLAGSPAIKKGILQTVKVVDELVKVMGRHKPENIVIEMARENQTTQKGQKNSRERMKRIEEGIKELGSQILKEHPVENTQLQNEKLYLYYLQNGRDMYVDQELDINRLSDYDVDHIVPQSFLKDDSIDNKVLTRSDKARGKSDNVPSEEVVKKMKNYWRQLLNAKLITQRKFDNLTKAERGGLSELDKAGFIKRQLVETRQITKHVAQILDSRMNTKYDENDKLIREVKVITLKSKLVSDFRKDFQFYKVREINNYHHAHDAYLNAVVGTALIKKYPKLESEFVYGDYKVYDVRKMIAKSEQEIGKATAKYFFYSNIMNFFKTEITLANGEIRKRPLIETNGETGEIVWDKGRDFATVRKVLSMPQVNIVKKTEVQTGGFSKESILPKRNSDKLIARKKDWDPKKYGGFDSPTVAYSVLVVAKVEKGKSKKLKSVKELLGITIMERSSFEKNPIDFLEAKGYKEVKKDLIIKLPKYSLFELENGRKRMLASAGELQKGNELALPSKYVNFLYLASHYEKLKGSPEDNEQKQLFVEQHKHYLDEIIEQISEFSKRVILADANLDKVLSAYNKHRDKPIREQAENIIHLFTLTNLGAPAAFKYFDTTIDRKRYTSTKEVLDATLIHQSITGLYETRIDLSQLGGDGGGSSPAPGGLLGRDLLTKLKAQIQFSTEGPQVTWEDRPAMCLVLNLEEEYRLHEKPVPPSIDPSWLQLFPMVWAEKAGMGLANQVPPVVVELKSDASPVAVRQYPMSKEAREGIRPHIQRFLDLGILVPCQSPWNTPLLPVKKPGTNDYRPVQDLREVNKRVQDIHPTVPNPYNLLSSLPPSHTWYSVLDLKDAFFCLKLHPNSQPLFAFEWRDPEKGNTGQLTWTRLPQGFKNSPTLFNEALHRDLASFRALNPQVVMLQYVDDLLVAAPTYRDCKEGTRRLLQELSKLGYRVSAKKAQLCREEVTYLGYLLKGGKRWLTPARKATVMKIPTPTTPRQVREFLGKAGFCRLFIPGFASLAAPLYPLTRPKVPFTWTEAHQEAFGRIKEALLSAPALALPDLTKPFALYVDEKEGVARGVLTQTLGPWRRPVAYLSKKLDPVASGWPTCLKAIAAVALLLKDADKLTLGQNVLVIAPHNLESIVRQPPDRWMTNARMTHYQSLLLNERVSFAPPAILNPATLLPVESDDTPIHICSEILAEETGTRPDLRDQPLPGVPAWYTDGSSFIMDGRRQAGAAIVDNKRTVWASNLPEGTSAQKAELIALTQALRLAEGKSINIYTDSRYAFATAHVHGAIYKQRGWLTSAGKDIKNKEEILALLEAIHLPKRVAIIHCPGHQRGTDPVATGNRKADEAAKQAAQSTRILTETTKNAGKRTADGSEFEKRTADGSEFESPKKKAKVE

SEQ ID NO: 1732 - protein, 2125 aa, synthetic construct
MPAAKRVKLDGGDKKYSIGLDIGTNSVGWAVITDEYKVPSKKFKVLGNTDRHSIKKNLIGALLFDSGETAEATRLKRTARRRYTRRKNRICYLQEIFSNEMAKVDDSFFHRLEESFLVEEDKKHERHPIFGNIVDEVAYHEKYPTIYHLRKKLVDSTDKADLRLIYLALAHMIKFRGHFLIEGDLNPDNSDVDKLFIQLVQTYNQLFEENPINASGVDAKAILSARLSKSRRLENLIAQLPGEKKNGLFGNLIALSLGLTPNFKSNFDLAEDAKLQLSKDTYDDDLDNLLAQIGDQYADLFLAAKNLSDAILLSDILRVNTEITKAPLSASMIKRYDEHHQDLTLLKALVRQQLPEKYKEIFFDQSKNGYAGYIDGGASQEEFYKFIKPILEKMDGTEELLVKLNREDLLRKQRTFDNGSIPHQIHLGELHAILRRQEDFYPFLKDNREKIEKILTFRIPYYVGPLARGNSRFAWMTRKSEETITPWNFEEVVDKGASAQSFIERMTNFDKNLPNEKVLPKHSLLYEYFTVYNELTKVKYVTEGMRKPAFLSGEQKKAIVDLLFKTNRKVTVKQLKEDYFKKIECFDSVEISGVEDRFNASLGTYHDLLKIIKDKDFLDNEENEDILEDIVLTLTLFEDREMIEERLKTYAHLFDDKVMKQLKRRRYTGWGRLSRKLINGIRDKQSGKTILDFLKSDGFANRNFMQLIHDDSLTFKEDIQKAQVSGQGDSLHEHIANLAGSPAIKKGILQTVKVVDELVKVMGRHKPENIVIEMARENQTTQKGQKNSRERMKRIEEGIKELGSQILKEHPVENTQLQNEKLYLYYLQNGRDMYVDQELDINRLSDYDVDHIVPQSFLKDDSIDNKVLTRSDKARGKSDNVPSEEVVKKMKNYWRQLLNAKLITQRKFDNLTKAERGGLSELDKAGFIKRQLVETRQITKHVAQILDSRMNTKYDENDKLIREVKVITLKSKLVSDFRKDFQFYKVREINNYHHAHDAYLNAVVGTALIKKYPKLESEFVYGDYKVYDVRKMIAKSEQEIGKATAKYFFYSNIMNFFKTEITLANGEIRKRPLIETNGETGEIVWDKGRDFATVRKVLSMPQVNIVKKTEVQTGGFSKESILPKRNSDKLIARKKDWDPKKYGGFDSPTVAYSVLVVAKVEKGKSKKLKSVKELLGITIMERSSFEKNPIDFLEAKGYKEVKKDLIIKLPKYSLFELENGRKRMLASAGELQKGNELALPSKYVNFLYLASHYEKLKGSPEDNEQKQLFVEQHKHYLDEIIEQISEFSKRVILADANLDKVLSAYNKHRDKPIREQAENIIHLFTLTNLGAPAAFKYFDTTIDRKRYTSTKEVLDATLIHQSITGLYETRIDLSQLGGDGGGGSPAPGSSGGLLGRDLLTKLKAQIQFSTEGPQVTWEDRPAMCLVLNLEEEYRLHEKPVPPSIDPSWLQLFPMVWAEKAGMGLANQVPPVVVELKSDASPVAVRQYPMSKEAREGIRPHIQRFLDLGILVPCQSPWNTPLLPVKKPGTNDYRPVQDLREVNKRVQDIHPTVPNPYNLLSSLPPSHTWYSVLDLKDAFFCLKLHPNSQPLFAFEWRDPEKGNTGQLTWTRLPQGFKNSPTLFNEALHRDLASFRALNPQVVMLQYVDDLLVAAPTYRDCKEGTRRLLQELSKLGYRVSAKKAQLCREEVTYLGYLLKGGKRWLTPARKATVMKIPTPTTPRQVREFLGKAGFCRLFIPGFASLAAPLYPLTRPKVPFTWTEAHQEAFGRIKEALLSAPALALPDLTKPFALYVDEKEGVARGVLTQTLGPWRRPVAYLSKKLDPVASGWPTCLKAIAAVALLLKDADKLTLGQNVLVIAPHNLESIVRQPPDRWMTNARMTHYQSLLLNERVSFAPPAILNPATLLPVESDDTPIHICSEILAEETGTRPDLRDQPLPGVPAWYTDGSSFIMDGRRQAGAAIVDNKRTVWASNLPEGTSAQKAELIALTQALRLAEGKSINIYTDSRYAFATAHVHGAIYKQRGWLTSAGKDIKNKEEILALLEAIHLPKRVAIIHCPGHQRGTDPVATGNRKADEAAKQAAQSTRILTETTKNAGKRTADGSEFEKRTADGSEFESPKKKAKVE

SEQ ID NO: 1733 - protein, 2122 aa, synthetic construct
MPAAKRVKLDGGDKKYSIGLDIGTNSVGWAVITDEYKVPSKKFKVLGNTDRHSIKKNLIGALLFDSGETAEATRLKRTARRRYTRRKNRICYLQEIFSNEMAKVDDSFFHRLEESFLVEEDKKHERHPIFGNIVDEVAYHEKYPTIYHLRKKLVDSTDKADLRLIYLALAHMIKFRGHFLIEGDLNPDNSDVDKLFIQLVQTYNQLFEENPINASGVDAKAILSARLSKSRRLENLIAQLPGEKKNGLFGNLIALSLGLTPNFKSNFDLAEDAKLQLSKDTYDDDLDNLLAQIGDQYADLFLAAKNLSDAILLSDILRVNTEITKAPLSASMIKRYDEHHQDLTLLKALVRQQLPEKYKEIFFDQSKNGYAGYIDGGASQEEFYKFIKPILEKMDGTEELLVKLNREDLLRKQRTFDNGSIPHQIHLGELHAILRRQEDFYPFLKDNREKIEKILTFRIPYYVGPLARGNSRFAWMTRKSEETITPWNFEEVVDKGASAQSFIERMTNFDKNLPNEKVLPKHSLLYEYFTVYNELTKVKYVTEGMRKPAFLSGEQKKAIVDLLFKTNRKVTVKQLKEDYFKKIECFDSVEISGVEDRFNASLGTYHDLLKIIKDKDFLDNEENEDILEDIVLTLTLFEDREMIEERLKTYAHLFDDKVMKQLKRRRYTGWGRLSRKLINGIRDKQSGKTILDFLKSDGFANRNFMQLIHDDSLTFKEDIQKAQVSGQGDSLHEHIANLAGSPAIKKGILQTVKVVDELVKVMGRHKPENIVIEMARENQTTQKGQKNSRERMKRIEEGIKELGSQILKEHPVENTQLQNEKLYLYYLQNGRDMYVDQELDINRLSDYDVDHIVPQSFLKDDSIDNKVLTRSDKARGKSDNVPSEEVVKKMKNYWRQLLNAKLITQRKFDNLTKAERGGLSELDKAGFIKRQLVETRQITKHVAQILDSRMNTKYDENDKLIREVKVITLKSKLVSDFRKDFQFYKVREINNYHHAHDAYLNAVVGTALIKKYPKLESEFVYGDYKVYDVRKMIAKSEQEIGKATAKYFFYSNIMNFFKTEITLANGEIRKRPLIETNGETGEIVWDKGRDFATVRKVLSMPQVNIVKKTEVQTGGFSKESILPKRNSDKLIARKKDWDPKKYGGFDSPTVAYSVLVVAKVEKGKSKKLKSVKELLGITIMERSSFEKNPIDFLEAKGYKEVKKDLIIKLPKYSLFELENGRKRMLASAGELQKGNELALPSKYVNFLYLASHYEKLKGSPEDNEQKQLFVEQHKHYLDEIIEQISEFSKRVILADANLDKVLSAYNKHRDKPIREQAENIIHLFTLTNLGAPAAFKYFDTTIDRKRYTSTKEVLDATLIHQSITGLYETRIDLSQLGGDGGGGSGSSGGLLGRDLLTKLKAQIQFSTEGPQVTWEDRPAMCLVLNLEEEYRLHEKPVPPSIDPSWLQLFPMVWAEKAGMGLANQVPPVVVELKSDASPVAVRQYPMSKEAREGIRPHIQRFLDLGILVPCQSPWNTPLLPVKKPGTNDYRPVQDLREVNKRVQDIHPTVPNPYNLLSSLPPSHTWYSVLDLKDAFFCLKLHPNSQPLFAFEWRDPEKGNTGQLTWTRLPQGFKNSPTLFNEALHRDLASFRALNPQVVMLQYVDDLLVAAPTYRDCKEGTRRLLQELSKLGYRVSAKKAQLCREEVTYLGYLLKGGKRWLTPARKATVMKIPTPTTPRQVREFLGKAGFCRLFIPGFASLAAPLYPLTRPKVPFTWTEAHQEAFGRIKEALLSAPALALPDLTKPFALYVDEKEGVARGVLTQTLGPWRRPVAYLSKKLDPVASGWPTCLKAIAAVALLLKDADKLTLGQNVLVIAPHNLESIVRQPPDRWMTNARMTHYQSLLLNERVSFAPPAILNPATLLPVESDDTPIHICSEILAEETGTRPDLRDQPLPGVPAWYTDGSSFIMDGRRQAGAAIVDNKRTVWASNLPEGTSAQKAELIALTQALRLAEGKSINIYTDSRYAFATAHVHGAIYKQRGWLTSAGKDIKNKEEILALLEAIHLPKRVAIIHCPGHQRGTDPVATGNRKADEAAKQAAQSTRILTETTKNAGKRTADGSEFEKRTADGSEFESPKKKAKVE

SEQ ID NO: 1734 - protein, 2125 aa, synthetic construct
MPAAKRVKLDGGDKKYSIGLDIGTNSVGWAVITDEYKVPSKKFKVLGNTDRHSIKKNLIGALLFDSGETAEATRLKRTARRRYTRRKNRICYLQEIFSNEMAKVDDSFFHRLEESFLVEEDKKHERHPIFGNIVDEVAYHEKYPTIYHLRKKLVDSTDKADLRLIYLALAHMIKFRGHFLIEGDLNPDNSDVDKLFIQLVQTYNQLFEENPINASGVDAKAILSARLSKSRRLENLIAQLPGEKKNGLFGNLIALSLGLTPNFKSNFDLAEDAKLQLSKDTYDDDLDNLLAQIGDQYADLFLAAKNLSDAILLSDILRVNTEITKAPLSASMIKRYDEHHQDLTLLKALVRQQLPEKYKEIFFDQSKNGYAGYIDGGASQEEFYKFIKPILEKMDGTEELLVKLNREDLLRKQRTFDNGSIPHQIHLGELHAILRRQEDFYPFLKDNREKIEKILTFRIPYYVGPLARGNSRFAWMTRKSEETITPWNFEEVVDKGASAQSFIERMTNFDKNLPNEKVLPKHSLLYEYFTVYNELTKVKYVTEGMRKPAFLSGEQKKAIVDLLFKTNRKVTVKQLKEDYFKKIECFDSVEISGVEDRFNASLGTYHDLLKIIKDKDFLDNEENEDILEDIVLTLTLFEDREMIEERLKTYAHLFDDKVMKQLKRRRYTGWGRLSRKLINGIRDKQSGKTILDFLKSDGFANRNFMQLIHDDSLTFKEDIQKAQVSGQGDSLHEHIANLAGSPAIKKGILQTVKVVDELVKVMGRHKPENIVIEMARENQTTQKGQKNSRERMKRIEEGIKELGSQILKEHPVENTQLQNEKLYLYYLQNGRDMYVDQELDINRLSDYDVDHIVPQSFLKDDSIDNKVLTRSDKARGKSDNVPSEEVVKKMKNYWRQLLNAKLITQRKFDNLTKAERGGLSELDKAGFIKRQLVETRQITKHVAQILDSRMNTKYDENDKLIREVKVITLKSKLVSDFRKDFQFYKVREINNYHHAHDAYLNAVVGTALIKKYPKLESEFVYGDYKVYDVRKMIAKSEQEIGKATAKYFFYSNIMNFFKTEITLANGEIRKRPLIETNGETGEIVWDKGRDFATVRKVLSMPQVNIVKKTEVQTGGFSKESILPKRNSDKLIARKKDWDPKKYGGFDSPTVAYSVLVVAKVEKGKSKKLKSVKELLGITIMERSSFEKNPIDFLEAKGYKEVKKDLIIKLPKYSLFELENGRKRMLASAGELQKGNELALPSKYVNFLYLASHYEKLKGSPEDNEQKQLFVEQHKHYLDEIIEQISEFSKRVILADANLDKVLSAYNKHRDKPIREQAENIIHLFTLTNLGAPAAFKYFDTTIDRKRYTSTKEVLDATLIHQSITGLYETRIDLSQLGGDGGGGGGSSPAPGGLLGRDLLTKLKAQIQFSTEGPQVTWEDRPAMCLVLNLEEEYRLHEKPVPPSIDPSWLQLFPMVWAEKAGMGLANQVPPVVVELKSDASPVAVRQYPMSKEAREGIRPHIQRFLDLGILVPCQSPWNTPLLPVKKPGTNDYRPVQDLREVNKRVQDIHPTVPNPYNLLSSLPPSHTWYSVLDLKDAFFCLKLHPNSQPLFAFEWRDPEKGNTGQLTWTRLPQGFKNSPTLFNEALHRDLASFRALNPQVVMLQYVDDLLVAAPTYRDCKEGTRRLLQELSKLGYRVSAKKAQLCREEVTYLGYLLKGGKRWLTPARKATVMKIPTPTTPRQVREFLGKAGFCRLFIPGFASLAAPLYPLTRPKVPFTWTEAHQEAFGRIKEALLSAPALALPDLTKPFALYVDEKEGVARGVLTQTLGPWRRPVAYLSKKLDPVASGWPTCLKAIAAVALLLKDADKLTLGQNVLVIAPHNLESIVRQPPDRWMTNARMTHYQSLLLNERVSFAPPAILNPATLLPVESDDTPIHICSEILAEETGTRPDLRDQPLPGVPAWYTDGSSFIMDGRRQAGAAIVDNKRTVWASNLPEGTSAQKAELIALTQALRLAEGKSINIYTDSRYAFATAHVHGAIYKQRGWLTSAGKDIKNKEEILALLEAIHLPKRVAIIHCPGHQRGTDPVATGNRKADEAAKQAAQSTRILTETTKNAGKRTADGSEFEKRTADGSEFESPKKKAKVE

SEQ ID NO: 1735 - protein, 2125 aa, synthetic construct
MPAAKRVKLDGGDKKYSIGLDIGTNSVGWAVITDEYKVPSKKFKVLGNTDRHSIKKNLIGALLFDSGETAEATRLKRTARRRYTRRKNRICYLQEIFSNEMAKVDDSFFHRLEESFLVEEDKKHERHPIFGNIVDEVAYHEKYPTIYHLRKKLVDSTDKADLRLIYLALAHMIKFRGHFLIEGDLNPDNSDVDKLFIQLVQTYNQLFEENPINASGVDAKAILSARLSKSRRLENLIAQLPGEKKNGLFGNLIALSLGLTPNFKSNFDLAEDAKLQLSKDTYDDDLDNLLAQIGDQYADLFLAAKNLSDAILLSDILRVNTEITKAPLSASMIKRYDEHHQDLTLLKALVRQQLPEKYKEIFFDQSKNGYAGYIDGGASQEEFYKFIKPILEKMDGTEELLVKLNREDLLRKQRTFDNGSIPHQIHLGELHAILRRQEDFYPFLKDNREKIEKILTFRIPYYVGPLARGNSRFAWMTRKSEETITPWNFEEVVDKGASAQSFIERMTNFDKNLPNEKVLPKHSLLYEYFTVYNELTKVKYVTEGMRKPAFLSGEQKKAIVDLLFKTNRKVTVKQLKEDYFKKIECFDSVEISGVEDRFNASLGTYHDLLKIIKDKDFLDNEENEDILEDIVLTLTLFEDREMIEERLKTYAHLFDDKVMKQLKRRRYTGWGRLSRKLINGIRDKQSGKTILDFLKSDGFANRNFMQLIHDDSLTFKEDIQKAQVSGQGDSLHEHIANLAGSPAIKKGILQTVKVVDELVKVMGRHKPENIVIEMARENQTTQKGQKNSRERMKRIEEGIKELGSQILKEHPVENTQLQNEKLYLYYLQNGRDMYVDQELDINRLSDYDVDHIVPQSFLKDDSIDNKVLTRSDKARGKSDNVPSEEVVKKMKNYWRQLLNAKLITQRKFDNLTKAERGGLSELDKAGFIKRQLVETRQITKHVAQILDSRMNTKYDENDKLIREVKVITLKSKLVSDFRKDFQFYKVREINNYHHAHDAYLNAVVGTALIKKYPKLESEFVYGDYKVYDVRKMIAKSEQEIGKATAKYFFYSNIMNFFKTEITLANGEIRKRPLIETNGETGEIVWDKGRDFATVRKVLSMPQVNIVKKTEVQTGGFSKESILPKRNSDKLIARKKDWDPKKYGGFDSPTVAYSVLVVAKVEKGKSKKLKSVKELLGITIMERSSFEKNPIDFLEAKGYKEVKKDLIIKLPKYSLFELENGRKRMLASAGELQKGNELALPSKYVNFLYLASHYEKLKGSPEDNEQKQLFVEQHKHYLDEIIEQISEFSKRVILADANLDKVLSAYNKHRDKPIREQAENIIHLFTLTNLGAPAAFKYFDTTIDRKRYTSTKEVLDATLIHQSITGLYETRIDLSQLGGDGGGSSGGSPAPGGLLGRDLLTKLKAQIQFSTEGPQVTWEDRPAMCLVLNLEEEYRLHEKPVPPSIDPSWLQLFPMVWAEKAGMGLANQVPPVVVELKSDASPVAVRQYPMSKEAREGIRPHIQRFLDLGILVPCQSPWNTPLLPVKKPGTNDYRPVQDLREVNKRVQDIHPTVPNPYNLLSSLPPSHTWYSVLDLKDAFFCLKLHPNSQPLFAFEWRDPEKGNTGQLTWTRLPQGFKNSPTLFNEALHRDLASFRALNPQVVMLQYVDDLLVAAPTYRDCKEGTRRLLQELSKLGYRVSAKKAQLCREEVTYLGYLLKGGKRWLTPARKATVMKIPTPTTPRQVREFLGKAGFCRLFIPGFASLAAPLYPLTRPKVPFTWTEAHQEAFGRIKEALLSAPALALPDLTKPFALYVDEKEGVARGVLTQTLGPWRRPVAYLSKKLDPVASGWPTCLKAIAAVALLLKDADKLTLGQNVLVIAPHNLESIVRQPPDRWMTNARMTHYQSLLLNERVSFAPPAILNPATLLPVESDDTPIHICSEILAEETGTRPDLRDQPLPGVPAWYTDGSSFIMDGRRQAGAAIVDNKRTVWASNLPEGTSAQKAELIALTQALRLAEGKSINIYTDSRYAFATAHVHGAIYKQRGWLTSAGKDIKNKEEILALLEAIHLPKRVAIIHCPGHQRGTDPVATGNRKADEAAKQAAQSTRILTETTKNAGKRTADGSEFEKRTADGSEFESPKKKAKVE

SEQ ID NO: 1736 - protein, 2127 aa, synthetic construct
MPAAKRVKLDGGDKKYSIGLDIGTNSVGWAVITDEYKVPSKKFKVLGNTDRHSIKKNLIGALLFDSGETAEATRLKRTARRRYTRRKNRICYLQEIFSNEMAKVDDSFFHRLEESFLVEEDKKHERHPIFGNIVDEVAYHEKYPTIYHLRKKLVDSTDKADLRLIYLALAHMIKFRGHFLIEGDLNPDNSDVDKLFIQLVQTYNQLFEENPINASGVDAKAILSARLSKSRRLENLIAQLPGEKKNGLFGNLIALSLGLTPNFKSNFDLAEDAKLQLSKDTYDDDLDNLLAQIGDQYADLFLAAKNLSDAILLSDILRVNTEITKAPLSASMIKRYDEHHQDLTLLKALVRQQLPEKYKEIFFDQSKNGYAGYIDGGASQEEFYKFIKPILEKMDGTEELLVKLNREDLLRKQRTFDNGSIPHQIHLGELHAILRRQEDFYPFLKDNREKIEKILTFRIPYYVGPLARGNSRFAWMTRKSEETITPWNFEEVVDKGASAQSFIERMTNFDKNLPNEKVLPKHSLLYEYFTVYNELTKVKYVTEGMRKPAFLSGEQKKAIVDLLFKTNRKVTVKQLKEDYFKKIECFDSVEISGVEDRFNASLGTYHDLLKIIKDKDFLDNEENEDILEDIVLTLTLFEDREMIEERLKTYAHLFDDKVMKQLKRRRYTGWGRLSRKLINGIRDKQSGKTILDFLKSDGFANRNFMQLIHDDSLTFKEDIQKAQVSGQGDSLHEHIANLAGSPAIKKGILQTVKVVDELVKVMGRHKPENIVIEMARENQTTQKGQKNSRERMKRIEEGIKELGSQILKEHPVENTQLQNEKLYLYYLQNGRDMYVDQELDINRLSDYDVDHIVPQSFLKDDSIDNKVLTRSDKARGKSDNVPSEEVVKKMKNYWRQLLNAKLITQRKFDNLTKAERGGLSELDKAGFIKRQLVETRQITKHVAQILDSRMNTKYDENDKLIREVKVITLKSKLVSDFRKDFQFYKVREINNYHHAHDAYLNAVVGTALIKKYPKLESEFVYGDYKVYDVRKMIAKSEQEIGKATAKYFFYSNIMNFFKTEITLANGEIRKRPLIETNGETGEIVWDKGRDFATVRKVLSMPQVNIVKKTEVQTGGFSKESILPKRNSDKLIARKKDWDPKKYGGFDSPTVAYSVLVVAKVEKGKSKKLKSVKELLGITIMERSSFEKNPIDFLEAKGYKEVKKDLIIKLPKYSLFELENGRKRMLASAGELQKGNELALPSKYVNFLYLASHYEKLKGSPEDNEQKQLFVEQHKHYLDEIIEQISEFSKRVILADANLDKVLSAYNKHRDKPIREQAENIIHLFTLTNLGAPAAFKYFDTTIDRKRYTSTKEVLDATLIHQSITGLYETRIDLSQLGGDGGEAAAKGGGGGSGGLLGRDLLTKLKAQIQFSTEGPQVTWEDRPAMCLVLNLEEEYRLHEKPVPPSIDPSWLQLFPMVWAEKAGMGLANQVPPVVVELKSDASPVAVRQYPMSKEAREGIRPHIQRFLDLGILVPCQSPWNTPLLPVKKPGTNDYRPVQDLREVNKRVQDIHPTVPNPYNLLSSLPPSHTWYSVLDLKDAFFCLKLHPNSQPLFAFEWRDPEKGNTGQLTWTRLPQGFKNSPTLFNEALHRDLASFRALNPQVVMLQYVDDLLVAAPTYRDCKEGTRRLLQELSKLGYRVSAKKAQLCREEVTYLGYLLKGGKRWLTPARKATVMKIPTPTTPRQVREFLGKAGFCRLFIPGFASLAAPLYPLTRPKVPFTWTEAHQEAFGRIKEALLSAPALALPDLTKPFALYVDEKEGVARGVLTQTLGPWRRPVAYLSKKLDPVASGWPTCLKAIAAVALLLKDADKLTLGQNVLVIAPHNLESIVRQPPDRWMTNARMTHYQSLLLNERVSFAPPAILNPATLLPVESDDTPIHICSEILAEETGTRPDLRDQPLPGVPAWYTDGSSFIMDGRRQAGAAIVDNKRTVWASNLPEGTSAQKAELIALTQALRLAEGKSINIYTDSRYAFATAHVHGAIYKQRGWLTSAGKDIKNKEEILALLEAIHLPKRVAIIHCPGHQRGTDPVATGNRKADEAAKQAAQSTRILTETTKNAGKRTADGSEFEKRTADGSEFESPKKKAKVE

SEQ ID NO: 1737 - protein, 2127 aa, synthetic construct
MPAAKRVKLDGGDKKYSIGLDIGTNSVGWAVITDEYKVPSKKFKVLGNTDRHSIKKNLIGALLFDSGETAEATRLKRTARRRYTRRKNRICYLQEIFSNEMAKVDDSFFHRLEESFLVEEDKKHERHPIFGNIVDEVAYHEKYPTIYHLRKKLVDSTDKADLRLIYLALAHMIKFRGHFLIEGDLNPDNSDVDKLFIQLVQTYNQLFEENPINASGVDAKAILSARLSKSRRLENLIAQLPGEKKNGLFGNLIALSLGLTPNFKSNFDLAEDAKLQLSKDTYDDDLDNLLAQIGDQYADLFLAAKNLSDAILLSDILRVNTEITKAPLSASMIKRYDEHHQDLTLLKALVRQQLPEKYKEIFFDQSKNGYAGYIDGGASQEEFYKFIKPILEKMDGTEELLVKLNREDLLRKQRTFDNGSIPHQIHLGELHAILRRQEDFYPFLKDNREKIEKILTFRIPYYVGPLARGNSRFAWMTRKSEETITPWNFEEVVDKGASAQSFIERMTNFDKNLPNEKVLPKHSLLYEYFTVYNELTKVKYVTEGMRKPAFLSGEQKKAIVDLLFKTNRKVTVKQLKEDYFKKIECFDSVEISGVEDRFNASLGTYHDLLKIIKDKDFLDNEENEDILEDIVLTLTLFEDREMIEERLKTYAHLFDDKVMKQLKRRRYTGWGRLSRKLINGIRDKQSGKTILDFLKSDGFANRNFMQLIHDDSLTFKEDIQKAQVSGQGDSLHEHIANLAGSPAIKKGILQTVKVVDELVKVMGRHKPENIVIEMARENQTTQKGQKNSRERMKRIEEGIKELGSQILKEHPVENTQLQNEKLYLYYLQNGRDMYVDQELDINRLSDYDVDHIVPQSFLKDDSIDNKVLTRSDKARGKSDNVPSEEVVKKMKNYWRQLLNAKLITQRKFDNLTKAERGGLSELDKAGFIKRQLVETRQITKHVAQILDSRMNTKYDENDKLIREVKVITLKSKLVSDFRKDFQFYKVREINNYHHAHDAYLNAVVGTALIKKYPKLESEFVYGDYKVYDVRKMIAKSEQEIGKATAKYFFYSNIMNFFKTEITLANGEIRKRPLIETNGETGEIVWDKGRDFATVRKVLSMPQVNIVKKTEVQTGGFSKESILPKRNSDKLIARKKDWDPKKYGGFDSPTVAYSVLVVAKVEKGKSKKLKSVKELLGITIMERSSFEKNPIDFLEAKGYKEVKKDLIIKLPKYSLFELENGRKRMLASAGELQKGNELALPSKYVNFLYLASHYEKLKGSPEDNEQKQLFVEQHKHYLDEIIEQISEFSKRVILADANLDKVLSAYNKHRDKPIREQAENIIHLFTLTNLGAPAAFKYFDTTIDRKRYTSTKEVLDATLIHQSITGLYETRIDLSQLGGDGGGSSEAAAKGGGGGLLGRDLLTKLKAQIQFSTEGPQVTWEDRPAMCLVLNLEEEYRLHEKPVPPSIDPSWLQLFPMVWAEKAGMGLANQVPPVVVELKSDASPVAVRQYPMSKEAREGIRPHIQRFLDLGILVPCQSPWNTPLLPVKKPGTNDYRPVQDLREVNKRVQDIHPTVPNPYNLLSSLPPSHTWYSVLDLKDAFFCLKLHPNSQPLFAFEWRDPEKGNTGQLTWTRLPQGFKNSPTLFNEALHRDLASFRALNPQVVMLQYVDDLLVAAPTYRDCKEGTRRLLQELSKLGYRVSAKKAQLCREEVTYLGYLLKGGKRWLTPARKATVMKIPTPTTPRQVREFLGKAGFCRLFIPGFASLAAPLYPLTRPKVPFTWTEAHQEAFGRIKEALLSAPALALPDLTKPFALYVDEKEGVARGVLTQTLGPWRRPVAYLSKKLDPVASGWPTCLKAIAAVALLLKDADKLTLGQNVLVIAPHNLESIVRQPPDRWMTNARMTHYQSLLLNERVSFAPPAILNPATLLPVESDDTPIHICSEILAEETGTRPDLRDQPLPGVPAWYTDGSSFIMDGRRQAGAAIVDNKRTVWASNLPEGTSAQKAELIALTQALRLAEGKSINIYTDSRYAFATAHVHGAIYKQRGWLTSAGKDIKNKEEILALLEAIHLPKRVAIIHCPGHQRGTDPVATGNRKADEAAKQAAQSTRILTETTKNAGKRTADGSEFEKRTADGSEFESPKKKAKVE

SEQ ID NO: 1738 - protein, 2125 aa, synthetic construct
MPAAKRVKLDGGDKKYSIGLDIGTNSVGWAVITDEYKVPSKKFKVLGNTDRHSIKKNLIGALLFDSGETAEATRLKRTARRRYTRRKNRICYLQEIFSNEMAKVDDSFFHRLEESFLVEEDKKHERHPIFGNIVDEVAYHEKYPTIYHLRKKLVDSTDKADLRLIYLALAHMIKFRGHFLIEGDLNPDNSDVDKLFIQLVQTYNQLFEENPINASGVDAKAILSARLSKSRRLENLIAQLPGEKKNGLFGNLIALSLGLTPNFKSNFDLAEDAKLQLSKDTYDDDLDNLLAQIGDQYADLFLAAKNLSDAILLSDILRVNTEITKAPLSASMIKRYDEHHQDLTLLKALVRQQLPEKYKEIFFDQSKNGYAGYIDGGASQEEFYKFIKPILEKMDGTEELLVKLNREDLLRKQRTFDNGSIPHQIHLGELHAILRRQEDFYPFLKDNREKIEKILTFRIPYYVGPLARGNSRFAWMTRKSEETITPWNFEEVVDKGASAQSFIERMTNFDKNLPNEKVLPKHSLLYEYFTVYNELTKVKYVTEGMRKPAFLSGEQKKAIVDLLFKTNRKVTVKQLKEDYFKKIECFDSVEISGVEDRFNASLGTYHDLLKIIKDKDFLDNEENEDILEDIVLTLTLFEDREMIEERLKTYAHLFDDKVMKQLKRRRYTGWGRLSRKLINGIRDKQSGKTILDFLKSDGFANRNFMQLIHDDSLTFKEDIQKAQVSGQGDSLHEHIANLAGSPAIKKGILQTVKVVDELVKVMGRHKPENIVIEMARENQTTQKGQKNSRERMKRIEEGIKELGSQILKEHPVENTQLQNEKLYLYYLQNGRDMYVDQELDINRLSDYDVDHIVPQSFLKDDSIDNKVLTRSDKARGKSDNVPSEEVVKKMKNYWRQLLNAKLITQRKFDNLTKAERGGLSELDKAGFIKRQLVETRQITKHVAQILDSRMNTKYDENDKLIREVKVITLKSKLVSDFRKDFQFYKVREINNYHHAHDAYLNAVVGTALIKKYPKLESEFVYGDYKVYDVRKMIAKSEQEIGKATAKYFFYSNIMNFFKTEITLANGEIRKRPLIETNGETGEIVWDKGRDFATVRKVLSMPQVNIVKKTEVQTGGFSKESILPKRNSDKLIARKKDWDPKKYGGFDSPTVAYSVLVVAKVEKGKSKKLKSVKELLGITIMERSSFEKNPIDFLEAKGYKEVKKDLIIKLPKYSLFELENGRKRMLASAGELQKGNELALPSKYVNFLYLASHYEKLKGSPEDNEQKQLFVEQHKHYLDEIIEQISEFSKRVILADANLDKVLSAYNKHRDKPIREQAENIIHLFTLTNLGAPAAFKYFDTTIDRKRYTSTKEVLDATLIHQSITGLYETRIDLSQLGGDGGGSSPAPGGSGGLLGRDLLTKLKAQIQFSTEGPQVTWEDRPAMCLVLNLEEEYRLHEKPVPPSIDPSWLQLFPMVWAEKAGMGLANQVPPVVVELKSDASPVAVRQYPMSKEAREGIRPHIQRFLDLGILVPCQSPWNTPLLPVKKPGTNDYRPVQDLREVNKRVQDIHPTVPNPYNLLSSLPPSHTWYSVLDLKDAFFCLKLHPNSQPLFAFEWRDPEKGNTGQLTWTRLPQGFKNSPTLFNEALHRDLASFRALNPQVVMLQYVDDLLVAAPTYRDCKEGTRRLLQELSKLGYRVSAKKAQLCREEVTYLGYLLKGGKRWLTPARKATVMKIPTPTTPRQVREFLGKAGFCRLFIPGFASLAAPLYPLTRPKVPFTWTEAHQEAFGRIKEALLSAPALALPDLTKPFALYVDEKEGVARGVLTQTLGPWRRPVAYLSKKLDPVASGWPTCLKAIAAVALLLKDADKLTLGQNVLVIAPHNLESIVRQPPDRWMTNARMTHYQSLLLNERVSFAPPAILNPATLLPVESDDTPIHICSEILAEETGTRPDLRDQPLPGVPAWYTDGSSFIMDGRRQAGAAIVDNKRTVWASNLPEGTSAQKAELIALTQALRLAEGKSINIYTDSRYAFATAHVHGAIYKQRGWLTSAGKDIKNKEEILALLEAIHLPKRVAIIHCPGHQRGTDPVATGNRKADEAAKQAAQSTRILTETTKNAGKRTADGSEFEKRTADGSEFESPKKKAKVE

SEQ ID NO: 1739 - protein, 2131 aa, synthetic construct
MPAAKRVKLDGGDKKYSIGLDIGTNSVGWAVITDEYKVPSKKFKVLGNTDRHSIKKNLIGALLFDSGETAEATRLKRTARRRYTRRKNRICYLQEIFSNEMAKVDDSFFHRLEESFLVEEDKKHERHPIFGNIVDEVAYHEKYPTIYHLRKKLVDSTDKADLRLIYLALAHMIKFRGHFLIEGDLNPDNSDVDKLFIQLVQTYNQLFEENPINASGVDAKAILSARLSKSRRLENLIAQLPGEKKNGLFGNLIALSLGLTPNFKSNFDLAEDAKLQLSKDTYDDDLDNLLAQIGDQYADLFLAAKNLSDAILLSDILRVNTEITKAPLSASMIKRYDEHHQDLTLLKALVRQQLPEKYKEIFFDQSKNGYAGYIDGGASQEEFYKFIKPILEKMDGTEELLVKLNREDLLRKQRTFDNGSIPHQIHLGELHAILRRQEDFYPFLKDNREKIEKILTFRIPYYVGPLARGNSRFAWMTRKSEETITPWNFEEVVDKGASAQSFIERMTNFDKNLPNEKVLPKHSLLYEYFTVYNELTKVKYVTEGMRKPAFLSGEQKKAIVDLLFKTNRKVTVKQLKEDYFKKIECFDSVEISGVEDRFNASLGTYHDLLKIIKDKDFLDNEENEDILEDIVLTLTLFEDREMIEERLKTYAHLFDDKVMKQLKRRRYTGWGRLSRKLINGIRDKQSGKTILDFLKSDGFANRNFMQLIHDDSLTFKEDIQKAQVSGQGDSLHEHIANLAGSPAIKKGILQTVKVVDELVKVMGRHKPENIVIEMARENQTTQKGQKNSRERMKRIEEGIKELGSQILKEHPVENTQLQNEKLYLYYLQNGRDMYVDQELDINRLSDYDVDHIVPQSFLKDDSIDNKVLTRSDKARGKSDNVPSEEVVKKMKNYWRQLLNAKLITQRKFDNLTKAERGGLSELDKAGFIKRQLVETRQITKHVAQILDSRMNTKYDENDKLIREVKVITLKSKLVSDFRKDFQFYKVREINNYHHAHDAYLNAVVGTALIKKYPKLESEFVYGDYKVYDVRKMIAKSEQEIGKATAKYFFYSNIMNFFKTEITLANGEIRKRPLIETNGETGEIVWDKGRDFATVRKVLSMPQVNIVKKTEVQTGGFSKESILPKRNSDKLIARKKDWDPKKYGGFDSPTVAYSVLVVAKVEKGKSKKLKSVKELLGITIMERSSFEKNPIDFLEAKGYKEVKKDLIIKLPKYSLFELENGRKRMLASAGELQKGNELALPSKYVNFLYLASHYEKLKGSPEDNEQKQLFVEQHKHYLDEIIEQISEFSKRVILADANLDKVLSAYNKHRDKPIREQAENIIHLFTLTNLGAPAAFKYFDTTIDRKRYTSTKEVLDATLIHQSITGLYETRIDLSQLGGDGGGGGGSEAAAKGGGGSGGLLGRDLLTKLKAQIQFSTEGPQVTWEDRPAMCLVLNLEEEYRLHEKPVPPSIDPSWLQLFPMVWAEKAGMGLANQVPPVVVELKSDASPVAVRQYPMSKEAREGIRPHIQRFLDLGILVPCQSPWNTPLLPVKKPGTNDYRPVQDLREVNKRVQDIHPTVPNPYNLLSSLPPSHTWYSVLDLKDAFFCLKLHPNSQPLFAFEWRDPEKGNTGQLTWTRLPQGFKNSPTLFNEALHRDLASFRALNPQVVMLQYVDDLLVAAPTYRDCKEGTRRLLQELSKLGYRVSAKKAQLCREEVTYLGYLLKGGKRWLTPARKATVMKIPTPTTPRQVREFLGKAGFCRLFIPGFASLAAPLYPLTRPKVPFTWTEAHQEAFGRIKEALLSAPALALPDLTKPFALYVDEKEGVARGVLTQTLGPWRRPVAYLSKKLDPVASGWPTCLKAIAAVALLLKDADKLTLGQNVLVIAPHNLESIVRQPPDRWMTNARMTHYQSLLLNERVSFAPPAILNPATLLPVESDDTPIHICSEILAEETGTRPDLRDQPLPGVPAWYTDGSSFIMDGRRQAGAAIVDNKRTVWASNLPEGTSAQKAELIALTQALRLAEGKSINIYTDSRYAFATAHVHGAIYKQRGWLTSAGKDIKNKEEILALLEAIHLPKRVAIIHCPGHQRGTDPVATGNRKADEAAKQAAQSTRILTETTKNAGKRTADGSEFEKRTADGSEFESPKKKAKVE

SEQ ID NO: 1740 - protein, 2125 aa, synthetic construct
MPAAKRVKLDGGDKKYSIGLDIGTNSVGWAVITDEYKVPSKKFKVLGNTDRHSIKKNLIGALLFDSGETAEATRLKRTARRRYTRRKNRICYLQEIFSNEMAKVDDSFFHRLEESFLVEEDKKHERHPIFGNIVDEVAYHEKYPTIYHLRKKLVDSTDKADLRLIYLALAHMIKFRGHFLIEGDLNPDNSDVDKLFIQLVQTYNQLFEENPINASGVDAKAILSARLSKSRRLENLIAQLPGEKKNGLFGNLIALSLGLTPNFKSNFDLAEDAKLQLSKDTYDDDLDNLLAQIGDQYADLFLAAKNLSDAILLSDILRVNTEITKAPLSASMIKRYDEHHQDLTLLKALVRQQLPEKYKEIFFDQSKNGYAGYIDGGASQEEFYKFIKPILEKMDGTEELLVKLNREDLLRKQRTFDNGSIPHQIHLGELHAILRRQEDFYPFLKDNREKIEKILTFRIPYYVGPLARGNSRFAWMTRKSEETITPWNFEEVVDKGASAQSFIERMTNFDKNLPNEKVLPKHSLLYEYFTVYNELTKVKYVTEGMRKPAFLSGEQKKAIVDLLFKTNRKVTVKQLKEDYFKKIECFDSVEISGVEDRFNASLGTYHDLLKIIKDKDFLDNEENEDILEDIVLTLTLFEDREMIEERLKTYAHLFDDKVMKQLKRRRYTGWGRLSRKLINGIRDKQSGKTILDFLKSDGFANRNFMQLIHDDSLTFKEDIQKAQVSGQGDSLHEHIANLAGSPAIKKGILQTVKVVDELVKVMGRHKPENIVIEMARENQTTQKGQKNSRERMKRIEEGIKELGSQILKEHPVENTQLQNEKLYLYYLQNGRDMYVDQELDINRLSDYDVDHIVPQSFLKDDSIDNKVLTRSDKARGKSDNVPSEEVVKKMKNYWRQLLNAKLITQRKFDNLTKAERGGLSELDKAGFIKRQLVETRQITKHVAQILDSRMNTKYDENDKLIREVKVITLKSKLVSDFRKDFQFYKVREINNYHHAHDAYLNAVVGTALIKKYPKLESEFVYGDYKVYDVRKMIAKSEQEIGKATAKYFFYSNIMNFFKTEITLANGEIRKRPLIETNGETGEIVWDKGRDFATVRKVLSMPQVNIVKKTEVQTGGFSKESILPKRNSDKLIARKKDWDPKKYGGFDSPTVAYSVLVVAKVEKGKSKKLKSVKELLGITIMERSSFEKNPIDFLEAKGYKEVKKDLIIKLPKYSLFELENGRKRMLASAGELQKGNELALPSKYVNFLYLASHYEKLKGSPEDNEQKQLFVEQHKHYLDEIIEQISEFSKRVILADANLDKVLSAYNKHRDKPIREQAENIIHLFTLTNLGAPAAFKYFDTTIDRKRYTSTKEVLDATLIHQSITGLYETRIDLSQLGGDGGPAPGGSGGGGGLLGRDLLTKLKAQIQFSTEGPQVTWEDRPAMCLVLNLEEEYRLHEKPVPPSIDPSWLQLFPMVWAEKAGMGLANQVPPVVVELKSDASPVAVRQYPMSKEAREGIRPHIQRFLDLGILVPCQSPWNTPLLPVKKPGTNDYRPVQDLREVNKRVQDIHPTVPNPYNLLSSLPPSHTWYSVLDLKDAFFCLKLHPNSQPLFAFEWRDPEKGNTGQLTWTRLPQGFKNSPTLFNEALHRDLASFRALNPQVVMLQYVDDLLVAAPTYRDCKEGTRRLLQELSKLGYRVSAKKAQLCREEVTYLGYLLKGGKRWLTPARKATVMKIPTPTTPRQVREFLGKAGFCRLFIPGFASLAAPLYPLTRPKVPFTWTEAHQEAFGRIKEALLSAPALALPDLTKPFALYVDEKEGVARGVLTQTLGPWRRPVAYLSKKLDPVASGWPTCLKAIAAVALLLKDADKLTLGQNVLVIAPHNLESIVRQPPDRWMTNARMTHYQSLLLNERVSFAPPAILNPATLLPVESDDTPIHICSEILAEETGTRPDLRDQPLPGVPAWYTDGSSFIMDGRRQAGAAIVDNKRTVWASNLPEGTSAQKAELIALTQALRLAEGKSINIYTDSRYAFATAHVHGAIYKQRGWLTSAGKDIKNKEEILALLEAIHLPKRVAIIHCPGHQRGTDPVATGNRKADEAAKQAAQSTRILTETTKNAGKRTADGSEFEKRTADGSEFESPKKKAKVE

SEQ ID NO: 1741 - protein, 2127 aa, synthetic construct
MPAAKRVKLDGGDKKYSIGLDIGTNSVGWAVITDEYKVPSKKFKVLGNTDRHSIKKNLIGALLFDSGETAEATRLKRTARRRYTRRKNRICYLQEIFSNEMAKVDDSFFHRLEESFLVEEDKKHERHPIFGNIVDEVAYHEKYPTIYHLRKKLVDSTDKADLRLIYLALAHMIKFRGHFLIEGDLNPDNSDVDKLFIQLVQTYNQLFEENPINASGVDAKAILSARLSKSRRLENLIAQLPGEKKNGLFGNLIALSLGLTPNFKSNFDLAEDAKLQLSKDTYDDDLDNLLAQIGDQYADLFLAAKNLSDAILLSDILRVNTEITKAPLSASMIKRYDEHHQDLTLLKALVRQQLPEKYKEIFFDQSKNGYAGYIDGGASQEEFYKFIKPILEKMDGTEELLVKLNREDLLRKQRTFDNGSIPHQIHLGELHAILRRQEDFYPFLKDNREKIEKILTFRIPYYVGPLARGNSRFAWMTRKSEETITPWNFEEVVDKGASAQSFIERMTNFDKNLPNEKVLPKHSLLYEYFTVYNELTKVKYVTEGMRKPAFLSGEQKKAIVDLLFKTNRKVTVKQLKEDYFKKIECFDSVEISGVEDRFNASLGTYHDLLKIIKDKDFLDNEENEDILEDIVLTLTLFEDREMIEERLKTYAHLFDDKVMKQLKRRRYTGWGRLSRKLINGIRDKQSGKTILDFLKSDGFANRNFMQLIHDDSLTFKEDIQKAQVSGQGDSLHEHIANLAGSPAIKKGILQTVKVVDELVKVMGRHKPENIVIEMARENQTTQKGQKNSRERMKRIEEGIKELGSQILKEHPVENTQLQNEKLYLYYLQNGRDMYVDQELDINRLSDYDVDHIVPQSFLKDDSIDNKVLTRSDKARGKSDNVPSEEVVKKMKNYWRQLLNAKLITQRKFDNLTKAERGGLSELDKAGFIKRQLVETRQITKHVAQILDSRMNTKYDENDKLIREVKVITLKSKLVSDFRKDFQFYKVREINNYHHAHDAYLNAVVGTALIKKYPKLESEFVYGDYKVYDVRKMIAKSEQEIGKATAKYFFYSNIMNFFKTEITLANGEIRKRPLIETNGETGEIVWDKGRDFATVRKVLSMPQVNIVKKTEVQTGGFSKESILPKRNSDKLIARKKDWDPKKYGGFDSPTVAYSVLVVAKVEKGKSKKLKSVKELLGITIMERSSFEKNPIDFLEAKGYKEVKKDLIIKLPKYSLFELENGRKRMLASAGELQKGNELALPSKYVNFLYLASHYEKLKGSPEDNEQKQLFVEQHKHYLDEIIEQISEFSKRVILADANLDKVLSAYNKHRDKPIREQAENIIHLFTLTNLGAPAAFKYFDTTIDRKRYTSTKEVLDATLIHQSITGLYETRIDLSQLGGDGGGGSGGGEAAAKGGLLGRDLLTKLKAQIQFSTEGPQVTWEDRPAMCLVLNLEEEYRLHEKPVPPSIDPSWLQLFPMVWAEKAGMGLANQVPPVVVELKSDASPVAVRQYPMSKEAREGIRPHIQRFLDLGILVPCQSPWNTPLLPVKKPGTNDYRPVQDLREVNKRVQDIHPTVPNPYNLLSSLPPSHTWYSVLDLKDAFFCLKLHPNSQPLFAFEWRDPEKGNTGQLTWTRLPQGFKNSPTLFNEALHRDLASFRALNPQVVMLQYVDDLLVAAPTYRDCKEGTRRLLQELSKLGYRVSAKKAQLCREEVTYLGYLLKGGKRWLTPARKATVMKIPTPTTPRQVREFLGKAGFCRLFIPGFASLAAPLYPLTRPKVPFTWTEAHQEAFGRIKEALLSAPALALPDLTKPFALYVDEKEGVARGVLTQTLGPWRRPVAYLSKKLDPVASGWPTCLKAIAAVALLLKDADKLTLGQNVLVIAPHNLESIVRQPPDRWMTNARMTHYQSLLLNERVSFAPPAILNPATLLPVESDDTPIHICSEILAEETGTRPDLRDQPLPGVPAWYTDGSSFIMDGRRQAGAAIVDNKRTVWASNLPEGTSAQKAELIALTQALRLAEGKSINIYTDSRYAFATAHVHGAIYKQRGWLTSAGKDIKNKEEILALLEAIHLPKRVAIIHCPGHQRGTDPVATGNRKADEAAKQAAQSTRILTETTKNAGKRTADGSEFEKRTADGSEFESPKKKAKVE

SEQ ID NO: 1742 - protein, 2122 aa, synthetic construct
MPAAKRVKLDGGDKKYSIGLDIGTNSVGWAVITDEYKVPSKKFKVLGNTDRHSIKKNLIGALLFDSGETAEATRLKRTARRRYTRRKNRICYLQEIFSNEMAKVDDSFFHRLEESFLVEEDKKHERHPIFGNIVDEVAYHEKYPTIYHLRKKLVDSTDKADLRLIYLALAHMIKFRGHFLIEGDLNPDNSDVDKLFIQLVQTYNQLFEENPINASGVDAKAILSARLSKSRRLENLIAQLPGEKKNGLFGNLIALSLGLTPNFKSNFDLAEDAKLQLSKDTYDDDLDNLLAQIGDQYADLFLAAKNLSDAILLSDILRVNTEITKAPLSASMIKRYDEHHQDLTLLKALVRQQLPEKYKEIFFDQSKNGYAGYIDGGASQEEFYKFIKPILEKMDGTEELLVKLNREDLLRKQRTFDNGSIPHQIHLGELHAILRRQEDFYPFLKDNREKIEKILTFRIPYYVGPLARGNSRFAWMTRKSEETITPWNFEEVVDKGASAQSFIERMTNFDKNLPNEKVLPKHSLLYEYFTVYNELTKVKYVTEGMRKPAFLSGEQKKAIVDLLFKTNRKVTVKQLKEDYFKKIECFDSVEISGVEDRFNASLGTYHDLLKIIKDKDFLDNEENEDILEDIVLTLTLFEDREMIEERLKTYAHLFDDKVMKQLKRRRYTGWGRLSRKLINGIRDKQSGKTILDFLKSDGFANRNFMQLIHDDSLTFKEDIQKAQVSGQGDSLHEHIANLAGSPAIKKGILQTVKVVDELVKVMGRHKPENIVIEMARENQTTQKGQKNSRERMKRIEEGIKELGSQILKEHPVENTQLQNEKLYLYYLQNGRDMYVDQELDINRLSDYDVDHIVPQSFLKDDSIDNKVLTRSDKARGKSDNVPSEEVVKKMKNYWRQLLNAKLITQRKFDNLTKAERGGLSELDKAGFIKRQLVETRQITKHVAQILDSRMNTKYDENDKLIREVKVITLKSKLVSDFRKDFQFYKVREINNYHHAHDAYLNAVVGTALIKKYPKLESEFVYGDYKVYDVRKMIAKSEQEIGKATAKYFFYSNIMNFFKTEITLANGEIRKRPLIETNGETGEIVWDKGRDFATVRKVLSMPQVNIVKKTEVQTGGFSKESILPKRNSDKLIARKKDWDPKKYGGFDSPTVAYSVLVVAKVEKGKSKKLKSVKELLGITIMERSSFEKNPIDFLEAKGYKEVKKDLIIKLPKYSLFELENGRKRMLASAGELQKGNELALPSKYVNFLYLASHYEKLKGSPEDNEQKQLFVEQHKHYLDEIIEQISEFSKRVILADANLDKVLSAYNKHRDKPIREQAENIIHLFTLTNLGAPAAFKYFDTTIDRKRYTSTKEVLDATLIHQSITGLYETRIDLSQLGGDGGGSSGGSGGLLGRDLLTKLKAQIQFSTEGPQVTWEDRPAMCLVLNLEEEYRLHEKPVPPSIDPSWLQLFPMVWAEKAGMGLANQVPPVVVELKSDASPVAVRQYPMSKEAREGIRPHIQRFLDLGILVPCQSPWNTPLLPVKKPGTNDYRPVQDLREVNKRVQDIHPTVPNPYNLLSSLPPSHTWYSVLDLKDAFFCLKLHPNSQPLFAFEWRDPEKGNTGQLTWTRLPQGFKNSPTLFNEALHRDLASFRALNPQVVMLQYVDDLLVAAPTYRDCKEGTRRLLQELSKLGYRVSAKKAQLCREEVTYLGYLLKGGKRWLTPARKATVMKIPTPTTPRQVREFLGKAGFCRLFIPGFASLAAPLYPLTRPKVPFTWTEAHQEAFGRIKEALLSAPALALPDLTKPFALYVDEKEGVARGVLTQTLGPWRRPVAYLSKKLDPVASGWPTCLKAIAAVALLLKDADKLTLGQNVLVIAPHNLESIVRQPPDRWMTNARMTHYQSLLLNERVSFAPPAILNPATLLPVESDDTPIHICSEILAEETGTRPDLRDQPLPGVPAWYTDGSSFIMDGRRQAGAAIVDNKRTVWASNLPEGTSAQKAELIALTQALRLAEGKSINIYTDSRYAFATAHVHGAIYKQRGWLTSAGKDIKNKEEILALLEAIHLPKRVAIIHCPGHQRGTDPVATGNRKADEAAKQAAQSTRILTETTKNAGKRTADGSEFEKRTADGSEFESPKKKAKVE

SEQ ID NO: 1743 - protein, 2124 aa, synthetic construct
MPAAKRVKLDGGDKKYSIGLDIGTNSVGWAVITDEYKVPSKKFKVLGNTDRHSIKKNLIGALLFDSGETAEATRLKRTARRRYTRRKNRICYLQEIFSNEMAKVDDSFFHRLEESFLVEEDKKHERHPIFGNIVDEVAYHEKYPTIYHLRKKLVDSTDKADLRLIYLALAHMIKFRGHFLIEGDLNPDNSDVDKLFIQLVQTYNQLFEENPINASGVDAKAILSARLSKSRRLENLIAQLPGEKKNGLFGNLIALSLGLTPNFKSNFDLAEDAKLQLSKDTYDDDLDNLLAQIGDQYADLFLAAKNLSDAILLSDILRVNTEITKAPLSASMIKRYDEHHQDLTLLKALVRQQLPEKYKEIFFDQSKNGYAGYIDGGASQEEFYKFIKPILEKMDGTEELLVKLNREDLLRKQRTFDNGSIPHQIHLGELHAILRRQEDFYPFLKDNREKIEKILTFRIPYYVGPLARGNSRFAWMTRKSEETITPWNFEEVVDKGASAQSFIERMTNFDKNLPNEKVLPKHSLLYEYFTVYNELTKVKYVTEGMRKPAFLSGEQKKAIVDLLFKTNRKVTVKQLKEDYFKKIECFDSVEISGVEDRFNASLGTYHDLLKIIKDKDFLDNEENEDILEDIVLTLTLFEDREMIEERLKTYAHLFDDKVMKQLKRRRYTGWGRLSRKLINGIRDKQSGKTILDFLKSDGFANRNFMQLIHDDSLTFKEDIQKAQVSGQGDSLHEHIANLAGSPAIKKGILQTVKVVDELVKVMGRHKPENIVIEMARENQTTQKGQKNSRERMKRIEEGIKELGSQILKEHPVENTQLQNEKLYLYYLQNGRDMYVDQELDINRLSDYDVDHIVPQSFLKDDSIDNKVLTRSDKARGKSDNVPSEEVVKKMKNYWRQLLNAKLITQRKFDNLTKAERGGLSELDKAGFIKRQLVETRQITKHVAQILDSRMNTKYDENDKLIREVKVITLKSKLVSDFRKDFQFYKVREINNYHHAHDAYLNAVVGTALIKKYPKLESEFVYGDYKVYDVRKMIAKSEQEIGKATAKYFFYSNIMNFFKTEITLANGEIRKRPLIETNGETGEIVWDKGRDFATVRKVLSMPQVNIVKKTEVQTGGFSKESILPKRNSDKLIARKKDWDPKKYGGFDSPTVAYSVLVVAKVEKGKSKKLKSVKELLGITIMERSSFEKNPIDFLEAKGYKEVKKDLIIKLPKYSLFELENGRKRMLASAGELQKGNELALPSKYVNFLYLASHYEKLKGSPEDNEQKQLFVEQHKHYLDEIIEQISEFSKRVILADANLDKVLSAYNKHRDKPIREQAENIIHLFTLTNLGAPAAFKYFDTTIDRKRYTSTKEVLDATLIHQSITGLYETRIDLSQLGGDGGGGSEAAAKGGLLGRDLLTKLKAQIQFSTEGPQVTWEDRPAMCLVLNLEEEYRLHEKPVPPSIDPSWLQLFPMVWAEKAGMGLANQVPPVVVELKSDASPVAVRQYPMSKEAREGIRPHIQRFLDLGILVPCQSPWNTPLLPVKKPGTNDYRPVQDLREVNKRVQDIHPTVPNPYNLLSSLPPSHTWYSVLDLKDAFFCLKLHPNSQPLFAFEWRDPEKGNTGQLTWTRLPQGFKNSPTLFNEALHRDLASFRALNPQVVMLQYVDDLLVAAPTYRDCKEGTRRLLQELSKLGYRVSAKKAQLCREEVTYLGYLLKGGKRWLTPARKATVMKIPTPTTPRQVREFLGKAGFCRLFIPGFASLAAPLYPLTRPKVPFTWTEAHQEAFGRIKEALLSAPALALPDLTKPFALYVDEKEGVARGVLTQTLGPWRRPVAYLSKKLDPVASGWPTCLKAIAAVALLLKDADKLTLGQNVLVIAPHNLESIVRQPPDRWMTNARMTHYQSLLLNERVSFAPPAILNPATLLPVESDDTPIHICSEILAEETGTRPDLRDQPLPGVPAWYTDGSSFIMDGRRQAGAAIVDNKRTVWASNLPEGTSAQKAELIALTQALRLAEGKSINIYTDSRYAFATAHVHGAIYKQRGWLTSAGKDIKNKEEILALLEAIHLPKRVAIIHCPGHQRGTDPVATGNRKADEAAKQAAQSTRILTETTKNAGKRTADGSEFEKRTADGSEFESPKKKAKVE

SEQ ID NO: 1744 - protein, 2141 aa, synthetic construct
MPAAKRVKLDGGDKKYSIGLDIGTNSVGWAVITDEYKVPSKKFKVLGNTDRHSIKKNLIGALLFDSGETAEATRLKRTARRRYTRRKNRICYLQEIFSNEMAKVDDSFFHRLEESFLVEEDKKHERHPIFGNIVDEVAYHEKYPTIYHLRKKLVDSTDKADLRLIYLALAHMIKFRGHFLIEGDLNPDNSDVDKLFIQLVQTYNQLFEENPINASGVDAKAILSARLSKSRRLENLIAQLPGEKKNGLFGNLIALSLGLTPNFKSNFDLAEDAKLQLSKDTYDDDLDNLLAQIGDQYADLFLAAKNLSDAILLSDILRVNTEITKAPLSASMIKRYDEHHQDLTLLKALVRQQLPEKYKEIFFDQSKNGYAGYIDGGASQEEFYKFIKPILEKMDGTEELLVKLNREDLLRKQRTFDNGSIPHQIHLGELHAILRRQEDFYPFLKDNREKIEKILTFRIPYYVGPLARGNSRFAWMTRKSEETITPWNFEEVVDKGASAQSFIERMTNFDKNLPNEKVLPKHSLLYEYFTVYNELTKVKYVTEGMRKPAFLSGEQKKAIVDLLFKTNRKVTVKQLKEDYFKKIECFDSVEISGVEDRFNASLGTYHDLLKIIKDKDFLDNEENEDILEDIVLTLTLFEDREMIEERLKTYAHLFDDKVMKQLKRRRYTGWGRLSRKLINGIRDKQSGKTILDFLKSDGFANRNFMQLIHDDSLTFKEDIQKAQVSGQGDSLHEHIANLAGSPAIKKGILQTVKVVDELVKVMGRHKPENIVIEMARENQTTQKGQKNSRERMKRIEEGIKELGSQILKEHPVENTQLQNEKLYLYYLQNGRDMYVDQELDINRLSDYDVDHIVPQSFLKDDSIDNKVLTRSDKARGKSDNVPSEEVVKKMKNYWRQLLNAKLITQRKFDNLTKAERGGLSELDKAGFIKRQLVETRQITKHVAQILDSRMNTKYDENDKLIREVKVITLKSKLVSDFRKDFQFYKVREINNYHHAHDAYLNAVVGTALIKKYPKLESEFVYGDYKVYDVRKMIAKSEQEIGKATAKYFFYSNIMNFFKTEITLANGEIRKRPLIETNGETGEIVWDKGRDFATVRKVLSMPQVNIVKKTEVQTGGFSKESILPKRNSDKLIARKKDWDPKKYGGFDSPTVAYSVLVVAKVEKGKSKKLKSVKELLGITIMERSSFEKNPIDFLEAKGYKEVKKDLIIKLPKYSLFELENGRKRMLASAGELQKGNELALPSKYVNFLYLASHYEKLKGSPEDNEQKQLFVEQHKHYLDEIIEQISEFSKRVILADANLDKVLSAYNKHRDKPIREQAENIIHLFTLTNLGAPAAFKYFDTTIDRKRYTSTKEVLDATLIHQSITGLYETRIDLSQLGGDGGEAAAKEAAAKEAAAKEAAAKEAAAKGGLLGRDLLTKLKAQIQFSTEGPQVTWEDRPAMCLVLNLEEEYRLHEKPVPPSIDPSWLQLFPMVWAEKAGMGLANQVPPVVVELKSDASPVAVRQYPMSKEAREGIRPHIQRFLDLGILVPCQSPWNTPLLPVKKPGTNDYRPVQDLREVNKRVQDIHPTVPNPYNLLSSLPPSHTWYSVLDLKDAFFCLKLHPNSQPLFAFEWRDPEKGNTGQLTWTRLPQGFKNSPTLFNEALHRDLASFRALNPQVVMLQYVDDLLVAAPTYRDCKEGTRRLLQELSKLGYRVSAKKAQLCREEVTYLGYLLKGGKRWLTPARKATVMKIPTPTTPRQVREFLGKAGFCRLFIPGFASLAAPLYPLTRPKVPFTWTEAHQEAFGRIKEALLSAPALALPDLTKPFALYVDEKEGVARGVLTQTLGPWRRPVAYLSKKLDPVASGWPTCLKAIAAVALLLKDADKLTLGQNVLVIAPHNLESIVRQPPDRWMTNARMTHYQSLLLNERVSFAPPAILNPATLLPVESDDTPIHICSEILAEETGTRPDLRDQPLPGVPAWYTDGSSFIMDGRRQAGAAIVDNKRTVWASNLPEGTSAQKAELIALTQALRLAEGKSINIYTDSRYAFATAHVHGAIYKQRGWLTSAGKDIKNKEEILALLEAIHLPKRVAIIHCPGHQRGTDPVATGNRKADEAAKQAAQSTRILTETTKNAGKRTADGSEFEKRTADGSEFESPKKKAKVE

SEQ ID NO: 1745 - protein, 2125 aa, synthetic construct
MPAAKRVKLDGGDKKYSIGLDIGTNSVGWAVITDEYKVPSKKFKVLGNTDRHSIKKNLIGALLFDSGETAEATRLKRTARRRYTRRKNRICYLQEIFSNEMAKVDDSFFHRLEESFLVEEDKKHERHPIFGNIVDEVAYHEKYPTIYHLRKKLVDSTDKADLRLIYLALAHMIKFRGHFLIEGDLNPDNSDVDKLFIQLVQTYNQLFEENPINASGVDAKAILSARLSKSRRLENLIAQLPGEKKNGLFGNLIALSLGLTPNFKSNFDLAEDAKLQLSKDTYDDDLDNLLAQIGDQYADLFLAAKNLSDAILLSDILRVNTEITKAPLSASMIKRYDEHHQDLTLLKALVRQQLPEKYKEIFFDQSKNGYAGYIDGGASQEEFYKFIKPILEKMDGTEELLVKLNREDLLRKQRTFDNGSIPHQIHLGELHAILRRQEDFYPFLKDNREKIEKILTFRIPYYVGPLARGNSRFAWMTRKSEETITPWNFEEVVDKGASAQSFIERMTNFDKNLPNEKVLPKHSLLYEYFTVYNELTKVKYVTEGMRKPAFLSGEQKKAIVDLLFKTNRKVTVKQLKEDYFKKIECFDSVEISGVEDRFNASLGTYHDLLKIIKDKDFLDNEENEDILEDIVLTLTLFEDREMIEERLKTYAHLFDDKVMKQLKRRRYTGWGRLSRKLINGIRDKQSGKTILDFLKSDGFANRNFMQLIHDDSLTFKEDIQKAQVSGQGDSLHEHIANLAGSPAIKKGILQTVKVVDELVKVMGRHKPENIVIEMARENQTTQKGQKNSRERMKRIEEGIKELGSQILKEHPVENTQLQNEKLYLYYLQNGRDMYVDQELDINRLSDYDVDHIVPQSFLKDDSIDNKVLTRSDKARGKSDNVPSEEVVKKMKNYWRQLLNAKLITQRKFDNLTKAERGGLSELDKAGFIKRQLVETRQITKHVAQILDSRMNTKYDENDKLIREVKVITLKSKLVSDFRKDFQFYKVREINNYHHAHDAYLNAVVGTALIKKYPKLESEFVYGDYKVYDVRKMIAKSEQEIGKATAKYFFYSNIMNFFKTEITLANGEIRKRPLIETNGETGEIVWDKGRDFATVRKVLSMPQVNIVKKTEVQTGGFSKESILPKRNSDKLIARKKDWDPKKYGGFDSPTVAYSVLVVAKVEKGKSKKLKSVKELLGITIMERSSFEKNPIDFLEAKGYKEVKKDLIIKLPKYSLFELENGRKRMLASAGELQKGNELALPSKYVNFLYLASHYEKLKGSPEDNEQKQLFVEQHKHYLDEIIEQISEFSKRVILADANLDKVLSAYNKHRDKPIREQAENIIHLFTLTNLGAPAAFKYFDTTIDRKRYTSTKEVLDATLIHQSITGLYETRIDLSQLGGDGGGGGGGSPAPGGLLGRDLLTKLKAQIQFSTEGPQVTWEDRPAMCLVLNLEEEYRLHEKPVPPSIDPSWLQLFPMVWAEKAGMGLANQVPPVVVELKSDASPVAVRQYPMSKEAREGIRPHIQRFLDLGILVPCQSPWNTPLLPVKKPGTNDYRPVQDLREVNKRVQDIHPTVPNPYNLLSSLPPSHTWYSVLDLKDAFFCLKLHPNSQPLFAFEWRDPEKGNTGQLTWTRLPQGFKNSPTLFNEALHRDLASFRALNPQVVMLQYVDDLLVAAPTYRDCKEGTRRLLQELSKLGYRVSAKKAQLCREEVTYLGYLLKGGKRWLTPARKATVMKIPTPTTPRQVREFLGKAGFCRLFIPGFASLAAPLYPLTRPKVPFTWTEAHQEAFGRIKEALLSAPALALPDLTKPFALYVDEKEGVARGVLTQTLGPWRRPVAYLSKKLDPVASGWPTCLKAIAAVALLLKDADKLTLGQNVLVIAPHNLESIVRQPPDRWMTNARMTHYQSLLLNERVSFAPPAILNPATLLPVESDDTPIHICSEILAEETGTRPDLRDQPLPGVPAWYTDGSSFIMDGRRQAGAAIVDNKRTVWASNLPEGTSAQKAELIALTQALRLAEGKSINIYTDSRYAFATAHVHGAIYKQRGWLTSAGKDIKNKEEILALLEAIHLPKRVAIIHCPGHQRGTDPVATGNRKADEAAKQAAQSTRILTETTKNAGKRTADGSEFEKRTADGSEFESPKKKAKVE

SEQ ID NO: 1746 - protein, 2124 aa, synthetic construct
MPAAKRVKLDGGDKKYSIGLDIGTNSVGWAVITDEYKVPSKKFKVLGNTDRHSIKKNLIGALLFDSGETAEATRLKRTARRRYTRRKNRICYLQEIFSNEMAKVDDSFFHRLEESFLVEEDKKHERHPIFGNIVDEVAYHEKYPTIYHLRKKLVDSTDKADLRLIYLALAHMIKFRGHFLIEGDLNPDNSDVDKLFIQLVQTYNQLFEENPINASGVDAKAILSARLSKSRRLENLIAQLPGEKKNGLFGNLIALSLGLTPNFKSNFDLAEDAKLQLSKDTYDDDLDNLLAQIGDQYADLFLAAKNLSDAILLSDILRVNTEITKAPLSASMIKRYDEHHQDLTLLKALVRQQLPEKYKEIFFDQSKNGYAGYIDGGASQEEFYKFIKPILEKMDGTEELLVKLNREDLLRKQRTFDNGSIPHQIHLGELHAILRRQEDFYPFLKDNREKIEKILTFRIPYYVGPLARGNSRFAWMTRKSEETITPWNFEEVVDKGASAQSFIERMTNFDKNLPNEKVLPKHSLLYEYFTVYNELTKVKYVTEGMRKPAFLSGEQKKAIVDLLFKTNRKVTVKQLKEDYFKKIECFDSVEISGVEDRFNASLGTYHDLLKIIKDKDFLDNEENEDILEDIVLTLTLFEDREMIEERLKTYAHLFDDKVMKQLKRRRYTGWGRLSRKLINGIRDKQSGKTILDFLKSDGFANRNFMQLIHDDSLTFKEDIQKAQVSGQGDSLHEHIANLAGSPAIKKGILQTVKVVDELVKVMGRHKPENIVIEMARENQTTQKGQKNSRERMKRIEEGIKELGSQILKEHPVENTQLQNEKLYLYYLQNGRDMYVDQELDINRLSDYDVDHIVPQSFLKDDSIDNKVLTRSDKARGKSDNVPSEEVVKKMKNYWRQLLNAKLITQRKFDNLTKAERGGLSELDKAGFIKRQLVETRQITKHVAQILDSRMNTKYDENDKLIREVKVITLKSKLVSDFRKDFQFYKVREINNYHHAHDAYLNAVVGTALIKKYPKLESEFVYGDYKVYDVRKMIAKSEQEIGKATAKYFFYSNIMNFFKTEITLANGEIRKRPLIETNGETGEIVWDKGRDFATVRKVLSMPQVNIVKKTEVQTGGFSKESILPKRNSDKLIARKKDWDPKKYGGFDSPTVAYSVLVVAKVEKGKSKKLKSVKELLGITIMERSSFEKNPIDFLEAKGYKEVKKDLIIKLPKYSLFELENGRKRMLASAGELQKGNELALPSKYVNFLYLASHYEKLKGSPEDNEQKQLFVEQHKHYLDEIIEQISEFSKRVILADANLDKVLSAYNKHRDKPIREQAENIIHLFTLTNLGAPAAFKYFDTTIDRKRYTSTKEVLDATLIHQSITGLYETRIDLSQLGGDGGEAAAKGGGGGLLGRDLLTKLKAQIQFSTEGPQVTWEDRPAMCLVLNLEEEYRLHEKPVPPSIDPSWLQLFPMVWAEKAGMGLANQVPPVVVELKSDASPVAVRQYPMSKEAREGIRPHIQRFLDLGILVPCQSPWNTPLLPVKKPGTNDYRPVQDLREVNKRVQDIHPTVPNPYNLLSSLPPSHTWYSVLDLKDAFFCLKLHPNSQPLFAFEWRDPEKGNTGQLTWTRLPQGFKNSPTLFNEALHRDLASFRALNPQVVMLQYVDDLLVAAPTYRDCKEGTRRLLQELSKLGYRVSAKKAQLCREEVTYLGYLLKGGKRWLTPARKATVMKIPTPTTPRQVREFLGKAGFCRLFIPGFASLAAPLYPLTRPKVPFTWTEAHQEAFGRIKEALLSAPALALPDLTKPFALYVDEKEGVARGVLTQTLGPWRRPVAYLSKKLDPVASGWPTCLKAIAAVALLLKDADKLTLGQNVLVIAPHNLESIVRQPPDRWMTNARMTHYQSLLLNERVSFAPPAILNPATLLPVESDDTPIHICSEILAEETGTRPDLRDQPLPGVPAWYTDGSSFIMDGRRQAGAAIVDNKRTVWASNLPEGTSAQKAELIALTQALRLAEGKSINIYTDSRYAFATAHVHGAIYKQRGWLTSAGKDIKNKEEILALLEAIHLPKRVAIIHCPGHQRGTDPVATGNRKADEAAKQAAQSTRILTETTKNAGKRTADGSEFEKRTADGSEFESPKKKAKVE

SEQ ID NO: 1747 - protein, 2122 aa, synthetic construct
MPAAKRVKLDGGDKKYSIGLDIGTNSVGWAVITDEYKVPSKKFKVLGNTDRHSIKKNLIGALLFDSGETAEATRLKRTARRRYTRRKNRICYLQEIFSNEMAKVDDSFFHRLEESFLVEEDKKHERHPIFGNIVDEVAYHEKYPTIYHLRKKLVDSTDKADLRLIYLALAHMIKFRGHFLIEGDLNPDNSDVDKLFIQLVQTYNQLFEENPINASGVDAKAILSARLSKSRRLENLIAQLPGEKKNGLFGNLIALSLGLTPNFKSNFDLAEDAKLQLSKDTYDDDLDNLLAQIGDQYADLFLAAKNLSDAILLSDILRVNTEITKAPLSASMIKRYDEHHQDLTLLKALVRQQLPEKYKEIFFDQSKNGYAGYIDGGASQEEFYKFIKPILEKMDGTEELLVKLNREDLLRKQRTFDNGSIPHQIHLGELHAILRRQEDFYPFLKDNREKIEKILTFRIPYYVGPLARGNSRFAWMTRKSEETITPWNFEEVVDKGASAQSFIERMTNFDKNLPNEKVLPKHSLLYEYFTVYNELTKVKYVTEGMRKPAFLSGEQKKAIVDLLFKTNRKVTVKQLKEDYFKKIECFDSVEISGVEDRFNASLGTYHDLLKIIKDKDFLDNEENEDILEDIVLTLTLFEDREMIEERLKTYAHLFDDKVMKQLKRRRYTGWGRLSRKLINGIRDKQSGKTILDFLKSDGFANRNFMQLIHDDSLTFKEDIQKAQVSGQGDSLHEHIANLAGSPAIKKGILQTVKVVDELVKVMGRHKPENIVIEMARENQTTQKGQKNSRERMKRIEEGIKELGSQILKEHPVENTQLQNEKLYLYYLQNGRDMYVDQELDINRLSDYDVDHIVPQSFLKDDSIDNKVLTRSDKARGKSDNVPSEEVVKKMKNYWRQLLNAKLITQRKFDNLTKAERGGLSELDKAGFIKRQLVETRQITKHVAQILDSRMNTKYDENDKLIREVKVITLKSKLVSDFRKDFQFYKVREINNYHHAHDAYLNAVVGTALIKKYPKLESEFVYGDYKVYDVRKMIAKSEQEIGKATAKYFFYSNIMNFFKTEITLANGEIRKRPLIETNGETGEIVWDKGRDFATVRKVLSMPQVNIVKKTEVQTGGFSKESILPKRNSDKLIARKKDWDPKKYGGFDSPTVAYSVLVVAKVEKGKSKKLKSVKELLGITIMERSSFEKNPIDFLEAKGYKEVKKDLIIKLPKYSLFELENGRKRMLASAGELQKGNELALPSKYVNFLYLASHYEKLKGSPEDNEQKQLFVEQHKHYLDEIIEQISEFSKRVILADANLDKVLSAYNKHRDKPIREQAENIIHLFTLTNLGAPAAFKYFDTTIDRKRYTSTKEVLDATLIHQSITGLYETRIDLSQLGGDGGGSSGSSGGLLGRDLLTKLKAQIQFSTEGPQVTWEDRPAMCLVLNLEEEYRLHEKPVPPSIDPSWLQLFPMVWAEKAGMGLANQVPPVVVELKSDASPVAVRQYPMSKEAREGIRPHIQRFLDLGILVPCQSPWNTPLLPVKKPGTNDYRPVQDLREVNKRVQDIHPTVPNPYNLLSSLPPSHTWYSVLDLKDAFFCLKLHPNSQPLFAFEWRDPEKGNTGQLTWTRLPQGFKNSPTLFNEALHRDLASFRALNPQVVMLQYVDDLLVAAPTYRDCKEGTRRLLQELSKLGYRVSAKKAQLCREEVTYLGYLLKGGKRWLTPARKATVMKIPTPTTPRQVREFLGKAGFCRLFIPGFASLAAPLYPLTRPKVPFTWTEAHQEAFGRIKEALLSAPALALPDLTKPFALYVDEKEGVARGVLTQTLGPWRRPVAYLSKKLDPVASGWPTCLKAIAAVALLLKDADKLTLGQNVLVIAPHNLESIVRQPPDRWMTNARMTHYQSLLLNERVSFAPPAILNPATLLPVESDDTPIHICSEILAEETGTRPDLRDQPLPGVPAWYTDGSSFIMDGRRQAGAAIVDNKRTVWASNLPEGTSAQKAELIALTQALRLAEGKSINIYTDSRYAFATAHVHGAIYKQRGWLTSAGKDIKNKEEILALLEAIHLPKRVAIIHCPGHQRGTDPVATGNRKADEAAKQAAQSTRILTETTKNAGKRTADGSEFEKRTADGSEFESPKKKAKVE

SEQ ID NO: 1748 - protein, 2122 aa, synthetic construct
MPAAKRVKLDGGDKKYSIGLDIGTNSVGWAVITDEYKVPSKKFKVLGNTDRHSIKKNLIGALLFDSGETAEATRLKRTARRRYTRRKNRICYLQEIFSNEMAKVDDSFFHRLEESFLVEEDKKHERHPIFGNIVDEVAYHEKYPTIYHLRKKLVDSTDKADLRLIYLALAHMIKFRGHFLIEGDLNPDNSDVDKLFIQLVQTYNQLFEENPINASGVDAKAILSARLSKSRRLENLIAQLPGEKKNGLFGNLIALSLGLTPNFKSNFDLAEDAKLQLSKDTYDDDLDNLLAQIGDQYADLFLAAKNLSDAILLSDILRVNTEITKAPLSASMIKRYDEHHQDLTLLKALVRQQLPEKYKEIFFDQSKNGYAGYIDGGASQEEFYKFIKPILEKMDGTEELLVKLNREDLLRKQRTFDNGSIPHQIHLGELHAILRRQEDFYPFLKDNREKIEKILTFRIPYYVGPLARGNSRFAWMTRKSEETITPWNFEEVVDKGASAQSFIERMTNFDKNLPNEKVLPKHSLLYEYFTVYNELTKVKYVTEGMRKPAFLSGEQKKAIVDLLFKTNRKVTVKQLKEDYFKKIECFDSVEISGVEDRFNASLGTYHDLLKIIKDKDFLDNEENEDILEDIVLTLTLFEDREMIEERLKTYAHLFDDKVMKQLKRRRYTGWGRLSRKLINGIRDKQSGKTILDFLKSDGFANRNFMQLIHDDSLTFKEDIQKAQVSGQGDSLHEHIANLAGSPAIKKGILQTVKVVDELVKVMGRHKPENIVIEMARENQTTQKGQKNSRERMKRIEEGIKELGSQILKEHPVENTQLQNEKLYLYYLQNGRDMYVDQELDINRLSDYDVDHIVPQSFLKDDSIDNKVLTRSDKARGKSDNVPSEEVVKKMKNYWRQLLNAKLITQRKFDNLTKAERGGLSELDKAGFIKRQLVETRQITKHVAQILDSRMNTKYDENDKLIREVKVITLKSKLVSDFRKDFQFYKVREINNYHHAHDAYLNAVVGTALIKKYPKLESEFVYGDYKVYDVRKMIAKSEQEIGKATAKYFFYSNIMNFFKTEITLANGEIRKRPLIETNGETGEIVWDKGRDFATVRKVLSMPQVNIVKKTEVQTGGFSKESILPKRNSDKLIARKKDWDPKKYGGFDSPTVAYSVLVVAKVEKGKSKKLKSVKELLGITIMERSSFEKNPIDFLEAKGYKEVKKDLIIKLPKYSLFELENGRKRMLASAGELQKGNELALPSKYVNFLYLASHYEKLKGSPEDNEQKQLFVEQHKHYLDEIIEQISEFSKRVILADANLDKVLSAYNKHRDKPIREQAENIIHLFTLTNLGAPAAFKYFDTTIDRKRYTSTKEVLDATLIHQSITGLYETRIDLSQLGGDGGGGGGGSGGLLGRDLLTKLKAQIQFSTEGPQVTWEDRPAMCLVLNLEEEYRLHEKPVPPSIDPSWLQLFPMVWAEKAGMGLANQVPPVVVELKSDASPVAVRQYPMSKEAREGIRPHIQRFLDLGILVPCQSPWNTPLLPVKKPGTNDYRPVQDLREVNKRVQDIHPTVPNPYNLLSSLPPSHTWYSVLDLKDAFFCLKLHPNSQPLFAFEWRDPEKGNTGQLTWTRLPQGFKNSPTLFNEALHRDLASFRALNPQVVMLQYVDDLLVAAPTYRDCKEGTRRLLQELSKLGYRVSAKKAQLCREEVTYLGYLLKGGKRWLTPARKATVMKIPTPTTPRQVREFLGKAGFCRLFIPGFASLAAPLYPLTRPKVPFTWTEAHQEAFGRIKEALLSAPALALPDLTKPFALYVDEKEGVARGVLTQTLGPWRRPVAYLSKKLDPVASGWPTCLKAIAAVALLLKDADKLTLGQNVLVIAPHNLESIVRQPPDRWMTNARMTHYQSLLLNERVSFAPPAILNPATLLPVESDDTPIHICSEILAEETGTRPDLRDQPLPGVPAWYTDGSSFIMDGRRQAGAAIVDNKRTVWASNLPEGTSAQKAELIALTQALRLAEGKSINIYTDSRYAFATAHVHGAIYKQRGWLTSAGKDIKNKEEILALLEAIHLPKRVAIIHCPGHQRGTDPVATGNRKADEAAKQAAQSTRILTETTKNAGKRTADGSEFEKRTADGSEFESPKKKAKVE

SEQ ID NO: 1749 - protein, 2125 aa, synthetic construct
MPAAKRVKLDGGDKKYSIGLDIGTNSVGWAVITDEYKVPSKKFKVLGNTDRHSIKKNLIGALLFDSGETAEATRLKRTARRRYTRRKNRICYLQEIFSNEMAKVDDSFFHRLEESFLVEEDKKHERHPIFGNIVDEVAYHEKYPTIYHLRKKLVDSTDKADLRLIYLALAHMIKFRGHFLIEGDLNPDNSDVDKLFIQLVQTYNQLFEENPINASGVDAKAILSARLSKSRRLENLIAQLPGEKKNGLFGNLIALSLGLTPNFKSNFDLAEDAKLQLSKDTYDDDLDNLLAQIGDQYADLFLAAKNLSDAILLSDILRVNTEITKAPLSASMIKRYDEHHQDLTLLKALVRQQLPEKYKEIFFDQSKNGYAGYIDGGASQEEFYKFIKPILEKMDGTEELLVKLNREDLLRKQRTFDNGSIPHQIHLGELHAILRRQEDFYPFLKDNREKIEKILTFRIPYYVGPLARGNSRFAWMTRKSEETITPWNFEEVVDKGASAQSFIERMTNFDKNLPNEKVLPKHSLLYEYFTVYNELTKVKYVTEGMRKPAFLSGEQKKAIVDLLFKTNRKVTVKQLKEDYFKKIECFDSVEISGVEDRFNASLGTYHDLLKIIKDKDFLDNEENEDILEDIVLTLTLFEDREMIEERLKTYAHLFDDKVMKQLKRRRYTGWGRLSRKLINGIRDKQSGKTILDFLKSDGFANRNFMQLIHDDSLTFKEDIQKAQVSGQGDSLHEHIANLAGSPAIKKGILQTVKVVDELVKVMGRHKPENIVIEMARENQTTQKGQKNSRERMKRIEEGIKELGSQILKEHPVENTQLQNEKLYLYYLQNGRDMYVDQELDINRLSDYDVDHIVPQSFLKDDSIDNKVLTRSDKARGKSDNVPSEEVVKKMKNYWRQLLNAKLITQRKFDNLTKAERGGLSELDKAGFIKRQLVETRQITKHVAQILDSRMNTKYDENDKLIREVKVITLKSKLVSDFRKDFQFYKVREINNYHHAHDAYLNAVVGTALIKKYPKLESEFVYGDYKVYDVRKMIAKSEQEIGKATAKYFFYSNIMNFFKTEITLANGEIRKRPLIETNGETGEIVWDKGRDFATVRKVLSMPQVNIVKKTEVQTGGFSKESILPKRNSDKLIARKKDWDPKKYGGFDSPTVAYSVLVVAKVEKGKSKKLKSVKELLGITIMERSSFEKNPIDFLEAKGYKEVKKDLIIKLPKYSLFELENGRKRMLASAGELQKGNELALPSKYVNFLYLASHYEKLKGSPEDNEQKQLFVEQHKHYLDEIIEQISEFSKRVILADANLDKVLSAYNKHRDKPIREQAENIIHLFTLTNLGAPAAFKYFDTTIDRKRYTSTKEVLDATLIHQSITGLYETRIDLSQLGGDGGPAPGSSGGSGGLLGRDLLTKLKAQIQFSTEGPQVTWEDRPAMCLVLNLEEEYRLHEKPVPPSIDPSWLQLFPMVWAEKAGMGLANQVPPVVVELKSDASPVAVRQYPMSKEAREGIRPHIQRFLDLGILVPCQSPWNTPLLPVKKPGTNDYRPVQDLREVNKRVQDIHPTVPNPYNLLSSLPPSHTWYSVLDLKDAFFCLKLHPNSQPLFAFEWRDPEKGNTGQLTWTRLPQGFKNSPTLFNEALHRDLASFRALNPQVVMLQYVDDLLVAAPTYRDCKEGTRRLLQELSKLGYRVSAKKAQLCREEVTYLGYLLKGGKRWLTPARKATVMKIPTPTTPRQVREFLGKAGFCRLFIPGFASLAAPLYPLTRPKVPFTWTEAHQEAFGRIKEALLSAPALALPDLTKPFALYVDEKEGVARGVLTQTLGPWRRPVAYLSKKLDPVASGWPTCLKAIAAVALLLKDADKLTLGQNVLVIAPHNLESIVRQPPDRWMTNARMTHYQSLLLNERVSFAPPAILNPATLLPVESDDTPIHICSEILAEETGTRPDLRDQPLPGVPAWYTDGSSFIMDGRRQAGAAIVDNKRTVWASNLPEGTSAQKAELIALTQALRLAEGKSINIYTDSRYAFATAHVHGAIYKQRGWLTSAGKDIKNKEEILALLEAIHLPKRVAIIHCPGHQRGTDPVATGNRKADEAAKQAAQSTRILTETTKNAGKRTADGSEFEKRTADGSEFESPKKKAKVE

SEQ ID NO: 1750 - protein, 2122 aa, synthetic construct
MPAAKRVKLDGGDKKYSIGLDIGTNSVGWAVITDEYKVPSKKFKVLGNTDRHSIKKNLIGALLFDSGETAEATRLKRTARRRYTRRKNRICYLQEIFSNEMAKVDDSFFHRLEESFLVEEDKKHERHPIFGNIVDEVAYHEKYPTIYHLRKKLVDSTDKADLRLIYLALAHMIKFRGHFLIEGDLNPDNSDVDKLFIQLVQTYNQLFEENPINASGVDAKAILSARLSKSRRLENLIAQLPGEKKNGLFGNLIALSLGLTPNFKSNFDLAEDAKLQLSKDTYDDDLDNLLAQIGDQYADLFLAAKNLSDAILLSDILRVNTEITKAPLSASMIKRYDEHHQDLTLLKALVRQQLPEKYKEIFFDQSKNGYAGYIDGGASQEEFYKFIKPILEKMDGTEELLVKLNREDLLRKQRTFDNGSIPHQIHLGELHAILRRQEDFYPFLKDNREKIEKILTFRIPYYVGPLARGNSRFAWMTRKSEETITPWNFEEVVDKGASAQSFIERMTNFDKNLPNEKVLPKHSLLYEYFTVYNELTKVKYVTEGMRKPAFLSGEQKKAIVDLLFKTNRKVTVKQLKEDYFKKIECFDSVEISGVEDRFNASLGTYHDLLKIIKDKDFLDNEENEDILEDIVLTLTLFEDREMIEERLKTYAHLFDDKVMKQLKRRRYTGWGRLSRKLINGIRDKQSGKTILDFLKSDGFANRNFMQLIHDDSLTFKEDIQKAQVSGQGDSLHEHIANLAGSPAIKKGILQTVKVVDELVKVMGRHKPENIVIEMARENQTTQKGQKNSRERMKRIEEGIKELGSQILKEHPVENTQLQNEKLYLYYLQNGRDMYVDQELDINRLSDYDVDHIVPQSFLKDDSIDNKVLTRSDKARGKSDNVPSEEVVKKMKNYWRQLLNAKLITQRKFDNLTKAERGGLSELDKAGFIKRQLVETRQITKHVAQILDSRMNTKYDENDKLIREVKVITLKSKLVSDFRKDFQFYKVREINNYHHAHDAYLNAVVGTALIKKYPKLESEFVYGDYKVYDVRKMIAKSEQEIGKATAKYFFYSNIMNFFKTEITLANGEIRKRPLIETNGETGEIVWDKGRDFATVRKVLSMPQVNIVKKTEVQTGGFSKESILPKRNSDKLIARKKDWDPKKYGGFDSPTVAYSVLVVAKVEKGKSKKLKSVKELLGITIMERSSFEKNPIDFLEAKGYKEVKKDLIIKLPKYSLFELENGRKRMLASAGELQKGNELALPSKYVNFLYLASHYEKLKGSPEDNEQKQLFVEQHKHYLDEIIEQISEFSKRVILADANLDKVLSAYNKHRDKPIREQAENIIHLFTLTNLGAPAAFKYFDTTIDRKRYTSTKEVLDATLIHQSITGLYETRIDLSQLGGDGGGGSGGSGGLLGRDLLTKLKAQIQFSTEGPQVTWEDRPAMCLVLNLEEEYRLHEKPVPPSIDPSWLQLFPMVWAEKAGMGLANQVPPVVVELKSDASPVAVRQYPMSKEAREGIRPHIQRFLDLGILVPCQSPWNTPLLPVKKPGTNDYRPVQDLREVNKRVQDIHPTVPNPYNLLSSLPPSHTWYSVLDLKDAFFCLKLHPNSQPLFAFEWRDPEKGNTGQLTWTRLPQGFKNSPTLFNEALHRDLASFRALNPQVVMLQYVDDLLVAAPTYRDCKEGTRRLLQELSKLGYRVSAKKAQLCREEVTYLGYLLKGGKRWLTPARKATVMKIPTPTTPRQVREFLGKAGFCRLFIPGFASLAAPLYPLTRPKVPFTWTEAHQEAFGRIKEALLSAPALALPDLTKPFALYVDEKEGVARGVLTQTLGPWRRPVAYLSKKLDPVASGWPTCLKAIAAVALLLKDADKLTLGQNVLVIAPHNLESIVRQPPDRWMTNARMTHYQSLLLNERVSFAPPAILNPATLLPVESDDTPIHICSEILAEETGTRPDLRDQPLPGVPAWYTDGSSFIMDGRRQAGAAIVDNKRTVWASNLPEGTSAQKAELIALTQALRLAEGKSINIYTDSRYAFATAHVHGAIYKQRGWLTSAGKDIKNKEEILALLEAIHLPKRVAIIHCPGHQRGTDPVATGNRKADEAAKQAAQSTRILTETTKNAGKRTADGSEFEKRTADGSEFESPKKKAKVE

SEQ ID NO: 1751 - protein, 2216 aa, synthetic construct
MPAAKRVKLDGGDKKYSIGLDIGTNSVGWAVITDEYKVPSKKFKVLGNTDRHSIKKNLIGALLFDSGETAEATRLKRTARRRYTRRKNRICYLQEIFSNEMAKVDDSFFHRLEESFLVEEDKKHERHPIFGNIVDEVAYHEKYPTIYHLRKKLVDSTDKADLRLIYLALAHMIKFRGHFLIEGDLNPDNSDVDKLFIQLVQTYNQLFEENPINASGVDAKAILSARLSKSRRLENLIAQLPGEKKNGLFGNLIALSLGLTPNFKSNFDLAEDAKLQLSKDTYDDDLDNLLAQIGDQYADLFLAAKNLSDAILLSDILRVNTEITKAPLSASMIKRYDEHHQDLTLLKALVRQQLPEKYKEIFFDQSKNGYAGYIDGGASQEEFYKFIKPILEKMDGTEELLVKLNREDLLRKQRTFDNGSIPHQIHLGELHAILRRQEDFYPFLKDNREKIEKILTFRIPYYVGPLARGNSRFAWMTRKSEETITPWNFEEVVDKGASAQSFIERMTNFDKNLPNEKVLPKHSLLYEYFTVYNELTKVKYVTEGMRKPAFLSGEQKKAIVDLLFKTNRKVTVKQLKEDYFKKIECFDSVEISGVEDRFNASLGTYHDLLKIIKDKDFLDNEENEDILEDIVLTLTLFEDREMIEERLKTYAHLFDDKVMKQLKRRRYTGWGRLSRKLINGIRDKQSGKTILDFLKSDGFANRNFMQLIHDDSLTFKEDIQKAQVSGQGDSLHEHIANLAGSPAIKKGILQTVKVVDELVKVMGRHKPENIVIEMARENQTTQKGQKNSRERMKRIEEGIKELGSQILKEHPVENTQLQNEKLYLYYLQNGRDMYVDQELDINRLSDYDVDHIVPQSFLKDDSIDNKVLTRSDKARGKSDNVPSEEVVKKMKNYWRQLLNAKLITQRKFDNLTKAERGGLSELDKAGFIKRQLVETRQITKHVAQILDSRMNTKYDENDKLIREVKVITLKSKLVSDFRKDFQFYKVREINNYHHAHDAYLNAVVGTALIKKYPKLESEFVYGDYKVYDVRKMIAKSEQEIGKATAKYFFYSNIMNFFKTEITLANGEIRKRPLIETNGETGEIVWDKGRDFATVRKVLSMPQVNIVKKTEVQTGGFSKESILPKRNSDKLIARKKDWDPKKYGGFDSPTVAYSVLVVAKVEKGKSKKLKSVKELLGITIMERSSFEKNPIDFLEAKGYKEVKKDLIIKLPKYSLFELENGRKRMLASAGELQKGNELALPSKYVNFLYLASHYEKLKGSPEDNEQKQLFVEQHKHYLDEIIEQISEFSKRVILADANLDKVLSAYNKHRDKPIREQAENIIHLFTLTNLGAPAAFKYFDTTIDRKRYTSTKEVLDATLIHQSITGLYETRIDLSQLGGDGGGGGGGSGSSGGTLGDQGSRGSDPLPEPRVTLTVEGIPTEFLVNTGAEHSVLTKPMGKMGSKRTVVAGATGSKVYPWTTKRLLKIGQKQVTHSFLVIPECPAPLLGRDLLTKLKAQIQFSTEGPQVTWEDRPAMCLVLNLEEEYRLHEKPVPPSIDPSWLQLFPMVWAEKAGMGLANQVPPVVVELKSDASPVAVRQYPMSKEAREGIRPHIQRFLDLGILVPCQSPWNTPLLPVKKPGTNDYRPVQDLREVNKRVQDIHPTVPNPYNLLSSLPPSHTWYSVLDLKDAFFCLKLHPNSQPLFAFEWRDPEKGNTGQLTWTRLPQGFKNSPTLFNEALHRDLASFRALNPQVVMLQYVDDLLVAAPTYRDCKEGTRRLLQELSKLGYRVSAKKAQLCREEVTYLGYLLKGGKRWLTPARKATVMKIPTPTTPRQVREFLGTAGFCRLWIPGFASLAAPLYPLTRPKVPFTWTEAHQEAFGRIKEALLSAPALALPDLTKPFALYVDEKEGVARGVLTQTLGPWRRPVAYLSKKLDPVASGWPTCLKAIAAVALLLKDADKLTLGQNVLVIAPHNLESIVRQPPDRWMTNARMTHYQSLLLNERVSFAPPAILNPATLLPVESDDTPIHICSEILAEETGTRPDLRDQPLPGVPAWYTDGSSFIMDGRRQAGAAIVDNKRTVWASNLPEGTSAQKAELIALTQALRLAEGKSINIYTDSRYAFATAHVHGAIYKQRGWLTSAGKDIKNKEEILALLEAIHLPKRVAIIHCPGHQRGTDPVATGNRKADEAAKQAAQSTRILTETTKNAGKRTADGSEFEKRTADGSEFESPKKKAKVE

SEQ ID NO: 1752 - protein, 2237 aa, synthetic construct
MPAAKRVKLDGGDKKYSIGLDIGTNSVGWAVITDEYKVPSKKFKVLGNTDRHSIKKNLIGALLFDSGETAEATRLKRTARRRYTRRKNRICYLQEIFSNEMAKVDDSFFHRLEESFLVEEDKKHERHPIFGNIVDEVAYHEKYPTIYHLRKKLVDSTDKADLRLIYLALAHMIKFRGHFLIEGDLNPDNSDVDKLFIQLVQTYNQLFEENPINASGVDAKAILSARLSKSRRLENLIAQLPGEKKNGLFGNLIALSLGLTPNFKSNFDLAEDAKLQLSKDTYDDDLDNLLAQIGDQYADLFLAAKNLSDAILLSDILRVNTEITKAPLSASMIKRYDEHHQDLTLLKALVRQQLPEKYKEIFFDQSKNGYAGYIDGGASQEEFYKFIKPILEKMDGTEELLVKLNREDLLRKQRTFDNGSIPHQIHLGELHAILRRQEDFYPFLKDNREKIEKILTFRIPYYVGPLARGNSRFAWMTRKSEETITPWNFEEVVDKGASAQSFIERMTNFDKNLPNEKVLPKHSLLYEYFTVYNELTKVKYVTEGMRKPAFLSGEQKKAIVDLLFKTNRKVTVKQLKEDYFKKIECFDSVEISGVEDRFNASLGTYHDLLKIIKDKDFLDNEENEDILEDIVLTLTLFEDREMIEERLKTYAHLFDDKVMKQLKRRRYTGWGRLSRKLINGIRDKQSGKTILDFLKSDGFANRNFMQLIHDDSLTFKEDIQKAQVSGQGDSLHEHIANLAGSPAIKKGILQTVKVVDELVKVMGRHKPENIVIEMARENQTTQKGQKNSRERMKRIEEGIKELGSQILKEHPVENTQLQNEKLYLYYLQNGRDMYVDQELDINRLSDYDVDHIVPQSFLKDDSIDNKVLTRSDKARGKSDNVPSEEVVKKMKNYWRQLLNAKLITQRKFDNLTKAERGGLSELDKAGFIKRQLVETRQITKHVAQILDSRMNTKYDENDKLIREVKVITLKSKLVSDFRKDFQFYKVREINNYHHAHDAYLNAVVGTALIKKYPKLESEFVYGDYKVYDVRKMIAKSEQEIGKATAKYFFYSNIMNFFKTEITLANGEIRKRPLIETNGETGEIVWDKGRDFATVRKVLSMPQVNIVKKTEVQTGGFSKESILPKRNSDKLIARKKDWDPKKYGGFDSPTVAYSVLVVAKVEKGKSKKLKSVKELLGITIMERSSFEKNPIDFLEAKGYKEVKKDLIIKLPKYSLFELENGRKRMLASAGELQKGNELALPSKYVNFLYLASHYEKLKGSPEDNEQKQLFVEQHKHYLDEIIEQISEFSKRVILADANLDKVLSAYNKHRDKPIREQAENIIHLFTLTNLGAPAAFKYFDTTIDRKRYTSTKEVLDATLIHQSITGLYETRIDLSQLGGDGGGGGGSGGGGSGGGGSGGGGSGGGGSGGGGSGGTLGDQGSRGSDPLPEPRVTLTVEGIPTEFLVNTGAEHSVLTKPMGKMGSKRTVVAGATGSKVYPWTTKRLLKIGQKQVTHSFLVIPECPAPLLGRDLLTKLKAQIQFSTEGPQVTWEDRPAMCLVLNLEEEYRLHEKPVPPSIDPSWLQLFPMVWAEKAGMGLANQVPPVVVELKSDASPVAVRQYPMSKEAREGIRPHIQRFLDLGILVPCQSPWNTPLLPVKKPGTNDYRPVQDLREVNKRVQDIHPTVPNPYNLLSSLPPSHTWYSVLDLKDAFFCLKLHPNSQPLFAFEWRDPEKGNTGQLTWTRLPQGFKNSPTLFNEALHRDLASFRALNPQVVMLQYVDDLLVAAPTYRDCKEGTRRLLQELSKLGYRVSAKKAQLCREEVTYLGYLLKGGKRWLTPARKATVMKIPTPTTPRQVREFLGTAGFCRLWIPGFASLAAPLYPLTRPKVPFTWTEAHQEAFGRIKEALLSAPALALPDLTKPFALYVDEKEGVARGVLTQTLGPWRRPVAYLSKKLDPVASGWPTCLKAIAAVALLLKDADKLTLGQNVLVIAPHNLESIVRQPPDRWMTNARMTHYQSLLLNERVSFAPPAILNPATLLPVESDDTPIHICSEILAEETGTRPDLRDQPLPGVPAWYTDGSSFIMDGRRQAGAAIVDNKRTVWASNLPEGTSAQKAELIALTQALRLAEGKSINIYTDSRYAFATAHVHGAIYKQRGWLTSAGKDIKNKEEILALLEAIHLPKRVAIIHCPGHQRGTDPVATGNRKADEAAKQAAQSTRILTETTKNAGKRTADGSEFEKRTADGSEFESPKKKAKVE

SEQ ID NO: 1753 - protein, 2218 aa, synthetic construct
MPAAKRVKLDGGDKKYSIGLDIGTNSVGWAVITDEYKVPSKKFKVLGNTDRHSIKKNLIGALLFDSGETAEATRLKRTARRRYTRRKNRICYLQEIFSNEMAKVDDSFFHRLEESFLVEEDKKHERHPIFGNIVDEVAYHEKYPTIYHLRKKLVDSTDKADLRLIYLALAHMIKFRGHFLIEGDLNPDNSDVDKLFIQLVQTYNQLFEENPINASGVDAKAILSARLSKSRRLENLIAQLPGEKKNGLFGNLIALSLGLTPNFKSNFDLAEDAKLQLSKDTYDDDLDNLLAQIGDQYADLFLAAKNLSDAILLSDILRVNTEITKAPLSASMIKRYDEHHQDLTLLKALVRQQLPEKYKEIFFDQSKNGYAGYIDGGASQEEFYKFIKPILEKMDGTEELLVKLNREDLLRKQRTFDNGSIPHQIHLGELHAILRRQEDFYPFLKDNREKIEKILTFRIPYYVGPLARGNSRFAWMTRKSEETITPWNFEEVVDKGASAQSFIERMTNFDKNLPNEKVLPKHSLLYEYFTVYNELTKVKYVTEGMRKPAFLSGEQKKAIVDLLFKTNRKVTVKQLKEDYFKKIECFDSVEISGVEDRFNASLGTYHDLLKIIKDKDFLDNEENEDILEDIVLTLTLFEDREMIEERLKTYAHLFDDKVMKQLKRRRYTGWGRLSRKLINGIRDKQSGKTILDFLKSDGFANRNFMQLIHDDSLTFKEDIQKAQVSGQGDSLHEHIANLAGSPAIKKGILQTVKVVDELVKVMGRHKPENIVIEMARENQTTQKGQKNSRERMKRIEEGIKELGSQILKEHPVENTQLQNEKLYLYYLQNGRDMYVDQELDINRLSDYDVDHIVPQSFLKDDSIDNKVLTRSDKARGKSDNVPSEEVVKKMKNYWRQLLNAKLITQRKFDNLTKAERGGLSELDKAGFIKRQLVETRQITKHVAQILDSRMNTKYDENDKLIREVKVITLKSKLVSDFRKDFQFYKVREINNYHHAHDAYLNAVVGTALIKKYPKLESEFVYGDYKVYDVRKMIAKSEQEIGKATAKYFFYSNIMNFFKTEITLANGEIRKRPLIETNGETGEIVWDKGRDFATVRKVLSMPQVNIVKKTEVQTGGFSKESILPKRNSDKLIARKKDWDPKKYGGFDSPTVAYSVLVVAKVEKGKSKKLKSVKELLGITIMERSSFEKNPIDFLEAKGYKEVKKDLIIKLPKYSLFELENGRKRMLASAGELQKGNELALPSKYVNFLYLASHYEKLKGSPEDNEQKQLFVEQHKHYLDEIIEQISEFSKRVILADANLDKVLSAYNKHRDKPIREQAENIIHLFTLTNLGAPAAFKYFDTTIDRKRYTSTKEVLDATLIHQSITGLYETRIDLSQLGGDGGEAAAKGGGPAPGGTLGDQGSRGSDPLPEPRVTLTVEGIPTEFLVNTGAEHSVLTKPMGKMGSKRTVVAGATGSKVYPWTTKRLLKIGQKQVTHSFLVIPECPAPLLGRDLLTKLKAQIQFSTEGPQVTWEDRPAMCLVLNLEEEYRLHEKPVPPSIDPSWLQLFPMVWAEKAGMGLANQVPPVVVELKSDASPVAVRQYPMSKEAREGIRPHIQRFLDLGILVPCQSPWNTPLLPVKKPGTNDYRPVQDLREVNKRVQDIHPTVPNPYNLLSSLPPSHTWYSVLDLKDAFFCLKLHPNSQPLFAFEWRDPEKGNTGQLTWTRLPQGFKNSPTLFNEALHRDLASFRALNPQVVMLQYVDDLLVAAPTYRDCKEGTRRLLQELSKLGYRVSAKKAQLCREEVTYLGYLLKGGKRWLTPARKATVMKIPTPTTPRQVREFLGTAGFCRLWIPGFASLAAPLYPLTRPKVPFTWTEAHQEAFGRIKEALLSAPALALPDLTKPFALYVDEKEGVARGVLTQTLGPWRRPVAYLSKKLDPVASGWPTCLKAIAAVALLLKDADKLTLGQNVLVIAPHNLESIVRQPPDRWMTNARMTHYQSLLLNERVSFAPPAILNPATLLPVESDDTPIHICSEILAEETGTRPDLRDQPLPGVPAWYTDGSSFIMDGRRQAGAAIVDNKRTVWASNLPEGTSAQKAELIALTQALRLAEGKSINIYTDSRYAFATAHVHGAIYKQRGWLTSAGKDIKNKEEILALLEAIHLPKRVAIIHCPGHQRGTDPVATGNRKADEAAKQAAQSTRILTETTKNAGKRTADGSEFEKRTADGSEFESPKKKAKVE

SEQ ID NO: 1754 - protein, 2218 aa, synthetic construct
MPAAKRVKLDGGDKKYSIGLDIGTNSVGWAVITDEYKVPSKKFKVLGNTDRHSIKKNLIGALLFDSGETAEATRLKRTARRRYTRRKNRICYLQEIFSNEMAKVDDSFFHRLEESFLVEEDKKHERHPIFGNIVDEVAYHEKYPTIYHLRKKLVDSTDKADLRLIYLALAHMIKFRGHFLIEGDLNPDNSDVDKLFIQLVQTYNQLFEENPINASGVDAKAILSARLSKSRRLENLIAQLPGEKKNGLFGNLIALSLGLTPNFKSNFDLAEDAKLQLSKDTYDDDLDNLLAQIGDQYADLFLAAKNLSDAILLSDILRVNTEITKAPLSASMIKRYDEHHQDLTLLKALVRQQLPEKYKEIFFDQSKNGYAGYIDGGASQEEFYKFIKPILEKMDGTEELLVKLNREDLLRKQRTFDNGSIPHQIHLGELHAILRRQEDFYPFLKDNREKIEKILTFRIPYYVGPLARGNSRFAWMTRKSEETITPWNFEEVVDKGASAQSFIERMTNFDKNLPNEKVLPKHSLLYEYFTVYNELTKVKYVTEGMRKPAFLSGEQKKAIVDLLFKTNRKVTVKQLKEDYFKKIECFDSVEISGVEDRFNASLGTYHDLLKIIKDKDFLDNEENEDILEDIVLTLTLFEDREMIEERLKTYAHLFDDKVMKQLKRRRYTGWGRLSRKLINGIRDKQSGKTILDFLKSDGFANRNFMQLIHDDSLTFKEDIQKAQVSGQGDSLHEHIANLAGSPAIKKGILQTVKVVDELVKVMGRHKPENIVIEMARENQTTQKGQKNSRERMKRIEEGIKELGSQILKEHPVENTQLQNEKLYLYYLQNGRDMYVDQELDINRLSDYDVDHIVPQSFLKDDSIDNKVLTRSDKARGKSDNVPSEEVVKKMKNYWRQLLNAKLITQRKFDNLTKAERGGLSELDKAGFIKRQLVETRQITKHVAQILDSRMNTKYDENDKLIREVKVITLKSKLVSDFRKDFQFYKVREINNYHHAHDAYLNAVVGTALIKKYPKLESEFVYGDYKVYDVRKMIAKSEQEIGKATAKYFFYSNIMNFFKTEITLANGEIRKRPLIETNGETGEIVWDKGRDFATVRKVLSMPQVNIVKKTEVQTGGFSKESILPKRNSDKLIARKKDWDPKKYGGFDSPTVAYSVLVVAKVEKGKSKKLKSVKELLGITIMERSSFEKNPIDFLEAKGYKEVKKDLIIKLPKYSLFELENGRKRMLASAGELQKGNELALPSKYVNFLYLASHYEKLKGSPEDNEQKQLFVEQHKHYLDEIIEQISEFSKRVILADANLDKVLSAYNKHRDKPIREQAENIIHLFTLTNLGAPAAFKYFDTTIDRKRYTSTKEVLDATLIHQSITGLYETRIDLSQLGGDGGPAPGGSEAAAKGGTLGDQGSRGSDPLPEPRVTLTVEGIPTEFLVNTGAEHSVLTKPMGKMGSKRTVVAGATGSKVYPWTTKRLLKIGQKQVTHSFLVIPECPAPLLGRDLLTKLKAQIQFSTEGPQVTWEDRPAMCLVLNLEEEYRLHEKPVPPSIDPSWLQLFPMVWAEKAGMGLANQVPPVVVELKSDASPVAVRQYPMSKEAREGIRPHIQRFLDLGILVPCQSPWNTPLLPVKKPGTNDYRPVQDLREVNKRVQDIHPTVPNPYNLLSSLPPSHTWYSVLDLKDAFFCLKLHPNSQPLFAFEWRDPEKGNTGQLTWTRLPQGFKNSPTLFNEALHRDLASFRALNPQVVMLQYVDDLLVAAPTYRDCKEGTRRLLQELSKLGYRVSAKKAQLCREEVTYLGYLLKGGKRWLTPARKATVMKIPTPTTPRQVREFLGTAGFCRLWIPGFASLAAPLYPLTRPKVPFTWTEAHQEAFGRIKEALLSAPALALPDLTKPFALYVDEKEGVARGVLTQTLGPWRRPVAYLSKKLDPVASGWPTCLKAIAAVALLLKDADKLTLGQNVLVIAPHNLESIVRQPPDRWMTNARMTHYQSLLLNERVSFAPPAILNPATLLPVESDDTPIHICSEILAEETGTRPDLRDQPLPGVPAWYTDGSSFIMDGRRQAGAAIVDNKRTVWASNLPEGTSAQKAELIALTQALRLAEGKSINIYTDSRYAFATAHVHGAIYKQRGWLTSAGKDIKNKEEILALLEAIHLPKRVAIIHCPGHQRGTDPVATGNRKADEAAKQAAQSTRILTETTKNAGKRTADGSEFEKRTADGSEFESPKKKAKVE

SEQ ID NO: 1755 - protein, 2219 aa, synthetic construct
MPAAKRVKLDGGDKKYSIGLDIGTNSVGWAVITDEYKVPSKKFKVLGNTDRHSIKKNLIGALLFDSGETAEATRLKRTARRRYTRRKNRICYLQEIFSNEMAKVDDSFFHRLEESFLVEEDKKHERHPIFGNIVDEVAYHEKYPTIYHLRKKLVDSTDKADLRLIYLALAHMIKFRGHFLIEGDLNPDNSDVDKLFIQLVQTYNQLFEENPINASGVDAKAILSARLSKSRRLENLIAQLPGEKKNGLFGNLIALSLGLTPNFKSNFDLAEDAKLQLSKDTYDDDLDNLLAQIGDQYADLFLAAKNLSDAILLSDILRVNTEITKAPLSASMIKRYDEHHQDLTLLKALVRQQLPEKYKEIFFDQSKNGYAGYIDGGASQEEFYKFIKPILEKMDGTEELLVKLNREDLLRKQRTFDNGSIPHQIHLGELHAILRRQEDFYPFLKDNREKIEKILTFRIPYYVGPLARGNSRFAWMTRKSEETITPWNFEEVVDKGASAQSFIERMTNFDKNLPNEKVLPKHSLLYEYFTVYNELTKVKYVTEGMRKPAFLSGEQKKAIVDLLFKTNRKVTVKQLKEDYFKKIECFDSVEISGVEDRFNASLGTYHDLLKIIKDKDFLDNEENEDILEDIVLTLTLFEDREMIEERLKTYAHLFDDKVMKQLKRRRYTGWGRLSRKLINGIRDKQSGKTILDFLKSDGFANRNFMQLIHDDSLTFKEDIQKAQVSGQGDSLHEHIANLAGSPAIKKGILQTVKVVDELVKVMGRHKPENIVIEMARENQTTQKGQKNSRERMKRIEEGIKELGSQILKEHPVENTQLQNEKLYLYYLQNGRDMYVDQELDINRLSDYDVDHIVPQSFLKDDSIDNKVLTRSDKARGKSDNVPSEEVVKKMKNYWRQLLNAKLITQRKFDNLTKAERGGLSELDKAGFIKRQLVETRQITKHVAQILDSRMNTKYDENDKLIREVKVITLKSKLVSDFRKDFQFYKVREINNYHHAHDAYLNAVVGTALIKKYPKLESEFVYGDYKVYDVRKMIAKSEQEIGKATAKYFFYSNIMNFFKTEITLANGEIRKRPLIETNGETGEIVWDKGRDFATVRKVLSMPQVNIVKKTEVQTGGFSKESILPKRNSDKLIARKKDWDPKKYGGFDSPTVAYSVLVVAKVEKGKSKKLKSVKELLGITIMERSSFEKNPIDFLEAKGYKEVKKDLIIKLPKYSLFELENGRKRMLASAGELQKGNELALPSKYVNFLYLASHYEKLKGSPEDNEQKQLFVEQHKHYLDEIIEQISEFSKRVILADANLDKVLSAYNKHRDKPIREQAENIIHLFTLTNLGAPAAFKYFDTTIDRKRYTSTKEVLDATLIHQSITGLYETRIDLSQLGGDGGGGSGGSGGSGGSGGTLGDQGSRGSDPLPEPRVTLTVEGIPTEFLVNTGAEHSVLTKPMGKMGSKRTVVAGATGSKVYPWTTKRLLKIGQKQVTHSFLVIPECPAPLLGRDLLTKLKAQIQFSTEGPQVTWEDRPAMCLVLNLEEEYRLHEKPVPPSIDPSWLQLFPMVWAEKAGMGLANQVPPVVVELKSDASPVAVRQYPMSKEAREGIRPHIQRFLDLGILVPCQSPWNTPLLPVKKPGTNDYRPVQDLREVNKRVQDIHPTVPNPYNLLSSLPPSHTWYSVLDLKDAFFCLKLHPNSQPLFAFEWRDPEKGNTGQLTWTRLPQGFKNSPTLFNEALHRDLASFRALNPQVVMLQYVDDLLVAAPTYRDCKEGTRRLLQELSKLGYRVSAKKAQLCREEVTYLGYLLKGGKRWLTPARKATVMKIPTPTTPRQVREFLGTAGFCRLWIPGFASLAAPLYPLTRPKVPFTWTEAHQEAFGRIKEALLSAPALALPDLTKPFALYVDEKEGVARGVLTQTLGPWRRPVAYLSKKLDPVASGWPTCLKAIAAVALLLKDADKLTLGQNVLVIAPHNLESIVRQPPDRWMTNARMTHYQSLLLNERVSFAPPAILNPATLLPVESDDTPIHICSEILAEETGTRPDLRDQPLPGVPAWYTDGSSFIMDGRRQAGAAIVDNKRTVWASNLPEGTSAQKAELIALTQALRLAEGKSINIYTDSRYAFATAHVHGAIYKQRGWLTSAGKDIKNKEEILALLEAIHLPKRVAIIHCPGHQRGTDPVATGNRKADEAAKQAAQSTRILTETTKNAGKRTADGSEFEKRTADGSEFESPKKKAKVE

SEQ ID NO: 1756 - protein, 2218 aa, synthetic construct
MPAAKRVKLDGGDKKYSIGLDIGTNSVGWAVITDEYKVPSKKFKVLGNTDRHSIKKNLIGALLFDSGETAEATRLKRTARRRYTRRKNRICYLQEIFSNEMAKVDDSFFHRLEESFLVEEDKKHERHPIFGNIVDEVAYHEKYPTIYHLRKKLVDSTDKADLRLIYLALAHMIKFRGHFLIEGDLNPDNSDVDKLFIQLVQTYNQLFEENPINASGVDAKAILSARLSKSRRLENLIAQLPGEKKNGLFGNLIALSLGLTPNFKSNFDLAEDAKLQLSKDTYDDDLDNLLAQIGDQYADLFLAAKNLSDAILLSDILRVNTEITKAPLSASMIKRYDEHHQDLTLLKALVRQQLPEKYKEIFFDQSKNGYAGYIDGGASQEEFYKFIKPILEKMDGTEELLVKLNREDLLRKQRTFDNGSIPHQIHLGELHAILRRQEDFYPFLKDNREKIEKILTFRIPYYVGPLARGNSRFAWMTRKSEETITPWNFEEVVDKGASAQSFIERMTNFDKNLPNEKVLPKHSLLYEYFTVYNELTKVKYVTEGMRKPAFLSGEQKKAIVDLLFKTNRKVTVKQLKEDYFKKIECFDSVEISGVEDRFNASLGTYHDLLKIIKDKDFLDNEENEDILEDIVLTLTLFEDREMIEERLKTYAHLFDDKVMKQLKRRRYTGWGRLSRKLINGIRDKQSGKTILDFLKSDGFANRNFMQLIHDDSLTFKEDIQKAQVSGQGDSLHEHIANLAGSPAIKKGILQTVKVVDELVKVMGRHKPENIVIEMARENQTTQKGQKNSRERMKRIEEGIKELGSQILKEHPVENTQLQNEKLYLYYLQNGRDMYVDQELDINRLSDYDVDHIVPQSFLKDDSIDNKVLTRSDKARGKSDNVPSEEVVKKMKNYWRQLLNAKLITQRKFDNLTKAERGGLSELDKAGFIKRQLVETRQITKHVAQILDSRMNTKYDENDKLIREVKVITLKSKLVSDFRKDFQFYKVREINNYHHAHDAYLNAVVGTALIKKYPKLESEFVYGDYKVYDVRKMIAKSEQEIGKATAKYFFYSNIMNFFKTEITLANGEIRKRPLIETNGETGEIVWDKGRDFATVRKVLSMPQVNIVKKTEVQTGGFSKESILPKRNSDKLIARKKDWDPKKYGGFDSPTVAYSVLVVAKVEKGKSKKLKSVKELLGITIMERSSFEKNPIDFLEAKGYKEVKKDLIIKLPKYSLFELENGRKRMLASAGELQKGNELALPSKYVNFLYLASHYEKLKGSPEDNEQKQLFVEQHKHYLDEIIEQISEFSKRVILADANLDKVLSAYNKHRDKPIREQAENIIHLFTLTNLGAPAAFKYFDTTIDRKRYTSTKEVLDATLIHQSITGLYETRIDLSQLGGDGGEAAAKGSSGGGGGTLGDQGSRGSDPLPEPRVTLTVEGIPTEFLVNTGAEHSVLTKPMGKMGSKRTVVAGATGSKVYPWTTKRLLKIGQKQVTHSFLVIPECPAPLLGRDLLTKLKAQIQFSTEGPQVTWEDRPAMCLVLNLEEEYRLHEKPVPPSIDPSWLQLFPMVWAEKAGMGLANQVPPVVVELKSDASPVAVRQYPMSKEAREGIRPHIQRFLDLGILVPCQSPWNTPLLPVKKPGTNDYRPVQDLREVNKRVQDIHPTVPNPYNLLSSLPPSHTWYSVLDLKDAFFCLKLHPNSQPLFAFEWRDPEKGNTGQLTWTRLPQGFKNSPTLFNEALHRDLASFRALNPQVVMLQYVDDLLVAAPTYRDCKEGTRRLLQELSKLGYRVSAKKAQLCREEVTYLGYLLKGGKRWLTPARKATVMKIPTPTTPRQVREFLGTAGFCRLWIPGFASLAAPLYPLTRPKVPFTWTEAHQEAFGRIKEALLSAPALALPDLTKPFALYVDEKEGVARGVLTQTLGPWRRPVAYLSKKLDPVASGWPTCLKAIAAVALLLKDADKLTLGQNVLVIAPHNLESIVRQPPDRWMTNARMTHYQSLLLNERVSFAPPAILNPATLLPVESDDTPIHICSEILAEETGTRPDLRDQPLPGVPAWYTDGSSFIMDGRRQAGAAIVDNKRTVWASNLPEGTSAQKAELIALTQALRLAEGKSINIYTDSRYAFATAHVHGAIYKQRGWLTSAGKDIKNKEEILALLEAIHLPKRVAIIHCPGHQRGTDPVATGNRKADEAAKQAAQSTRILTETTKNAGKRTADGSEFEKRTADGSEFESPKKKAKVE

SEQ ID NO: 1757 - protein, 2216 aa, synthetic construct
MPAAKRVKLDGGDKKYSIGLDIGTNSVGWAVITDEYKVPSKKFKVLGNTDRHSIKKNLIGALLFDSGETAEATRLKRTARRRYTRRKNRICYLQEIFSNEMAKVDDSFFHRLEESFLVEEDKKHERHPIFGNIVDEVAYHEKYPTIYHLRKKLVDSTDKADLRLIYLALAHMIKFRGHFLIEGDLNPDNSDVDKLFIQLVQTYNQLFEENPINASGVDAKAILSARLSKSRRLENLIAQLPGEKKNGLFGNLIALSLGLTPNFKSNFDLAEDAKLQLSKDTYDDDLDNLLAQIGDQYADLFLAAKNLSDAILLSDILRVNTEITKAPLSASMIKRYDEHHQDLTLLKALVRQQLPEKYKEIFFDQSKNGYAGYIDGGASQEEFYKFIKPILEKMDGTEELLVKLNREDLLRKQRTFDNGSIPHQIHLGELHAILRRQEDFYPFLKDNREKIEKILTFRIPYYVGPLARGNSRFAWMTRKSEETITPWNFEEVVDKGASAQSFIERMTNFDKNLPNEKVLPKHSLLYEYFTVYNELTKVKYVTEGMRKPAFLSGEQKKAIVDLLFKTNRKVTVKQLKEDYFKKIECFDSVEISGVEDRFNASLGTYHDLLKIIKDKDFLDNEENEDILEDIVLTLTLFEDREMIEERLKTYAHLFDDKVMKQLKRRRYTGWGRLSRKLINGIRDKQSGKTILDFLKSDGFANRNFMQLIHDDSLTFKEDIQKAQVSGQGDSLHEHIANLAGSPAIKKGILQTVKVVDELVKVMGRHKPENIVIEMARENQTTQKGQKNSRERMKRIEEGIKELGSQILKEHPVENTQLQNEKLYLYYLQNGRDMYVDQELDINRLSDYDVDHIVPQSFLKDDSIDNKVLTRSDKARGKSDNVPSEEVVKKMKNYWRQLLNAKLITQRKFDNLTKAERGGLSELDKAGFIKRQLVETRQITKHVAQILDSRMNTKYDENDKLIREVKVITLKSKLVSDFRKDFQFYKVREINNYHHAHDAYLNAVVGTALIKKYPKLESEFVYGDYKVYDVRKMIAKSEQEIGKATAKYFFYSNIMNFFKTEITLANGEIRKRPLIETNGETGEIVWDKGRDFATVRKVLSMPQVNIVKKTEVQTGGFSKESILPKRNSDKLIARKKDWDPKKYGGFDSPTVAYSVLVVAKVEKGKSKKLKSVKELLGITIMERSSFEKNPIDFLEAKGYKEVKKDLIIKLPKYSLFELENGRKRMLASAGELQKGNELALPSKYVNFLYLASHYEKLKGSPEDNEQKQLFVEQHKHYLDEIIEQISEFSKRVILADANLDKVLSAYNKHRDKPIREQAENIIHLFTLTNLGAPAAFKYFDTTIDRKRYTSTKEVLDATLIHQSITGLYETRIDLSQLGGDGGGGSPAPGSSGGTLGDQGSRGSDPLPEPRVTLTVEGIPTEFLVNTGAEHSVLTKPMGKMGSKRTVVAGATGSKVYPWTTKRLLKIGQKQVTHSFLVIPECPAPLLGRDLLTKLKAQIQFSTEGPQVTWEDRPAMCLVLNLEEEYRLHEKPVPPSIDPSWLQLFPMVWAEKAGMGLANQVPPVVVELKSDASPVAVRQYPMSKEAREGIRPHIQRFLDLGILVPCQSPWNTPLLPVKKPGTNDYRPVQDLREVNKRVQDIHPTVPNPYNLLSSLPPSHTWYSVLDLKDAFFCLKLHPNSQPLFAFEWRDPEKGNTGQLTWTRLPQGFKNSPTLFNEALHRDLASFRALNPQVVMLQYVDDLLVAAPTYRDCKEGTRRLLQELSKLGYRVSAKKAQLCREEVTYLGYLLKGGKRWLTPARKATVMKIPTPTTPRQVREFLGTAGFCRLWIPGFASLAAPLYPLTRPKVPFTWTEAHQEAFGRIKEALLSAPALALPDLTKPFALYVDEKEGVARGVLTQTLGPWRRPVAYLSKKLDPVASGWPTCLKAIAAVALLLKDADKLTLGQNVLVIAPHNLESIVRQPPDRWMTNARMTHYQSLLLNERVSFAPPAILNPATLLPVESDDTPIHICSEILAEETGTRPDLRDQPLPGVPAWYTDGSSFIMDGRRQAGAAIVDNKRTVWASNLPEGTSAQKAELIALTQALRLAEGKSINIYTDSRYAFATAHVHGAIYKQRGWLTSAGKDIKNKEEILALLEAIHLPKRVAIIHCPGHQRGTDPVATGNRKADEAAKQAAQSTRILTETTKNAGKRTADGSEFEKRTADGSEFESPKKKAKVE

SEQ ID NO: 1758 - protein, 2222 aa, synthetic construct
MPAAKRVKLDGGDKKYSIGLDIGTNSVGWAVITDEYKVPSKKFKVLGNTDRHSIKKNLIGALLFDSGETAEATRLKRTARRRYTRRKNRICYLQEIFSNEMAKVDDSFFHRLEESFLVEEDKKHERHPIFGNIVDEVAYHEKYPTIYHLRKKLVDSTDKADLRLIYLALAHMIKFRGHFLIEGDLNPDNSDVDKLFIQLVQTYNQLFEENPINASGVDAKAILSARLSKSRRLENLIAQLPGEKKNGLFGNLIALSLGLTPNFKSNFDLAEDAKLQLSKDTYDDDLDNLLAQIGDQYADLFLAAKNLSDAILLSDILRVNTEITKAPLSASMIKRYDEHHQDLTLLKALVRQQLPEKYKEIFFDQSKNGYAGYIDGGASQEEFYKFIKPILEKMDGTEELLVKLNREDLLRKQRTFDNGSIPHQIHLGELHAILRRQEDFYPFLKDNREKIEKILTFRIPYYVGPLARGNSRFAWMTRKSEETITPWNFEEVVDKGASAQSFIERMTNFDKNLPNEKVLPKHSLLYEYFTVYNELTKVKYVTEGMRKPAFLSGEQKKAIVDLLFKTNRKVTVKQLKEDYFKKIECFDSVEISGVEDRFNASLGTYHDLLKIIKDKDFLDNEENEDILEDIVLTLTLFEDREMIEERLKTYAHLFDDKVMKQLKRRRYTGWGRLSRKLINGIRDKQSGKTILDFLKSDGFANRNFMQLIHDDSLTFKEDIQKAQVSGQGDSLHEHIANLAGSPAIKKGILQTVKVVDELVKVMGRHKPENIVIEMARENQTTQKGQKNSRERMKRIEEGIKELGSQILKEHPVENTQLQNEKLYLYYLQNGRDMYVDQELDINRLSDYDVDHIVPQSFLKDDSIDNKVLTRSDKARGKSDNVPSEEVVKKMKNYWRQLLNAKLITQRKFDNLTKAERGGLSELDKAGFIKRQLVETRQITKHVAQILDSRMNTKYDENDKLIREVKVITLKSKLVSDFRKDFQFYKVREINNYHHAHDAYLNAVVGTALIKKYPKLESEFVYGDYKVYDVRKMIAKSEQEIGKATAKYFFYSNIMNFFKTEITLANGEIRKRPLIETNGETGEIVWDKGRDFATVRKVLSMPQVNIVKKTEVQTGGFSKESILPKRNSDKLIARKKDWDPKKYGGFDSPTVAYSVLVVAKVEKGKSKKLKSVKELLGITIMERSSFEKNPIDFLEAKGYKEVKKDLIIKLPKYSLFELENGRKRMLASAGELQKGNELALPSKYVNFLYLASHYEKLKGSPEDNEQKQLFVEQHKHYLDEIIEQISEFSKRVILADANLDKVLSAYNKHRDKPIREQAENIIHLFTLTNLGAPAAFKYFDTTIDRKRYTSTKEVLDATLIHQSITGLYETRIDLSQLGGDGGGGGGSGGGGSGGGGSGGTLGDQGSRGSDPLPEPRVTLTVEGIPTEFLVNTGAEHSVLTKPMGKMGSKRTVVAGATGSKVYPWTTKRLLKIGQKQVTHSFLVIPECPAPLLGRDLLTKLKAQIQFSTEGPQVTWEDRPAMCLVLNLEEEYRLHEKPVPPSIDPSWLQLFPMVWAEKAGMGLANQVPPVVVELKSDASPVAVRQYPMSKEAREGIRPHIQRFLDLGILVPCQSPWNTPLLPVKKPGTNDYRPVQDLREVNKRVQDIHPTVPNPYNLLSSLPPSHTWYSVLDLKDAFFCLKLHPNSQPLFAFEWRDPEKGNTGQLTWTRLPQGFKNSPTLFNEALHRDLASFRALNPQVVMLQYVDDLLVAAPTYRDCKEGTRRLLQELSKLGYRVSAKKAQLCREEVTYLGYLLKGGKRWLTPARKATVMKIPTPTTPRQVREFLGTAGFCRLWIPGFASLAAPLYPLTRPKVPFTWTEAHQEAFGRIKEALLSAPALALPDLTKPFALYVDEKEGVARGVLTQTLGPWRRPVAYLSKKLDPVASGWPTCLKAIAAVALLLKDADKLTLGQNVLVIAPHNLESIVRQPPDRWMTNARMTHYQSLLLNERVSFAPPAILNPATLLPVESDDTPIHICSEILAEETGTRPDLRDQPLPGVPAWYTDGSSFIMDGRRQAGAAIVDNKRTVWASNLPEGTSAQKAELIALTQALRLAEGKSINIYTDSRYAFATAHVHGAIYKQRGWLTSAGKDIKNKEEILALLEAIHLPKRVAIIHCPGHQRGTDPVATGNRKADEAAKQAAQSTRILTETTKNAGKRTADGSEFEKRTADGSEFESPKKKAKVE

SEQ ID NO: 1759 - protein, 2218 aa, synthetic construct
MPAAKRVKLDGGDKKYSIGLDIGTNSVGWAVITDEYKVPSKKFKVLGNTDRHSIKKNLIGALLFDSGETAEATRLKRTARRRYTRRKNRICYLQEIFSNEMAKVDDSFFHRLEESFLVEEDKKHERHPIFGNIVDEVAYHEKYPTIYHLRKKLVDSTDKADLRLIYLALAHMIKFRGHFLIEGDLNPDNSDVDKLFIQLVQTYNQLFEENPINASGVDAKAILSARLSKSRRLENLIAQLPGEKKNGLFGNLIALSLGLTPNFKSNFDLAEDAKLQLSKDTYDDDLDNLLAQIGDQYADLFLAAKNLSDAILLSDILRVNTEITKAPLSASMIKRYDEHHQDLTLLKALVRQQLPEKYKEIFFDQSKNGYAGYIDGGASQEEFYKFIKPILEKMDGTEELLVKLNREDLLRKQRTFDNGSIPHQIHLGELHAILRRQEDFYPFLKDNREKIEKILTFRIPYYVGPLARGNSRFAWMTRKSEETITPWNFEEVVDKGASAQSFIERMTNFDKNLPNEKVLPKHSLLYEYFTVYNELTKVKYVTEGMRKPAFLSGEQKKAIVDLLFKTNRKVTVKQLKEDYFKKIECFDSVEISGVEDRFNASLGTYHDLLKIIKDKDFLDNEENEDILEDIVLTLTLFEDREMIEERLKTYAHLFDDKVMKQLKRRRYTGWGRLSRKLINGIRDKQSGKTILDFLKSDGFANRNFMQLIHDDSLTFKEDIQKAQVSGQGDSLHEHIANLAGSPAIKKGILQTVKVVDELVKVMGRHKPENIVIEMARENQTTQKGQKNSRERMKRIEEGIKELGSQILKEHPVENTQLQNEKLYLYYLQNGRDMYVDQELDINRLSDYDVDHIVPQSFLKDDSIDNKVLTRSDKARGKSDNVPSEEVVKKMKNYWRQLLNAKLITQRKFDNLTKAERGGLSELDKAGFIKRQLVETRQITKHVAQILDSRMNTKYDENDKLIREVKVITLKSKLVSDFRKDFQFYKVREINNYHHAHDAYLNAVVGTALIKKYPKLESEFVYGDYKVYDVRKMIAKSEQEIGKATAKYFFYSNIMNFFKTEITLANGEIRKRPLIETNGETGEIVWDKGRDFATVRKVLSMPQVNIVKKTEVQTGGFSKESILPKRNSDKLIARKKDWDPKKYGGFDSPTVAYSVLVVAKVEKGKSKKLKSVKELLGITIMERSSFEKNPIDFLEAKGYKEVKKDLIIKLPKYSLFELENGRKRMLASAGELQKGNELALPSKYVNFLYLASHYEKLKGSPEDNEQKQLFVEQHKHYLDEIIEQISEFSKRVILADANLDKVLSAYNKHRDKPIREQAENIIHLFTLTNLGAPAAFKYFDTTIDRKRYTSTKEVLDATLIHQSITGLYETRIDLSQLGGDGGGSSGGGEAAAKGGTLGDQGSRGSDPLPEPRVTLTVEGIPTEFLVNTGAEHSVLTKPMGKMGSKRTVVAGATGSKVYPWTTKRLLKIGQKQVTHSFLVIPECPAPLLGRDLLTKLKAQIQFSTEGPQVTWEDRPAMCLVLNLEEEYRLHEKPVPPSIDPSWLQLFPMVWAEKAGMGLANQVPPVVVELKSDASPVAVRQYPMSKEAREGIRPHIQRFLDLGILVPCQSPWNTPLLPVKKPGTNDYRPVQDLREVNKRVQDIHPTVPNPYNLLSSLPPSHTWYSVLDLKDAFFCLKLHPNSQPLFAFEWRDPEKGNTGQLTWTRLPQGFKNSPTLFNEALHRDLASFRALNPQVVMLQYVDDLLVAAPTYRDCKEGTRRLLQELSKLGYRVSAKKAQLCREEVTYLGYLLKGGKRWLTPARKATVMKIPTPTTPRQVREFLGTAGFCRLWIPGFASLAAPLYPLTRPKVPFTWTEAHQEAFGRIKEALLSAPALALPDLTKPFALYVDEKEGVARGVLTQTLGPWRRPVAYLSKKLDPVASGWPTCLKAIAAVALLLKDADKLTLGQNVLVIAPHNLESIVRQPPDRWMTNARMTHYQSLLLNERVSFAPPAILNPATLLPVESDDTPIHICSEILAEETGTRPDLRDQPLPGVPAWYTDGSSFIMDGRRQAGAAIVDNKRTVWASNLPEGTSAQKAELIALTQALRLAEGKSINIYTDSRYAFATAHVHGAIYKQRGWLTSAGKDIKNKEEILALLEAIHLPKRVAIIHCPGHQRGTDPVATGNRKADEAAKQAAQSTRILTETTKNAGKRTADGSEFEKRTADGSEFESPKKKAKVE

SEQ ID NO: 1760 - protein, 2215 aa, synthetic construct
MPAAKRVKLDGGDKKYSIGLDIGTNSVGWAVITDEYKVPSKKFKVLGNTDRHSIKKNLIGALLFDSGETAEATRLKRTARRRYTRRKNRICYLQEIFSNEMAKVDDSFFHRLEESFLVEEDKKHERHPIFGNIVDEVAYHEKYPTIYHLRKKLVDSTDKADLRLIYLALAHMIKFRGHFLIEGDLNPDNSDVDKLFIQLVQTYNQLFEENPINASGVDAKAILSARLSKSRRLENLIAQLPGEKKNGLFGNLIALSLGLTPNFKSNFDLAEDAKLQLSKDTYDDDLDNLLAQIGDQYADLFLAAKNLSDAILLSDILRVNTEITKAPLSASMIKRYDEHHQDLTLLKALVRQQLPEKYKEIFFDQSKNGYAGYIDGGASQEEFYKFIKPILEKMDGTEELLVKLNREDLLRKQRTFDNGSIPHQIHLGELHAILRRQEDFYPFLKDNREKIEKILTFRIPYYVGPLARGNSRFAWMTRKSEETITPWNFEEVVDKGASAQSFIERMTNFDKNLPNEKVLPKHSLLYEYFTVYNELTKVKYVTEGMRKPAFLSGEQKKAIVDLLFKTNRKVTVKQLKEDYFKKIECFDSVEISGVEDRFNASLGTYHDLLKIIKDKDFLDNEENEDILEDIVLTLTLFEDREMIEERLKTYAHLFDDKVMKQLKRRRYTGWGRLSRKLINGIRDKQSGKTILDFLKSDGFANRNFMQLIHDDSLTFKEDIQKAQVSGQGDSLHEHIANLAGSPAIKKGILQTVKVVDELVKVMGRHKPENIVIEMARENQTTQKGQKNSRERMKRIEEGIKELGSQILKEHPVENTQLQNEKLYLYYLQNGRDMYVDQELDINRLSDYDVDHIVPQSFLKDDSIDNKVLTRSDKARGKSDNVPSEEVVKKMKNYWRQLLNAKLITQRKFDNLTKAERGGLSELDKAGFIKRQLVETRQITKHVAQILDSRMNTKYDENDKLIREVKVITLKSKLVSDFRKDFQFYKVREINNYHHAHDAYLNAVVGTALIKKYPKLESEFVYGDYKVYDVRKMIAKSEQEIGKATAKYFFYSNIMNFFKTEITLANGEIRKRPLIETNGETGEIVWDKGRDFATVRKVLSMPQVNIVKKTEVQTGGFSKESILPKRNSDKLIARKKDWDPKKYGGFDSPTVAYSVLVVAKVEKGKSKKLKSVKELLGITIMERSSFEKNPIDFLEAKGYKEVKKDLIIKLPKYSLFELENGRKRMLASAGELQKGNELALPSKYVNFLYLASHYEKLKGSPEDNEQKQLFVEQHKHYLDEIIEQISEFSKRVILADANLDKVLSAYNKHRDKPIREQAENIIHLFTLTNLGAPAAFKYFDTTIDRKRYTSTKEVLDATLIHQSITGLYETRIDLSQLGGDGGEAAAKGGGGGTLGDQGSRGSDPLPEPRVTLTVEGIPTEFLVNTGAEHSVLTKPMGKMGSKRTVVAGATGSKVYPWTTKRLLKIGQKQVTHSFLVIPECPAPLLGRDLLTKLKAQIQFSTEGPQVTWEDRPAMCLVLNLEEEYRLHEKPVPPSIDPSWLQLFPMVWAEKAGMGLANQVPPVVVELKSDASPVAVRQYPMSKEAREGIRPHIQRFLDLGILVPCQSPWNTPLLPVKKPGTNDYRPVQDLREVNKRVQDIHPTVPNPYNLLSSLPPSHTWYSVLDLKDAFFCLKLHPNSQPLFAFEWRDPEKGNTGQLTWTRLPQGFKNSPTLFNEALHRDLASFRALNPQVVMLQYVDDLLVAAPTYRDCKEGTRRLLQELSKLGYRVSAKKAQLCREEVTYLGYLLKGGKRWLTPARKATVMKIPTPTTPRQVREFLGTAGFCRLWIPGFASLAAPLYPLTRPKVPFTWTEAHQEAFGRIKEALLSAPALALPDLTKPFALYVDEKEGVARGVLTQTLGPWRRPVAYLSKKLDPVASGWPTCLKAIAAVALLLKDADKLTLGQNVLVIAPHNLESIVRQPPDRWMTNARMTHYQSLLLNERVSFAPPAILNPATLLPVESDDTPIHICSEILAEETGTRPDLRDQPLPGVPAWYTDGSSFIMDGRRQAGAAIVDNKRTVWASNLPEGTSAQKAELIALTQALRLAEGKSINIYTDSRYAFATAHVHGAIYKQRGWLTSAGKDIKNKEEILALLEAIHLPKRVAIIHCPGHQRGTDPVATGNRKADEAAKQAAQSTRILTETTKNAGKRTADGSEFEKRTADGSEFESPKKKAKVE

SEQ ID NO: 1761 - protein, 2213 aa, synthetic construct
MPAAKRVKLDGGDKKYSIGLDIGTNSVGWAVITDEYKVPSKKFKVLGNTDRHSIKKNLIGALLFDSGETAEATRLKRTARRRYTRRKNRICYLQEIFSNEMAKVDDSFFHRLEESFLVEEDKKHERHPIFGNIVDEVAYHEKYPTIYHLRKKLVDSTDKADLRLIYLALAHMIKFRGHFLIEGDLNPDNSDVDKLFIQLVQTYNQLFEENPINASGVDAKAILSARLSKSRRLENLIAQLPGEKKNGLFGNLIALSLGLTPNFKSNFDLAEDAKLQLSKDTYDDDLDNLLAQIGDQYADLFLAAKNLSDAILLSDILRVNTEITKAPLSASMIKRYDEHHQDLTLLKALVRQQLPEKYKEIFFDQSKNGYAGYIDGGASQEEFYKFIKPILEKMDGTEELLVKLNREDLLRKQRTFDNGSIPHQIHLGELHAILRRQEDFYPFLKDNREKIEKILTFRIPYYVGPLARGNSRFAWMTRKSEETITPWNFEEVVDKGASAQSFIERMTNFDKNLPNEKVLPKHSLLYEYFTVYNELTKVKYVTEGMRKPAFLSGEQKKAIVDLLFKTNRKVTVKQLKEDYFKKIECFDSVEISGVEDRFNASLGTYHDLLKIIKDKDFLDNEENEDILEDIVLTLTLFEDREMIEERLKTYAHLFDDKVMKQLKRRRYTGWGRLSRKLINGIRDKQSGKTILDFLKSDGFANRNFMQLIHDDSLTFKEDIQKAQVSGQGDSLHEHIANLAGSPAIKKGILQTVKVVDELVKVMGRHKPENIVIEMARENQTTQKGQKNSRERMKRIEEGIKELGSQILKEHPVENTQLQNEKLYLYYLQNGRDMYVDQELDINRLSDYDVDHIVPQSFLKDDSIDNKVLTRSDKARGKSDNVPSEEVVKKMKNYWRQLLNAKLITQRKFDNLTKAERGGLSELDKAGFIKRQLVETRQITKHVAQILDSRMNTKYDENDKLIREVKVITLKSKLVSDFRKDFQFYKVREINNYHHAHDAYLNAVVGTALIKKYPKLESEFVYGDYKVYDVRKMIAKSEQEIGKATAKYFFYSNIMNFFKTEITLANGEIRKRPLIETNGETGEIVWDKGRDFATVRKVLSMPQVNIVKKTEVQTGGFSKESILPKRNSDKLIARKKDWDPKKYGGFDSPTVAYSVLVVAKVEKGKSKKLKSVKELLGITIMERSSFEKNPIDFLEAKGYKEVKKDLIIKLPKYSLFELENGRKRMLASAGELQKGNELALPSKYVNFLYLASHYEKLKGSPEDNEQKQLFVEQHKHYLDEIIEQISEFSKRVILADANLDKVLSAYNKHRDKPIREQAENIIHLFTLTNLGAPAAFKYFDTTIDRKRYTSTKEVLDATLIHQSITGLYETRIDLSQLGGDGGGGSGGGGGTLGDQGSRGSDPLPEPRVTLTVEGIPTEFLVNTGAEHSVLTKPMGKMGSKRTVVAGATGSKVYPWTTKRLLKIGQKQVTHSFLVIPECPAPLLGRDLLTKLKAQIQFSTEGPQVTWEDRPAMCLVLNLEEEYRLHEKPVPPSIDPSWLQLFPMVWAEKAGMGLANQVPPVVVELKSDASPVAVRQYPMSKEAREGIRPHIQRFLDLGILVPCQSPWNTPLLPVKKPGTNDYRPVQDLREVNKRVQDIHPTVPNPYNLLSSLPPSHTWYSVLDLKDAFFCLKLHPNSQPLFAFEWRDPEKGNTGQLTWTRLPQGFKNSPTLFNEALHRDLASFRALNPQVVMLQYVDDLLVAAPTYRDCKEGTRRLLQELSKLGYRVSAKKAQLCREEVTYLGYLLKGGKRWLTPARKATVMKIPTPTTPRQVREFLGTAGFCRLWIPGFASLAAPLYPLTRPKVPFTWTEAHQEAFGRIKEALLSAPALALPDLTKPFALYVDEKEGVARGVLTQTLGPWRRPVAYLSKKLDPVASGWPTCLKAIAAVALLLKDADKLTLGQNVLVIAPHNLESIVRQPPDRWMTNARMTHYQSLLLNERVSFAPPAILNPATLLPVESDDTPIHICSEILAEETGTRPDLRDQPLPGVPAWYTDGSSFIMDGRRQAGAAIVDNKRTVWASNLPEGTSAQKAELIALTQALRLAEGKSINIYTDSRYAFATAHVHGAIYKQRGWLTSAGKDIKNKEEILALLEAIHLPKRVAIIHCPGHQRGTDPVATGNRKADEAAKQAAQSTRILTETTKNAGKRTADGSEFEKRTADGSEFESPKKKAKVE

SEQ ID NO: 1762 - protein, 2218 aa, synthetic construct
MPAAKRVKLDGGDKKYSIGLDIGTNSVGWAVITDEYKVPSKKFKVLGNTDRHSIKKNLIGALLFDSGETAEATRLKRTARRRYTRRKNRICYLQEIFSNEMAKVDDSFFHRLEESFLVEEDKKHERHPIFGNIVDEVAYHEKYPTIYHLRKKLVDSTDKADLRLIYLALAHMIKFRGHFLIEGDLNPDNSDVDKLFIQLVQTYNQLFEENPINASGVDAKAILSARLSKSRRLENLIAQLPGEKKNGLFGNLIALSLGLTPNFKSNFDLAEDAKLQLSKDTYDDDLDNLLAQIGDQYADLFLAAKNLSDAILLSDILRVNTEITKAPLSASMIKRYDEHHQDLTLLKALVRQQLPEKYKEIFFDQSKNGYAGYIDGGASQEEFYKFIKPILEKMDGTEELLVKLNREDLLRKQRTFDNGSIPHQIHLGELHAILRRQEDFYPFLKDNREKIEKILTFRIPYYVGPLARGNSRFAWMTRKSEETITPWNFEEVVDKGASAQSFIERMTNFDKNLPNEKVLPKHSLLYEYFTVYNELTKVKYVTEGMRKPAFLSGEQKKAIVDLLFKTNRKVTVKQLKEDYFKKIECFDSVEISGVEDRFNASLGTYHDLLKIIKDKDFLDNEENEDILEDIVLTLTLFEDREMIEERLKTYAHLFDDKVMKQLKRRRYTGWGRLSRKLINGIRDKQSGKTILDFLKSDGFANRNFMQLIHDDSLTFKEDIQKAQVSGQGDSLHEHIANLAGSPAIKKGILQTVKVVDELVKVMGRHKPENIVIEMARENQTTQKGQKNSRERMKRIEEGIKELGSQILKEHPVENTQLQNEKLYLYYLQNGRDMYVDQELDINRLSDYDVDHIVPQSFLKDDSIDNKVLTRSDKARGKSDNVPSEEVVKKMKNYWRQLLNAKLITQRKFDNLTKAERGGLSELDKAGFIKRQLVETRQITKHVAQILDSRMNTKYDENDKLIREVKVITLKSKLVSDFRKDFQFYKVREINNYHHAHDAYLNAVVGTALIKKYPKLESEFVYGDYKVYDVRKMIAKSEQEIGKATAKYFFYSNIMNFFKTEITLANGEIRKRPLIETNGETGEIVWDKGRDFATVRKVLSMPQVNIVKKTEVQTGGFSKESILPKRNSDKLIARKKDWDPKKYGGFDSPTVAYSVLVVAKVEKGKSKKLKSVKELLGITIMERSSFEKNPIDFLEAKGYKEVKKDLIIKLPKYSLFELENGRKRMLASAGELQKGNELALPSKYVNFLYLASHYEKLKGSPEDNEQKQLFVEQHKHYLDEIIEQISEFSKRVILADANLDKVLSAYNKHRDKPIREQAENIIHLFTLTNLGAPAAFKYFDTTIDRKRYTSTKEVLDATLIHQSITGLYETRIDLSQLGGDGGPAPEAAAKGSSGGTLGDQGSRGSDPLPEPRVTLTVEGIPTEFLVNTGAEHSVLTKPMGKMGSKRTVVAGATGSKVYPWTTKRLLKIGQKQVTHSFLVIPECPAPLLGRDLLTKLKAQIQFSTEGPQVTWEDRPAMCLVLNLEEEYRLHEKPVPPSIDPSWLQLFPMVWAEKAGMGLANQVPPVVVELKSDASPVAVRQYPMSKEAREGIRPHIQRFLDLGILVPCQSPWNTPLLPVKKPGTNDYRPVQDLREVNKRVQDIHPTVPNPYNLLSSLPPSHTWYSVLDLKDAFFCLKLHPNSQPLFAFEWRDPEKGNTGQLTWTRLPQGFKNSPTLFNEALHRDLASFRALNPQVVMLQYVDDLLVAAPTYRDCKEGTRRLLQELSKLGYRVSAKKAQLCREEVTYLGYLLKGGKRWLTPARKATVMKIPTPTTPRQVREFLGTAGFCRLWIPGFASLAAPLYPLTRPKVPFTWTEAHQEAFGRIKEALLSAPALALPDLTKPFALYVDEKEGVARGVLTQTLGPWRRPVAYLSKKLDPVASGWPTCLKAIAAVALLLKDADKLTLGQNVLVIAPHNLESIVRQPPDRWMTNARMTHYQSLLLNERVSFAPPAILNPATLLPVESDDTPIHICSEILAEETGTRPDLRDQPLPGVPAWYTDGSSFIMDGRRQAGAAIVDNKRTVWASNLPEGTSAQKAELIALTQALRLAEGKSINIYTDSRYAFATAHVHGAIYKQRGWLTSAGKDIKNKEEILALLEAIHLPKRVAIIHCPGHQRGTDPVATGNRKADEAAKQAAQSTRILTETTKNAGKRTADGSEFEKRTADGSEFESPKKKAKVE

SEQ ID NO: 1763 - protein, 2215 aa, synthetic construct
MPAAKRVKLDGGDKKYSIGLDIGTNSVGWAVITDEYKVPSKKFKVLGNTDRHSIKKNLIGALLFDSGETAEATRLKRTARRRYTRRKNRICYLQEIFSNEMAKVDDSFFHRLEESFLVEEDKKHERHPIFGNIVDEVAYHEKYPTIYHLRKKLVDSTDKADLRLIYLALAHMIKFRGHFLIEGDLNPDNSDVDKLFIQLVQTYNQLFEENPINASGVDAKAILSARLSKSRRLENLIAQLPGEKKNGLFGNLIALSLGLTPNFKSNFDLAEDAKLQLSKDTYDDDLDNLLAQIGDQYADLFLAAKNLSDAILLSDILRVNTEITKAPLSASMIKRYDEHHQDLTLLKALVRQQLPEKYKEIFFDQSKNGYAGYIDGGASQEEFYKFIKPILEKMDGTEELLVKLNREDLLRKQRTFDNGSIPHQIHLGELHAILRRQEDFYPFLKDNREKIEKILTFRIPYYVGPLARGNSRFAWMTRKSEETITPWNFEEVVDKGASAQSFIERMTNFDKNLPNEKVLPKHSLLYEYFTVYNELTKVKYVTEGMRKPAFLSGEQKKAIVDLLFKTNRKVTVKQLKEDYFKKIECFDSVEISGVEDRFNASLGTYHDLLKIIKDKDFLDNEENEDILEDIVLTLTLFEDREMIEERLKTYAHLFDDKVMKQLKRRRYTGWGRLSRKLINGIRDKQSGKTILDFLKSDGFANRNFMQLIHDDSLTFKEDIQKAQVSGQGDSLHEHIANLAGSPAIKKGILQTVKVVDELVKVMGRHKPENIVIEMARENQTTQKGQKNSRERMKRIEEGIKELGSQILKEHPVENTQLQNEKLYLYYLQNGRDMYVDQELDINRLSDYDVDHIVPQSFLKDDSIDNKVLTRSDKARGKSDNVPSEEVVKKMKNYWRQLLNAKLITQRKFDNLTKAERGGLSELDKAGFIKRQLVETRQITKHVAQILDSRMNTKYDENDKLIREVKVITLKSKLVSDFRKDFQFYKVREINNYHHAHDAYLNAVVGTALIKKYPKLESEFVYGDYKVYDVRKMIAKSEQEIGKATAKYFFYSNIMNFFKTEITLANGEIRKRPLIETNGETGEIVWDKGRDFATVRKVLSMPQVNIVKKTEVQTGGFSKESILPKRNSDKLIARKKDWDPKKYGGFDSPTVAYSVLVVAKVEKGKSKKLKSVKELLGITIMERSSFEKNPIDFLEAKGYKEVKKDLIIKLPKYSLFELENGRKRMLASAGELQKGNELALPSKYVNFLYLASHYEKLKGSPEDNEQKQLFVEQHKHYLDEIIEQISEFSKRVILADANLDKVLSAYNKHRDKPIREQAENIIHLFTLTNLGAPAAFKYFDTTIDRKRYTSTKEVLDATLIHQSITGLYETRIDLSQLGGDGGEAAAKGGSGGTLGDQGSRGSDPLPEPRVTLTVEGIPTEFLVNTGAEHSVLTKPMGKMGSKRTVVAGATGSKVYPWTTKRLLKIGQKQVTHSFLVIPECPAPLLGRDLLTKLKAQIQFSTEGPQVTWEDRPAMCLVLNLEEEYRLHEKPVPPSIDPSWLQLFPMVWAEKAGMGLANQVPPVVVELKSDASPVAVRQYPMSKEAREGIRPHIQRFLDLGILVPCQSPWNTPLLPVKKPGTNDYRPVQDLREVNKRVQDIHPTVPNPYNLLSSLPPSHTWYSVLDLKDAFFCLKLHPNSQPLFAFEWRDPEKGNTGQLTWTRLPQGFKNSPTLFNEALHRDLASFRALNPQVVMLQYVDDLLVAAPTYRDCKEGTRRLLQELSKLGYRVSAKKAQLCREEVTYLGYLLKGGKRWLTPARKATVMKIPTPTTPRQVREFLGTAGFCRLWIPGFASLAAPLYPLTRPKVPFTWTEAHQEAFGRIKEALLSAPALALPDLTKPFALYVDEKEGVARGVLTQTLGPWRRPVAYLSKKLDPVASGWPTCLKAIAAVALLLKDADKLTLGQNVLVIAPHNLESIVRQPPDRWMTNARMTHYQSLLLNERVSFAPPAILNPATLLPVESDDTPIHICSEILAEETGTRPDLRDQPLPGVPAWYTDGSSFIMDGRRQAGAAIVDNKRTVWASNLPEGTSAQKAELIALTQALRLAEGKSINIYTDSRYAFATAHVHGAIYKQRGWLTSAGKDIKNKEEILALLEAIHLPKRVAIIHCPGHQRGTDPVATGNRKADEAAKQAAQSTRILTETTKNAGKRTADGSEFEKRTADGSEFESPKKKAKVE

SEQ ID NO: 1764 - protein, 2216 aa, synthetic construct
MPAAKRVKLDGGDKKYSIGLDIGTNSVGWAVITDEYKVPSKKFKVLGNTDRHSIKKNLIGALLFDSGETAEATRLKRTARRRYTRRKNRICYLQEIFSNEMAKVDDSFFHRLEESFLVEEDKKHERHPIFGNIVDEVAYHEKYPTIYHLRKKLVDSTDKADLRLIYLALAHMIKFRGHFLIEGDLNPDNSDVDKLFIQLVQTYNQLFEENPINASGVDAKAILSARLSKSRRLENLIAQLPGEKKNGLFGNLIALSLGLTPNFKSNFDLAEDAKLQLSKDTYDDDLDNLLAQIGDQYADLFLAAKNLSDAILLSDILRVNTEITKAPLSASMIKRYDEHHQDLTLLKALVRQQLPEKYKEIFFDQSKNGYAGYIDGGASQEEFYKFIKPILEKMDGTEELLVKLNREDLLRKQRTFDNGSIPHQIHLGELHAILRRQEDFYPFLKDNREKIEKILTFRIPYYVGPLARGNSRFAWMTRKSEETITPWNFEEVVDKGASAQSFIERMTNFDKNLPNEKVLPKHSLLYEYFTVYNELTKVKYVTEGMRKPAFLSGEQKKAIVDLLFKTNRKVTVKQLKEDYFKKIECFDSVEISGVEDRFNASLGTYHDLLKIIKDKDFLDNEENEDILEDIVLTLTLFEDREMIEERLKTYAHLFDDKVMKQLKRRRYTGWGRLSRKLINGIRDKQSGKTILDFLKSDGFANRNFMQLIHDDSLTFKEDIQKAQVSGQGDSLHEHIANLAGSPAIKKGILQTVKVVDELVKVMGRHKPENIVIEMARENQTTQKGQKNSRERMKRIEEGIKELGSQILKEHPVENTQLQNEKLYLYYLQNGRDMYVDQELDINRLSDYDVDHIVPQSFLKDDSIDNKVLTRSDKARGKSDNVPSEEVVKKMKNYWRQLLNAKLITQRKFDNLTKAERGGLSELDKAGFIKRQLVETRQITKHVAQILDSRMNTKYDENDKLIREVKVITLKSKLVSDFRKDFQFYKVREINNYHHAHDAYLNAVVGTALIKKYPKLESEFVYGDYKVYDVRKMIAKSEQEIGKATAKYFFYSNIMNFFKTEITLANGEIRKRPLIETNGETGEIVWDKGRDFATVRKVLSMPQVNIVKKTEVQTGGFSKESILPKRNSDKLIARKKDWDPKKYGGFDSPTVAYSVLVVAKVEKGKSKKLKSVKELLGITIMERSSFEKNPIDFLEAKGYKEVKKDLIIKLPKYSLFELENGRKRMLASAGELQKGNELALPSKYVNFLYLASHYEKLKGSPEDNEQKQLFVEQHKHYLDEIIEQISEFSKRVILADANLDKVLSAYNKHRDKPIREQAENIIHLFTLTNLGAPAAFKYFDTTIDRKRYTSTKEVLDATLIHQSITGLYETRIDLSQLGGDGGGGGGSSGGSGGTLGDQGSRGSDPLPEPRVTLTVEGIPTEFLVNTGAEHSVLTKPMGKMGSKRTVVAGATGSKVYPWTTKRLLKIGQKQVTHSFLVIPECPAPLLGRDLLTKLKAQIQFSTEGPQVTWEDRPAMCLVLNLEEEYRLHEKPVPPSIDPSWLQLFPMVWAEKAGMGLANQVPPVVVELKSDASPVAVRQYPMSKEAREGIRPHIQRFLDLGILVPCQSPWNTPLLPVKKPGTNDYRPVQDLREVNKRVQDIHPTVPNPYNLLSSLPPSHTWYSVLDLKDAFFCLKLHPNSQPLFAFEWRDPEKGNTGQLTWTRLPQGFKNSPTLFNEALHRDLASFRALNPQVVMLQYVDDLLVAAPTYRDCKEGTRRLLQELSKLGYRVSAKKAQLCREEVTYLGYLLKGGKRWLTPARKATVMKIPTPTTPRQVREFLGTAGFCRLWIPGFASLAAPLYPLTRPKVPFTWTEAHQEAFGRIKEALLSAPALALPDLTKPFALYVDEKEGVARGVLTQTLGPWRRPVAYLSKKLDPVASGWPTCLKAIAAVALLLKDADKLTLGQNVLVIAPHNLESIVRQPPDRWMTNARMTHYQSLLLNERVSFAPPAILNPATLLPVESDDTPIHICSEILAEETGTRPDLRDQPLPGVPAWYTDGSSFIMDGRRQAGAAIVDNKRTVWASNLPEGTSAQKAELIALTQALRLAEGKSINIYTDSRYAFATAHVHGAIYKQRGWLTSAGKDIKNKEEILALLEAIHLPKRVAIIHCPGHQRGTDPVATGNRKADEAAKQAAQSTRILTETTKNAGKRTADGSEFEKRTADGSEFESPKKKAKVE

SEQ ID NO: 1765 - protein, 2216 aa, synthetic construct
MPAAKRVKLDGGDKKYSIGLDIGTNSVGWAVITDEYKVPSKKFKVLGNTDRHSIKKNLIGALLFDSGETAEATRLKRTARRRYTRRKNRICYLQEIFSNEMAKVDDSFFHRLEESFLVEEDKKHERHPIFGNIVDEVAYHEKYPTIYHLRKKLVDSTDKADLRLIYLALAHMIKFRGHFLIEGDLNPDNSDVDKLFIQLVQTYNQLFEENPINASGVDAKAILSARLSKSRRLENLIAQLPGEKKNGLFGNLIALSLGLTPNFKSNFDLAEDAKLQLSKDTYDDDLDNLLAQIGDQYADLFLAAKNLSDAILLSDILRVNTEITKAPLSASMIKRYDEHHQDLTLLKALVRQQLPEKYKEIFFDQSKNGYAGYIDGGASQEEFYKFIKPILEKMDGTEELLVKLNREDLLRKQRTFDNGSIPHQIHLGELHAILRRQEDFYPFLKDNREKIEKILTFRIPYYVGPLARGNSRFAWMTRKSEETITPWNFEEVVDKGASAQSFIERMTNFDKNLPNEKVLPKHSLLYEYFTVYNELTKVKYVTEGMRKPAFLSGEQKKAIVDLLFKTNRKVTVKQLKEDYFKKIECFDSVEISGVEDRFNASLGTYHDLLKIIKDKDFLDNEENEDILEDIVLTLTLFEDREMIEERLKTYAHLFDDKVMKQLKRRRYTGWGRLSRKLINGIRDKQSGKTILDFLKSDGFANRNFMQLIHDDSLTFKEDIQKAQVSGQGDSLHEHIANLAGSPAIKKGILQTVKVVDELVKVMGRHKPENIVIEMARENQTTQKGQKNSRERMKRIEEGIKELGSQILKEHPVENTQLQNEKLYLYYLQNGRDMYVDQELDINRLSDYDVDHIVPQSFLKDDSIDNKVLTRSDKARGKSDNVPSEEVVKKMKNYWRQLLNAKLITQRKFDNLTKAERGGLSELDKAGFIKRQLVETRQITKHVAQILDSRMNTKYDENDKLIREVKVITLKSKLVSDFRKDFQFYKVREINNYHHAHDAYLNAVVGTALIKKYPKLESEFVYGDYKVYDVRKMIAKSEQEIGKATAKYFFYSNIMNFFKTEITLANGEIRKRPLIETNGETGEIVWDKGRDFATVRKVLSMPQVNIVKKTEVQTGGFSKESILPKRNSDKLIARKKDWDPKKYGGFDSPTVAYSVLVVAKVEKGKSKKLKSVKELLGITIMERSSFEKNPIDFLEAKGYKEVKKDLIIKLPKYSLFELENGRKRMLASAGELQKGNELALPSKYVNFLYLASHYEKLKGSPEDNEQKQLFVEQHKHYLDEIIEQISEFSKRVILADANLDKVLSAYNKHRDKPIREQAENIIHLFTLTNLGAPAAFKYFDTTIDRKRYTSTKEVLDATLIHQSITGLYETRIDLSQLGGDGGPAPGSSGGSGGTLGDQGSRGSDPLPEPRVTLTVEGIPTEFLVNTGAEHSVLTKPMGKMGSKRTVVAGATGSKVYPWTTKRLLKIGQKQVTHSFLVIPECPAPLLGRDLLTKLKAQIQFSTEGPQVTWEDRPAMCLVLNLEEEYRLHEKPVPPSIDPSWLQLFPMVWAEKAGMGLANQVPPVVVELKSDASPVAVRQYPMSKEAREGIRPHIQRFLDLGILVPCQSPWNTPLLPVKKPGTNDYRPVQDLREVNKRVQDIHPTVPNPYNLLSSLPPSHTWYSVLDLKDAFFCLKLHPNSQPLFAFEWRDPEKGNTGQLTWTRLPQGFKNSPTLFNEALHRDLASFRALNPQVVMLQYVDDLLVAAPTYRDCKEGTRRLLQELSKLGYRVSAKKAQLCREEVTYLGYLLKGGKRWLTPARKATVMKIPTPTTPRQVREFLGTAGFCRLWIPGFASLAAPLYPLTRPKVPFTWTEAHQEAFGRIKEALLSAPALALPDLTKPFALYVDEKEGVARGVLTQTLGPWRRPVAYLSKKLDPVASGWPTCLKAIAAVALLLKDADKLTLGQNVLVIAPHNLESIVRQPPDRWMTNARMTHYQSLLLNERVSFAPPAILNPATLLPVESDDTPIHICSEILAEETGTRPDLRDQPLPGVPAWYTDGSSFIMDGRRQAGAAIVDNKRTVWASNLPEGTSAQKAELIALTQALRLAEGKSINIYTDSRYAFATAHVHGAIYKQRGWLTSAGKDIKNKEEILALLEAIHLPKRVAIIHCPGHQRGTDPVATGNRKADEAAKQAAQSTRILTETTKNAGKRTADGSEFEKRTADGSEFESPKKKAKVE

SEQ ID NO: 1766 - protein, 2216 aa, synthetic construct
MPAAKRVKLDGGDKKYSIGLDIGTNSVGWAVITDEYKVPSKKFKVLGNTDRHSIKKNLIGALLFDSGETAEATRLKRTARRRYTRRKNRICYLQEIFSNEMAKVDDSFFHRLEESFLVEEDKKHERHPIFGNIVDEVAYHEKYPTIYHLRKKLVDSTDKADLRLIYLALAHMIKFRGHFLIEGDLNPDNSDVDKLFIQLVQTYNQLFEENPINASGVDAKAILSARLSKSRRLENLIAQLPGEKKNGLFGNLIALSLGLTPNFKSNFDLAEDAKLQLSKDTYDDDLDNLLAQIGDQYADLFLAAKNLSDAILLSDILRVNTEITKAPLSASMIKRYDEHHQDLTLLKALVRQQLPEKYKEIFFDQSKNGYAGYIDGGASQEEFYKFIKPILEKMDGTEELLVKLNREDLLRKQRTFDNGSIPHQIHLGELHAILRRQEDFYPFLKDNREKIEKILTFRIPYYVGPLARGNSRFAWMTRKSEETITPWNFEEVVDKGASAQSFIERMTNFDKNLPNEKVLPKHSLLYEYFTVYNELTKVKYVTEGMRKPAFLSGEQKKAIVDLLFKTNRKVTVKQLKEDYFKKIECFDSVEISGVEDRFNASLGTYHDLLKIIKDKDFLDNEENEDILEDIVLTLTLFEDREMIEERLKTYAHLFDDKVMKQLKRRRYTGWGRLSRKLINGIRDKQSGKTILDFLKSDGFANRNFMQLIHDDSLTFKEDIQKAQVSGQGDSLHEHIANLAGSPAIKKGILQTVKVVDELVKVMGRHKPENIVIEMARENQTTQKGQKNSRERMKRIEEGIKELGSQILKEHPVENTQLQNEKLYLYYLQNGRDMYVDQELDINRLSDYDVDHIVPQSFLKDDSIDNKVLTRSDKARGKSDNVPSEEVVKKMKNYWRQLLNAKLITQRKFDNLTKAERGGLSELDKAGFIKRQLVETRQITKHVAQILDSRMNTKYDENDKLIREVKVITLKSKLVSDFRKDFQFYKVREINNYHHAHDAYLNAVVGTALIKKYPKLESEFVYGDYKVYDVRKMIAKSEQEIGKATAKYFFYSNIMNFFKTEITLANGEIRKRPLIETNGETGEIVWDKGRDFATVRKVLSMPQVNIVKKTEVQTGGFSKESILPKRNSDKLIARKKDWDPKKYGGFDSPTVAYSVLVVAKVEKGKSKKLKSVKELLGITIMERSSFEKNPIDFLEAKGYKEVKKDLIIKLPKYSLFELENGRKRMLASAGELQKGNELALPSKYVNFLYLASHYEKLKGSPEDNEQKQLFVEQHKHYLDEIIEQISEFSKRVILADANLDKVLSAYNKHRDKPIREQAENIIHLFTLTNLGAPAAFKYFDTTIDRKRYTSTKEVLDATLIHQSITGLYETRIDLSQLGGDGGGGSGGSGGSGGTLGDQGSRGSDPLPEPRVTLTVEGIPTEFLVNTGAEHSVLTKPMGKMGSKRTVVAGATGSKVYPWTTKRLLKIGQKQVTHSFLVIPECPAPLLGRDLLTKLKAQIQFSTEGPQVTWEDRPAMCLVLNLEEEYRLHEKPVPPSIDPSWLQLFPMVWAEKAGMGLANQVPPVVVELKSDASPVAVRQYPMSKEAREGIRPHIQRFLDLGILVPCQSPWNTPLLPVKKPGTNDYRPVQDLREVNKRVQDIHPTVPNPYNLLSSLPPSHTWYSVLDLKDAFFCLKLHPNSQPLFAFEWRDPEKGNTGQLTWTRLPQGFKNSPTLFNEALHRDLASFRALNPQVVMLQYVDDLLVAAPTYRDCKEGTRRLLQELSKLGYRVSAKKAQLCREEVTYLGYLLKGGKRWLTPARKATVMKIPTPTTPRQVREFLGTAGFCRLWIPGFASLAAPLYPLTRPKVPFTWTEAHQEAFGRIKEALLSAPALALPDLTKPFALYVDEKEGVARGVLTQTLGPWRRPVAYLSKKLDPVASGWPTCLKAIAAVALLLKDADKLTLGQNVLVIAPHNLESIVRQPPDRWMTNARMTHYQSLLLNERVSFAPPAILNPATLLPVESDDTPIHICSEILAEETGTRPDLRDQPLPGVPAWYTDGSSFIMDGRRQAGAAIVDNKRTVWASNLPEGTSAQKAELIALTQALRLAEGKSINIYTDSRYAFATAHVHGAIYKQRGWLTSAGKDIKNKEEILALLEAIHLPKRVAIIHCPGHQRGTDPVATGNRKADEAAKQAAQSTRILTETTKNAGKRTADGSEFEKRTADGSEFESPKKKAKVE

SEQ ID NO: 1767 - protein, 2222 aa, synthetic construct
MPAAKRVKLDGGDKKYSIGLDIGTNSVGWAVITDEYKVPSKKFKVLGNTDRHSIKKNLIGALLFDSGETAEATRLKRTARRRYTRRKNRICYLQEIFSNEMAKVDDSFFHRLEESFLVEEDKKHERHPIFGNIVDEVAYHEKYPTIYHLRKKLVDSTDKADLRLIYLALAHMIKFRGHFLIEGDLNPDNSDVDKLFIQLVQTYNQLFEENPINASGVDAKAILSARLSKSRRLENLIAQLPGEKKNGLFGNLIALSLGLTPNFKSNFDLAEDAKLQLSKDTYDDDLDNLLAQIGDQYADLFLAAKNLSDAILLSDILRVNTEITKAPLSASMIKRYDEHHQDLTLLKALVRQQLPEKYKEIFFDQSKNGYAGYIDGGASQEEFYKFIKPILEKMDGTEELLVKLNREDLLRKQRTFDNGSIPHQIHLGELHAILRRQEDFYPFLKDNREKIEKILTFRIPYYVGPLARGNSRFAWMTRKSEETITPWNFEEVVDKGASAQSFIERMTNFDKNLPNEKVLPKHSLLYEYFTVYNELTKVKYVTEGMRKPAFLSGEQKKAIVDLLFKTNRKVTVKQLKEDYFKKIECFDSVEISGVEDRFNASLGTYHDLLKIIKDKDFLDNEENEDILEDIVLTLTLFEDREMIEERLKTYAHLFDDKVMKQLKRRRYTGWGRLSRKLINGIRDKQSGKTILDFLKSDGFANRNFMQLIHDDSLTFKEDIQKAQVSGQGDSLHEHIANLAGSPAIKKGILQTVKVVDELVKVMGRHKPENIVIEMARENQTTQKGQKNSRERMKRIEEGIKELGSQILKEHPVENTQLQNEKLYLYYLQNGRDMYVDQELDINRLSDYDVDHIVPQSFLKDDSIDNKVLTRSDKARGKSDNVPSEEVVKKMKNYWRQLLNAKLITQRKFDNLTKAERGGLSELDKAGFIKRQLVETRQITKHVAQILDSRMNTKYDENDKLIREVKVITLKSKLVSDFRKDFQFYKVREINNYHHAHDAYLNAVVGTALIKKYPKLESEFVYGDYKVYDVRKMIAKSEQEIGKATAKYFFYSNIMNFFKTEITLANGEIRKRPLIETNGETGEIVWDKGRDFATVRKVLSMPQVNIVKKTEVQTGGFSKESILPKRNSDKLIARKKDWDPKKYGGFDSPTVAYSVLVVAKVEKGKSKKLKSVKELLGITIMERSSFEKNPIDFLEAKGYKEVKKDLIIKLPKYSLFELENGRKRMLASAGELQKGNELALPSKYVNFLYLASHYEKLKGSPEDNEQKQLFVEQHKHYLDEIIEQISEFSKRVILADANLDKVLSAYNKHRDKPIREQAENIIHLFTLTNLGAPAAFKYFDTTIDRKRYTSTKEVLDATLIHQSITGLYETRIDLSQLGGDGGGGGGSEAAAKGGGGSGGTLGDQGSRGSDPLPEPRVTLTVEGIPTEFLVNTGAEHSVLTKPMGKMGSKRTVVAGATGSKVYPWTTKRLLKIGQKQVTHSFLVIPECPAPLLGRDLLTKLKAQIQFSTEGPQVTWEDRPAMCLVLNLEEEYRLHEKPVPPSIDPSWLQLFPMVWAEKAGMGLANQVPPVVVELKSDASPVAVRQYPMSKEAREGIRPHIQRFLDLGILVPCQSPWNTPLLPVKKPGTNDYRPVQDLREVNKRVQDIHPTVPNPYNLLSSLPPSHTWYSVLDLKDAFFCLKLHPNSQPLFAFEWRDPEKGNTGQLTWTRLPQGFKNSPTLFNEALHRDLASFRALNPQVVMLQYVDDLLVAAPTYRDCKEGTRRLLQELSKLGYRVSAKKAQLCREEVTYLGYLLKGGKRWLTPARKATVMKIPTPTTPRQVREFLGTAGFCRLWIPGFASLAAPLYPLTRPKVPFTWTEAHQEAFGRIKEALLSAPALALPDLTKPFALYVDEKEGVARGVLTQTLGPWRRPVAYLSKKLDPVASGWPTCLKAIAAVALLLKDADKLTLGQNVLVIAPHNLESIVRQPPDRWMTNARMTHYQSLLLNERVSFAPPAILNPATLLPVESDDTPIHICSEILAEETGTRPDLRDQPLPGVPAWYTDGSSFIMDGRRQAGAAIVDNKRTVWASNLPEGTSAQKAELIALTQALRLAEGKSINIYTDSRYAFATAHVHGAIYKQRGWLTSAGKDIKNKEEILALLEAIHLPKRVAIIHCPGHQRGTDPVATGNRKADEAAKQAAQSTRILTETTKNAGKRTADGSEFEKRTADGSEFESPKKKAKVE

SEQ ID NO: 1768 - protein, 2213 aa, synthetic construct
MPAAKRVKLDGGDKKYSIGLDIGTNSVGWAVITDEYKVPSKKFKVLGNTDRHSIKKNLIGALLFDSGETAEATRLKRTARRRYTRRKNRICYLQEIFSNEMAKVDDSFFHRLEESFLVEEDKKHERHPIFGNIVDEVAYHEKYPTIYHLRKKLVDSTDKADLRLIYLALAHMIKFRGHFLIEGDLNPDNSDVDKLFIQLVQTYNQLFEENPINASGVDAKAILSARLSKSRRLENLIAQLPGEKKNGLFGNLIALSLGLTPNFKSNFDLAEDAKLQLSKDTYDDDLDNLLAQIGDQYADLFLAAKNLSDAILLSDILRVNTEITKAPLSASMIKRYDEHHQDLTLLKALVRQQLPEKYKEIFFDQSKNGYAGYIDGGASQEEFYKFIKPILEKMDGTEELLVKLNREDLLRKQRTFDNGSIPHQIHLGELHAILRRQEDFYPFLKDNREKIEKILTFRIPYYVGPLARGNSRFAWMTRKSEETITPWNFEEVVDKGASAQSFIERMTNFDKNLPNEKVLPKHSLLYEYFTVYNELTKVKYVTEGMRKPAFLSGEQKKAIVDLLFKTNRKVTVKQLKEDYFKKIECFDSVEISGVEDRFNASLGTYHDLLKIIKDKDFLDNEENEDILEDIVLTLTLFEDREMIEERLKTYAHLFDDKVMKQLKRRRYTGWGRLSRKLINGIRDKQSGKTILDFLKSDGFANRNFMQLIHDDSLTFKEDIQKAQVSGQGDSLHEHIANLAGSPAIKKGILQTVKVVDELVKVMGRHKPENIVIEMARENQTTQKGQKNSRERMKRIEEGIKELGSQILKEHPVENTQLQNEKLYLYYLQNGRDMYVDQELDINRLSDYDVDHIVPQSFLKDDSIDNKVLTRSDKARGKSDNVPSEEVVKKMKNYWRQLLNAKLITQRKFDNLTKAERGGLSELDKAGFIKRQLVETRQITKHVAQILDSRMNTKYDENDKLIREVKVITLKSKLVSDFRKDFQFYKVREINNYHHAHDAYLNAVVGTALIKKYPKLESEFVYGDYKVYDVRKMIAKSEQEIGKATAKYFFYSNIMNFFKTEITLANGEIRKRPLIETNGETGEIVWDKGRDFATVRKVLSMPQVNIVKKTEVQTGGFSKESILPKRNSDKLIARKKDWDPKKYGGFDSPTVAYSVLVVAKVEKGKSKKLKSVKELLGITIMERSSFEKNPIDFLEAKGYKEVKKDLIIKLPKYSLFELENGRKRMLASAGELQKGNELALPSKYVNFLYLASHYEKLKGSPEDNEQKQLFVEQHKHYLDEIIEQISEFSKRVILADANLDKVLSAYNKHRDKPIREQAENIIHLFTLTNLGAPAAFKYFDTTIDRKRYTSTKEVLDATLIHQSITGLYETRIDLSQLGGDGGGGSGSSGGTLGDQGSRGSDPLPEPRVTLTVEGIPTEFLVNTGAEHSVLTKPMGKMGSKRTVVAGATGSKVYPWTTKRLLKIGQKQVTHSFLVIPECPAPLLGRDLLTKLKAQIQFSTEGPQVTWEDRPAMCLVLNLEEEYRLHEKPVPPSIDPSWLQLFPMVWAEKAGMGLANQVPPVVVELKSDASPVAVRQYPMSKEAREGIRPHIQRFLDLGILVPCQSPWNTPLLPVKKPGTNDYRPVQDLREVNKRVQDIHPTVPNPYNLLSSLPPSHTWYSVLDLKDAFFCLKLHPNSQPLFAFEWRDPEKGNTGQLTWTRLPQGFKNSPTLFNEALHRDLASFRALNPQVVMLQYVDDLLVAAPTYRDCKEGTRRLLQELSKLGYRVSAKKAQLCREEVTYLGYLLKGGKRWLTPARKATVMKIPTPTTPRQVREFLGTAGFCRLWIPGFASLAAPLYPLTRPKVPFTWTEAHQEAFGRIKEALLSAPALALPDLTKPFALYVDEKEGVARGVLTQTLGPWRRPVAYLSKKLDPVASGWPTCLKAIAAVALLLKDADKLTLGQNVLVIAPHNLESIVRQPPDRWMTNARMTHYQSLLLNERVSFAPPAILNPATLLPVESDDTPIHICSEILAEETGTRPDLRDQPLPGVPAWYTDGSSFIMDGRRQAGAAIVDNKRTVWASNLPEGTSAQKAELIALTQALRLAEGKSINIYTDSRYAFATAHVHGAIYKQRGWLTSAGKDIKNKEEILALLEAIHLPKRVAIIHCPGHQRGTDPVATGNRKADEAAKQAAQSTRILTETTKNAGKRTADGSEFEKRTADGSEFESPKKKAKVE

SEQ ID NO: 1769 - protein, 2218 aa, synthetic construct
MPAAKRVKLDGGDKKYSIGLDIGTNSVGWAVITDEYKVPSKKFKVLGNTDRHSIKKNLIGALLFDSGETAEATRLKRTARRRYTRRKNRICYLQEIFSNEMAKVDDSFFHRLEESFLVEEDKKHERHPIFGNIVDEVAYHEKYPTIYHLRKKLVDSTDKADLRLIYLALAHMIKFRGHFLIEGDLNPDNSDVDKLFIQLVQTYNQLFEENPINASGVDAKAILSARLSKSRRLENLIAQLPGEKKNGLFGNLIALSLGLTPNFKSNFDLAEDAKLQLSKDTYDDDLDNLLAQIGDQYADLFLAAKNLSDAILLSDILRVNTEITKAPLSASMIKRYDEHHQDLTLLKALVRQQLPEKYKEIFFDQSKNGYAGYIDGGASQEEFYKFIKPILEKMDGTEELLVKLNREDLLRKQRTFDNGSIPHQIHLGELHAILRRQEDFYPFLKDNREKIEKILTFRIPYYVGPLARGNSRFAWMTRKSEETITPWNFEEVVDKGASAQSFIERMTNFDKNLPNEKVLPKHSLLYEYFTVYNELTKVKYVTEGMRKPAFLSGEQKKAIVDLLFKTNRKVTVKQLKEDYFKKIECFDSVEISGVEDRFNASLGTYHDLLKIIKDKDFLDNEENEDILEDIVLTLTLFEDREMIEERLKTYAHLFDDKVMKQLKRRRYTGWGRLSRKLINGIRDKQSGKTILDFLKSDGFANRNFMQLIHDDSLTFKEDIQKAQVSGQGDSLHEHIANLAGSPAIKKGILQTVKVVDELVKVMGRHKPENIVIEMARENQTTQKGQKNSRERMKRIEEGIKELGSQILKEHPVENTQLQNEKLYLYYLQNGRDMYVDQELDINRLSDYDVDHIVPQSFLKDDSIDNKVLTRSDKARGKSDNVPSEEVVKKMKNYWRQLLNAKLITQRKFDNLTKAERGGLSELDKAGFIKRQLVETRQITKHVAQILDSRMNTKYDENDKLIREVKVITLKSKLVSDFRKDFQFYKVREINNYHHAHDAYLNAVVGTALIKKYPKLESEFVYGDYKVYDVRKMIAKSEQEIGKATAKYFFYSNIMNFFKTEITLANGEIRKRPLIETNGETGEIVWDKGRDFATVRKVLSMPQVNIVKKTEVQTGGFSKESILPKRNSDKLIARKKDWDPKKYGGFDSPTVAYSVLVVAKVEKGKSKKLKSVKELLGITIMERSSFEKNPIDFLEAKGYKEVKKDLIIKLPKYSLFELENGRKRMLASAGELQKGNELALPSKYVNFLYLASHYEKLKGSPEDNEQKQLFVEQHKHYLDEIIEQISEFSKRVILADANLDKVLSAYNKHRDKPIREQAENIIHLFTLTNLGAPAAFKYFDTTIDRKRYTSTKEVLDATLIHQSITGLYETRIDLSQLGGDGGGGSEAAAKGSSGGTLGDQGSRGSDPLPEPRVTLTVEGIPTEFLVNTGAEHSVLTKPMGKMGSKRTVVAGATGSKVYPWTTKRLLKIGQKQVTHSFLVIPECPAPLLGRDLLTKLKAQIQFSTEGPQVTWEDRPAMCLVLNLEEEYRLHEKPVPPSIDPSWLQLFPMVWAEKAGMGLANQVPPVVVELKSDASPVAVRQYPMSKEAREGIRPHIQRFLDLGILVPCQSPWNTPLLPVKKPGTNDYRPVQDLREVNKRVQDIHPTVPNPYNLLSSLPPSHTWYSVLDLKDAFFCLKLHPNSQPLFAFEWRDPEKGNTGQLTWTRLPQGFKNSPTLFNEALHRDLASFRALNPQVVMLQYVDDLLVAAPTYRDCKEGTRRLLQELSKLGYRVSAKKAQLCREEVTYLGYLLKGGKRWLTPARKATVMKIPTPTTPRQVREFLGKAGFCRLFIPGFASLAAPLYPLTRPKVPFTWTEAHQEAFGRIKEALLSAPALALPDLTKPFALYVDEKEGVARGVLTQTLGPWRRPVAYLSKKLDPVASGWPTCLKAIAAVALLLKDADKLTLGQNVLVIAPHNLESIVRQPPDRWMTNARMTHYQSLLLNERVSFAPPAILNPATLLPVESDDTPIHICSEILAEETGTRPDLRDQPLPGVPAWYTDGSSFIMDGRRQAGAAIVDNKRTVWASNLPEGTSAQKAELIALTQALRLAEGKSINIYTDSRYAFATAHVHGAIYKQRGWLTSAGKDIKNKEEILALLEAIHLPKRVAIIHCPGHQRGTDPVATGNRKADEAAKQAAQSTRILTETTKNAGKRTADGSEFEKRTADGSEFESPKKKAKVE

SEQ ID NO: 1770 - protein, 2218 aa, synthetic construct
MPAAKRVKLDGGDKKYSIGLDIGTNSVGWAVITDEYKVPSKKFKVLGNTDRHSIKKNLIGALLFDSGETAEATRLKRTARRRYTRRKNRICYLQEIFSNEMAKVDDSFFHRLEESFLVEEDKKHERHPIFGNIVDEVAYHEKYPTIYHLRKKLVDSTDKADLRLIYLALAHMIKFRGHFLIEGDLNPDNSDVDKLFIQLVQTYNQLFEENPINASGVDAKAILSARLSKSRRLENLIAQLPGEKKNGLFGNLIALSLGLTPNFKSNFDLAEDAKLQLSKDTYDDDLDNLLAQIGDQYADLFLAAKNLSDAILLSDILRVNTEITKAPLSASMIKRYDEHHQDLTLLKALVRQQLPEKYKEIFFDQSKNGYAGYIDGGASQEEFYKFIKPILEKMDGTEELLVKLNREDLLRKQRTFDNGSIPHQIHLGELHAILRRQEDFYPFLKDNREKIEKILTFRIPYYVGPLARGNSRFAWMTRKSEETITPWNFEEVVDKGASAQSFIERMTNFDKNLPNEKVLPKHSLLYEYFTVYNELTKVKYVTEGMRKPAFLSGEQKKAIVDLLFKTNRKVTVKQLKEDYFKKIECFDSVEISGVEDRFNASLGTYHDLLKIIKDKDFLDNEENEDILEDIVLTLTLFEDREMIEERLKTYAHLFDDKVMKQLKRRRYTGWGRLSRKLINGIRDKQSGKTILDFLKSDGFANRNFMQLIHDDSLTFKEDIQKAQVSGQGDSLHEHIANLAGSPAIKKGILQTVKVVDELVKVMGRHKPENIVIEMARENQTTQKGQKNSRERMKRIEEGIKELGSQILKEHPVENTQLQNEKLYLYYLQNGRDMYVDQELDINRLSDYDVDHIVPQSFLKDDSIDNKVLTRSDKARGKSDNVPSEEVVKKMKNYWRQLLNAKLITQRKFDNLTKAERGGLSELDKAGFIKRQLVETRQITKHVAQILDSRMNTKYDENDKLIREVKVITLKSKLVSDFRKDFQFYKVREINNYHHAHDAYLNAVVGTALIKKYPKLESEFVYGDYKVYDVRKMIAKSEQEIGKATAKYFFYSNIMNFFKTEITLANGEIRKRPLIETNGETGEIVWDKGRDFATVRKVLSMPQVNIVKKTEVQTGGFSKESILPKRNSDKLIARKKDWDPKKYGGFDSPTVAYSVLVVAKVEKGKSKKLKSVKELLGITIMERSSFEKNPIDFLEAKGYKEVKKDLIIKLPKYSLFELENGRKRMLASAGELQKGNELALPSKYVNFLYLASHYEKLKGSPEDNEQKQLFVEQHKHYLDEIIEQISEFSKRVILADANLDKVLSAYNKHRDKPIREQAENIIHLFTLTNLGAPAAFKYFDTTIDRKRYTSTKEVLDATLIHQSITGLYETRIDLSQLGGDGGEAAAKGGGPAPGGTLGDQGSRGSDPLPEPRVTLTVEGIPTEFLVNTGAEHSVLTKPMGKMGSKRTVVAGATGSKVYPWTTKRLLKIGQKQVTHSFLVIPECPAPLLGRDLLTKLKAQIQFSTEGPQVTWEDRPAMCLVLNLEEEYRLHEKPVPPSIDPSWLQLFPMVWAEKAGMGLANQVPPVVVELKSDASPVAVRQYPMSKEAREGIRPHIQRFLDLGILVPCQSPWNTPLLPVKKPGTNDYRPVQDLREVNKRVQDIHPTVPNPYNLLSSLPPSHTWYSVLDLKDAFFCLKLHPNSQPLFAFEWRDPEKGNTGQLTWTRLPQGFKNSPTLFNEALHRDLASFRALNPQVVMLQYVDDLLVAAPTYRDCKEGTRRLLQELSKLGYRVSAKKAQLCREEVTYLGYLLKGGKRWLTPARKATVMKIPTPTTPRQVREFLGKAGFCRLFIPGFASLAAPLYPLTRPKVPFTWTEAHQEAFGRIKEALLSAPALALPDLTKPFALYVDEKEGVARGVLTQTLGPWRRPVAYLSKKLDPVASGWPTCLKAIAAVALLLKDADKLTLGQNVLVIAPHNLESIVRQPPDRWMTNARMTHYQSLLLNERVSFAPPAILNPATLLPVESDDTPIHICSEILAEETGTRPDLRDQPLPGVPAWYTDGSSFIMDGRRQAGAAIVDNKRTVWASNLPEGTSAQKAELIALTQALRLAEGKSINIYTDSRYAFATAHVHGAIYKQRGWLTSAGKDIKNKEEILALLEAIHLPKRVAIIHCPGHQRGTDPVATGNRKADEAAKQAAQSTRILTETTKNAGKRTADGSEFEKRTADGSEFESPKKKAKVE

SEQ ID NO: 1771 - protein, 2218 aa, synthetic construct
MPAAKRVKLDGGDKKYSIGLDIGTNSVGWAVITDEYKVPSKKFKVLGNTDRHSIKKNLIGALLFDSGETAEATRLKRTARRRYTRRKNRICYLQEIFSNEMAKVDDSFFHRLEESFLVEEDKKHERHPIFGNIVDEVAYHEKYPTIYHLRKKLVDSTDKADLRLIYLALAHMIKFRGHFLIEGDLNPDNSDVDKLFIQLVQTYNQLFEENPINASGVDAKAILSARLSKSRRLENLIAQLPGEKKNGLFGNLIALSLGLTPNFKSNFDLAEDAKLQLSKDTYDDDLDNLLAQIGDQYADLFLAAKNLSDAILLSDILRVNTEITKAPLSASMIKRYDEHHQDLTLLKALVRQQLPEKYKEIFFDQSKNGYAGYIDGGASQEEFYKFIKPILEKMDGTEELLVKLNREDLLRKQRTFDNGSIPHQIHLGELHAILRRQEDFYPFLKDNREKIEKILTFRIPYYVGPLARGNSRFAWMTRKSEETITPWNFEEVVDKGASAQSFIERMTNFDKNLPNEKVLPKHSLLYEYFTVYNELTKVKYVTEGMRKPAFLSGEQKKAIVDLLFKTNRKVTVKQLKEDYFKKIECFDSVEISGVEDRFNASLGTYHDLLKIIKDKDFLDNEENEDILEDIVLTLTLFEDREMIEERLKTYAHLFDDKVMKQLKRRRYTGWGRLSRKLINGIRDKQSGKTILDFLKSDGFANRNFMQLIHDDSLTFKEDIQKAQVSGQGDSLHEHIANLAGSPAIKKGILQTVKVVDELVKVMGRHKPENIVIEMARENQTTQKGQKNSRERMKRIEEGIKELGSQILKEHPVENTQLQNEKLYLYYLQNGRDMYVDQELDINRLSDYDVDHIVPQSFLKDDSIDNKVLTRSDKARGKSDNVPSEEVVKKMKNYWRQLLNAKLITQRKFDNLTKAERGGLSELDKAGFIKRQLVETRQITKHVAQILDSRMNTKYDENDKLIREVKVITLKSKLVSDFRKDFQFYKVREINNYHHAHDAYLNAVVGTALIKKYPKLESEFVYGDYKVYDVRKMIAKSEQEIGKATAKYFFYSNIMNFFKTEITLANGEIRKRPLIETNGETGEIVWDKGRDFATVRKVLSMPQVNIVKKTEVQTGGFSKESILPKRNSDKLIARKKDWDPKKYGGFDSPTVAYSVLVVAKVEKGKSKKLKSVKELLGITIMERSSFEKNPIDFLEAKGYKEVKKDLIIKLPKYSLFELENGRKRMLASAGELQKGNELALPSKYVNFLYLASHYEKLKGSPEDNEQKQLFVEQHKHYLDEIIEQISEFSKRVILADANLDKVLSAYNKHRDKPIREQAENIIHLFTLTNLGAPAAFKYFDTTIDRKRYTSTKEVLDATLIHQSITGLYETRIDLSQLGGDGGGGGEAAAKGGSGGTLGDQGSRGSDPLPEPRVTLTVEGIPTEFLVNTGAEHSVLTKPMGKMGSKRTVVAGATGSKVYPWTTKRLLKIGQKQVTHSFLVIPECPAPLLGRDLLTKLKAQIQFSTEGPQVTWEDRPAMCLVLNLEEEYRLHEKPVPPSIDPSWLQLFPMVWAEKAGMGLANQVPPVVVELKSDASPVAVRQYPMSKEAREGIRPHIQRFLDLGILVPCQSPWNTPLLPVKKPGTNDYRPVQDLREVNKRVQDIHPTVPNPYNLLSSLPPSHTWYSVLDLKDAFFCLKLHPNSQPLFAFEWRDPEKGNTGQLTWTRLPQGFKNSPTLFNEALHRDLASFRALNPQVVMLQYVDDLLVAAPTYRDCKEGTRRLLQELSKLGYRVSAKKAQLCREEVTYLGYLLKGGKRWLTPARKATVMKIPTPTTPRQVREFLGKAGFCRLFIPGFASLAAPLYPLTRPKVPFTWTEAHQEAFGRIKEALLSAPALALPDLTKPFALYVDEKEGVARGVLTQTLGPWRRPVAYLSKKLDPVASGWPTCLKAIAAVALLLKDADKLTLGQNVLVIAPHNLESIVRQPPDRWMTNARMTHYQSLLLNERVSFAPPAILNPATLLPVESDDTPIHICSEILAEETGTRPDLRDQPLPGVPAWYTDGSSFIMDGRRQAGAAIVDNKRTVWASNLPEGTSAQKAELIALTQALRLAEGKSINIYTDSRYAFATAHVHGAIYKQRGWLTSAGKDIKNKEEILALLEAIHLPKRVAIIHCPGHQRGTDPVATGNRKADEAAKQAAQSTRILTETTKNAGKRTADGSEFEKRTADGSEFESPKKKAKVE

SEQ ID NO: 1772 - protein, 2213 aa, synthetic construct
MPAAKRVKLDGGDKKYSIGLDIGTNSVGWAVITDEYKVPSKKFKVLGNTDRHSIKKNLIGALLFDSGETAEATRLKRTARRRYTRRKNRICYLQEIFSNEMAKVDDSFFHRLEESFLVEEDKKHERHPIFGNIVDEVAYHEKYPTIYHLRKKLVDSTDKADLRLIYLALAHMIKFRGHFLIEGDLNPDNSDVDKLFIQLVQTYNQLFEENPINASGVDAKAILSARLSKSRRLENLIAQLPGEKKNGLFGNLIALSLGLTPNFKSNFDLAEDAKLQLSKDTYDDDLDNLLAQIGDQYADLFLAAKNLSDAILLSDILRVNTEITKAPLSASMIKRYDEHHQDLTLLKALVRQQLPEKYKEIFFDQSKNGYAGYIDGGASQEEFYKFIKPILEKMDGTEELLVKLNREDLLRKQRTFDNGSIPHQIHLGELHAILRRQEDFYPFLKDNREKIEKILTFRIPYYVGPLARGNSRFAWMTRKSEETITPWNFEEVVDKGASAQSFIERMTNFDKNLPNEKVLPKHSLLYEYFTVYNELTKVKYVTEGMRKPAFLSGEQKKAIVDLLFKTNRKVTVKQLKEDYFKKIECFDSVEISGVEDRFNASLGTYHDLLKIIKDKDFLDNEENEDILEDIVLTLTLFEDREMIEERLKTYAHLFDDKVMKQLKRRRYTGWGRLSRKLINGIRDKQSGKTILDFLKSDGFANRNFMQLIHDDSLTFKEDIQKAQVSGQGDSLHEHIANLAGSPAIKKGILQTVKVVDELVKVMGRHKPENIVIEMARENQTTQKGQKNSRERMKRIEEGIKELGSQILKEHPVENTQLQNEKLYLYYLQNGRDMYVDQELDINRLSDYDVDHIVPQSFLKDDSIDNKVLTRSDKARGKSDNVPSEEVVKKMKNYWRQLLNAKLITQRKFDNLTKAERGGLSELDKAGFIKRQLVETRQITKHVAQILDSRMNTKYDENDKLIREVKVITLKSKLVSDFRKDFQFYKVREINNYHHAHDAYLNAVVGTALIKKYPKLESEFVYGDYKVYDVRKMIAKSEQEIGKATAKYFFYSNIMNFFKTEITLANGEIRKRPLIETNGETGEIVWDKGRDFATVRKVLSMPQVNIVKKTEVQTGGFSKESILPKRNSDKLIARKKDWDPKKYGGFDSPTVAYSVLVVAKVEKGKSKKLKSVKELLGITIMERSSFEKNPIDFLEAKGYKEVKKDLIIKLPKYSLFELENGRKRMLASAGELQKGNELALPSKYVNFLYLASHYEKLKGSPEDNEQKQLFVEQHKHYLDEIIEQISEFSKRVILADANLDKVLSAYNKHRDKPIREQAENIIHLFTLTNLGAPAAFKYFDTTIDRKRYTSTKEVLDATLIHQSITGLYETRIDLSQLGGDGGGGGGSSGGTLGDQGSRGSDPLPEPRVTLTVEGIPTEFLVNTGAEHSVLTKPMGKMGSKRTVVAGATGSKVYPWTTKRLLKIGQKQVTHSFLVIPECPAPLLGRDLLTKLKAQIQFSTEGPQVTWEDRPAMCLVLNLEEEYRLHEKPVPPSIDPSWLQLFPMVWAEKAGMGLANQVPPVVVELKSDASPVAVRQYPMSKEAREGIRPHIQRFLDLGILVPCQSPWNTPLLPVKKPGTNDYRPVQDLREVNKRVQDIHPTVPNPYNLLSSLPPSHTWYSVLDLKDAFFCLKLHPNSQPLFAFEWRDPEKGNTGQLTWTRLPQGFKNSPTLFNEALHRDLASFRALNPQVVMLQYVDDLLVAAPTYRDCKEGTRRLLQELSKLGYRVSAKKAQLCREEVTYLGYLLKGGKRWLTPARKATVMKIPTPTTPRQVREFLGKAGFCRLFIPGFASLAAPLYPLTRPKVPFTWTEAHQEAFGRIKEALLSAPALALPDLTKPFALYVDEKEGVARGVLTQTLGPWRRPVAYLSKKLDPVASGWPTCLKAIAAVALLLKDADKLTLGQNVLVIAPHNLESIVRQPPDRWMTNARMTHYQSLLLNERVSFAPPAILNPATLLPVESDDTPIHICSEILAEETGTRPDLRDQPLPGVPAWYTDGSSFIMDGRRQAGAAIVDNKRTVWASNLPEGTSAQKAELIALTQALRLAEGKSINIYTDSRYAFATAHVHGAIYKQRGWLTSAGKDIKNKEEILALLEAIHLPKRVAIIHCPGHQRGTDPVATGNRKADEAAKQAAQSTRILTETTKNAGKRTADGSEFEKRTADGSEFESPKKKAKVE

SEQ ID NO: 1773 - protein, 2217 aa, synthetic construct
MPAAKRVKLDGGDKKYSIGLDIGTNSVGWAVITDEYKVPSKKFKVLGNTDRHSIKKNLIGALLFDSGETAEATRLKRTARRRYTRRKNRICYLQEIFSNEMAKVDDSFFHRLEESFLVEEDKKHERHPIFGNIVDEVAYHEKYPTIYHLRKKLVDSTDKADLRLIYLALAHMIKFRGHFLIEGDLNPDNSDVDKLFIQLVQTYNQLFEENPINASGVDAKAILSARLSKSRRLENLIAQLPGEKKNGLFGNLIALSLGLTPNFKSNFDLAEDAKLQLSKDTYDDDLDNLLAQIGDQYADLFLAAKNLSDAILLSDILRVNTEITKAPLSASMIKRYDEHHQDLTLLKALVRQQLPEKYKEIFFDQSKNGYAGYIDGGASQEEFYKFIKPILEKMDGTEELLVKLNREDLLRKQRTFDNGSIPHQIHLGELHAILRRQEDFYPFLKDNREKIEKILTFRIPYYVGPLARGNSRFAWMTRKSEETITPWNFEEVVDKGASAQSFIERMTNFDKNLPNEKVLPKHSLLYEYFTVYNELTKVKYVTEGMRKPAFLSGEQKKAIVDLLFKTNRKVTVKQLKEDYFKKIECFDSVEISGVEDRFNASLGTYHDLLKIIKDKDFLDNEENEDILEDIVLTLTLFEDREMIEERLKTYAHLFDDKVMKQLKRRRYTGWGRLSRKLINGIRDKQSGKTILDFLKSDGFANRNFMQLIHDDSLTFKEDIQKAQVSGQGDSLHEHIANLAGSPAIKKGILQTVKVVDELVKVMGRHKPENIVIEMARENQTTQKGQKNSRERMKRIEEGIKELGSQILKEHPVENTQLQNEKLYLYYLQNGRDMYVDQELDINRLSDYDVDHIVPQSFLKDDSIDNKVLTRSDKARGKSDNVPSEEVVKKMKNYWRQLLNAKLITQRKFDNLTKAERGGLSELDKAGFIKRQLVETRQITKHVAQILDSRMNTKYDENDKLIREVKVITLKSKLVSDFRKDFQFYKVREINNYHHAHDAYLNAVVGTALIKKYPKLESEFVYGDYKVYDVRKMIAKSEQEIGKATAKYFFYSNIMNFFKTEITLANGEIRKRPLIETNGETGEIVWDKGRDFATVRKVLSMPQVNIVKKTEVQTGGFSKESILPKRNSDKLIARKKDWDPKKYGGFDSPTVAYSVLVVAKVEKGKSKKLKSVKELLGITIMERSSFEKNPIDFLEAKGYKEVKKDLIIKLPKYSLFELENGRKRMLASAGELQKGNELALPSKYVNFLYLASHYEKLKGSPEDNEQKQLFVEQHKHYLDEIIEQISEFSKRVILADANLDKVLSAYNKHRDKPIREQAENIIHLFTLTNLGAPAAFKYFDTTIDRKRYTSTKEVLDATLIHQSITGLYETRIDLSQLGGDGGEAAAKEAAAKGGTLGDQGSRGSDPLPEPRVTLTVEGIPTEFLVNTGAEHSVLTKPMGKMGSKRTVVAGATGSKVYPWTTKRLLKIGQKQVTHSFLVIPECPAPLLGRDLLTKLKAQIQFSTEGPQVTWEDRPAMCLVLNLEEEYRLHEKPVPPSIDPSWLQLFPMVWAEKAGMGLANQVPPVVVELKSDASPVAVRQYPMSKEAREGIRPHIQRFLDLGILVPCQSPWNTPLLPVKKPGTNDYRPVQDLREVNKRVQDIHPTVPNPYNLLSSLPPSHTWYSVLDLKDAFFCLKLHPNSQPLFAFEWRDPEKGNTGQLTWTRLPQGFKNSPTLFNEALHRDLASFRALNPQVVMLQYVDDLLVAAPTYRDCKEGTRRLLQELSKLGYRVSAKKAQLCREEVTYLGYLLKGGKRWLTPARKATVMKIPTPTTPRQVREFLGKAGFCRLFIPGFASLAAPLYPLTRPKVPFTWTEAHQEAFGRIKEALLSAPALALPDLTKPFALYVDEKEGVARGVLTQTLGPWRRPVAYLSKKLDPVASGWPTCLKAIAAVALLLKDADKLTLGQNVLVIAPHNLESIVRQPPDRWMTNARMTHYQSLLLNERVSFAPPAILNPATLLPVESDDTPIHICSEILAEETGTRPDLRDQPLPGVPAWYTDGSSFIMDGRRQAGAAIVDNKRTVWASNLPEGTSAQKAELIALTQALRLAEGKSINIYTDSRYAFATAHVHGAIYKQRGWLTSAGKDIKNKEEILALLEAIHLPKRVAIIHCPGHQRGTDPVATGNRKADEAAKQAAQSTRILTETTKNAGKRTADGSEFEKRTADGSEFESPKKKAKVE

SEQ ID NO: 1774 - protein, 2216 aa, synthetic construct
MPAAKRVKLDGGDKKYSIGLDIGTNSVGWAVITDEYKVPSKKFKVLGNTDRHSIKKNLIGALLFDSGETAEATRLKRTARRRYTRRKNRICYLQEIFSNEMAKVDDSFFHRLEESFLVEEDKKHERHPIFGNIVDEVAYHEKYPTIYHLRKKLVDSTDKADLRLIYLALAHMIKFRGHFLIEGDLNPDNSDVDKLFIQLVQTYNQLFEENPINASGVDAKAILSARLSKSRRLENLIAQLPGEKKNGLFGNLIALSLGLTPNFKSNFDLAEDAKLQLSKDTYDDDLDNLLAQIGDQYADLFLAAKNLSDAILLSDILRVNTEITKAPLSASMIKRYDEHHQDLTLLKALVRQQLPEKYKEIFFDQSKNGYAGYIDGGASQEEFYKFIKPILEKMDGTEELLVKLNREDLLRKQRTFDNGSIPHQIHLGELHAILRRQEDFYPFLKDNREKIEKILTFRIPYYVGPLARGNSRFAWMTRKSEETITPWNFEEVVDKGASAQSFIERMTNFDKNLPNEKVLPKHSLLYEYFTVYNELTKVKYVTEGMRKPAFLSGEQKKAIVDLLFKTNRKVTVKQLKEDYFKKIECFDSVEISGVEDRFNASLGTYHDLLKIIKDKDFLDNEENEDILEDIVLTLTLFEDREMIEERLKTYAHLFDDKVMKQLKRRRYTGWGRLSRKLINGIRDKQSGKTILDFLKSDGFANRNFMQLIHDDSLTFKEDIQKAQVSGQGDSLHEHIANLAGSPAIKKGILQTVKVVDELVKVMGRHKPENIVIEMARENQTTQKGQKNSRERMKRIEEGIKELGSQILKEHPVENTQLQNEKLYLYYLQNGRDMYVDQELDINRLSDYDVDHIVPQSFLKDDSIDNKVLTRSDKARGKSDNVPSEEVVKKMKNYWRQLLNAKLITQRKFDNLTKAERGGLSELDKAGFIKRQLVETRQITKHVAQILDSRMNTKYDENDKLIREVKVITLKSKLVSDFRKDFQFYKVREINNYHHAHDAYLNAVVGTALIKKYPKLESEFVYGDYKVYDVRKMIAKSEQEIGKATAKYFFYSNIMNFFKTEITLANGEIRKRPLIETNGETGEIVWDKGRDFATVRKVLSMPQVNIVKKTEVQTGGFSKESILPKRNSDKLIARKKDWDPKKYGGFDSPTVAYSVLVVAKVEKGKSKKLKSVKELLGITIMERSSFEKNPIDFLEAKGYKEVKKDLIIKLPKYSLFELENGRKRMLASAGELQKGNELALPSKYVNFLYLASHYEKLKGSPEDNEQKQLFVEQHKHYLDEIIEQISEFSKRVILADANLDKVLSAYNKHRDKPIREQAENIIHLFTLTNLGAPAAFKYFDTTIDRKRYTSTKEVLDATLIHQSITGLYETRIDLSQLGGDGGPAPGGGGSSGGTLGDQGSRGSDPLPEPRVTLTVEGIPTEFLVNTGAEHSVLTKPMGKMGSKRTVVAGATGSKVYPWTTKRLLKIGQKQVTHSFLVIPECPAPLLGRDLLTKLKAQIQFSTEGPQVTWEDRPAMCLVLNLEEEYRLHEKPVPPSIDPSWLQLFPMVWAEKAGMGLANQVPPVVVELKSDASPVAVRQYPMSKEAREGIRPHIQRFLDLGILVPCQSPWNTPLLPVKKPGTNDYRPVQDLREVNKRVQDIHPTVPNPYNLLSSLPPSHTWYSVLDLKDAFFCLKLHPNSQPLFAFEWRDPEKGNTGQLTWTRLPQGFKNSPTLFNEALHRDLASFRALNPQVVMLQYVDDLLVAAPTYRDCKEGTRRLLQELSKLGYRVSAKKAQLCREEVTYLGYLLKGGKRWLTPARKATVMKIPTPTTPRQVREFLGKAGFCRLFIPGFASLAAPLYPLTRPKVPFTWTEAHQEAFGRIKEALLSAPALALPDLTKPFALYVDEKEGVARGVLTQTLGPWRRPVAYLSKKLDPVASGWPTCLKAIAAVALLLKDADKLTLGQNVLVIAPHNLESIVRQPPDRWMTNARMTHYQSLLLNERVSFAPPAILNPATLLPVESDDTPIHICSEILAEETGTRPDLRDQPLPGVPAWYTDGSSFIMDGRRQAGAAIVDNKRTVWASNLPEGTSAQKAELIALTQALRLAEGKSINIYTDSRYAFATAHVHGAIYKQRGWLTSAGKDIKNKEEILALLEAIHLPKRVAIIHCPGHQRGTDPVATGNRKADEAAKQAAQSTRILTETTKNAGKRTADGSEFEKRTADGSEFESPKKKAKVE

SEQ ID NO: 1775 - protein, 2216 aa, synthetic construct
MPAAKRVKLDGGDKKYSIGLDIGTNSVGWAVITDEYKVPSKKFKVLGNTDRHSIKKNLIGALLFDSGETAEATRLKRTARRRYTRRKNRICYLQEIFSNEMAKVDDSFFHRLEESFLVEEDKKHERHPIFGNIVDEVAYHEKYPTIYHLRKKLVDSTDKADLRLIYLALAHMIKFRGHFLIEGDLNPDNSDVDKLFIQLVQTYNQLFEENPINASGVDAKAILSARLSKSRRLENLIAQLPGEKKNGLFGNLIALSLGLTPNFKSNFDLAEDAKLQLSKDTYDDDLDNLLAQIGDQYADLFLAAKNLSDAILLSDILRVNTEITKAPLSASMIKRYDEHHQDLTLLKALVRQQLPEKYKEIFFDQSKNGYAGYIDGGASQEEFYKFIKPILEKMDGTEELLVKLNREDLLRKQRTFDNGSIPHQIHLGELHAILRRQEDFYPFLKDNREKIEKILTFRIPYYVGPLARGNSRFAWMTRKSEETITPWNFEEVVDKGASAQSFIERMTNFDKNLPNEKVLPKHSLLYEYFTVYNELTKVKYVTEGMRKPAFLSGEQKKAIVDLLFKTNRKVTVKQLKEDYFKKIECFDSVEISGVEDRFNASLGTYHDLLKIIKDKDFLDNEENEDILEDIVLTLTLFEDREMIEERLKTYAHLFDDKVMKQLKRRRYTGWGRLSRKLINGIRDKQSGKTILDFLKSDGFANRNFMQLIHDDSLTFKEDIQKAQVSGQGDSLHEHIANLAGSPAIKKGILQTVKVVDELVKVMGRHKPENIVIEMARENQTTQKGQKNSRERMKRIEEGIKELGSQILKEHPVENTQLQNEKLYLYYLQNGRDMYVDQELDINRLSDYDVDHIVPQSFLKDDSIDNKVLTRSDKARGKSDNVPSEEVVKKMKNYWRQLLNAKLITQRKFDNLTKAERGGLSELDKAGFIKRQLVETRQITKHVAQILDSRMNTKYDENDKLIREVKVITLKSKLVSDFRKDFQFYKVREINNYHHAHDAYLNAVVGTALIKKYPKLESEFVYGDYKVYDVRKMIAKSEQEIGKATAKYFFYSNIMNFFKTEITLANGEIRKRPLIETNGETGEIVWDKGRDFATVRKVLSMPQVNIVKKTEVQTGGFSKESILPKRNSDKLIARKKDWDPKKYGGFDSPTVAYSVLVVAKVEKGKSKKLKSVKELLGITIMERSSFEKNPIDFLEAKGYKEVKKDLIIKLPKYSLFELENGRKRMLASAGELQKGNELALPSKYVNFLYLASHYEKLKGSPEDNEQKQLFVEQHKHYLDEIIEQISEFSKRVILADANLDKVLSAYNKHRDKPIREQAENIIHLFTLTNLGAPAAFKYFDTTIDRKRYTSTKEVLDATLIHQSITGLYETRIDLSQLGGDGGGGGGGSGSSGGTLGDQGSRGSDPLPEPRVTLTVEGIPTEFLVNTGAEHSVLTKPMGKMGSKRTVVAGATGSKVYPWTTKRLLKIGQKQVTHSFLVIPECPAPLLGRDLLTKLKAQIQFSTEGPQVTWEDRPAMCLVLNLEEEYRLHEKPVPPSIDPSWLQLFPMVWAEKAGMGLANQVPPVVVELKSDASPVAVRQYPMSKEAREGIRPHIQRFLDLGILVPCQSPWNTPLLPVKKPGTNDYRPVQDLREVNKRVQDIHPTVPNPYNLLSSLPPSHTWYSVLDLKDAFFCLKLHPNSQPLFAFEWRDPEKGNTGQLTWTRLPQGFKNSPTLFNEALHRDLASFRALNPQVVMLQYVDDLLVAAPTYRDCKEGTRRLLQELSKLGYRVSAKKAQLCREEVTYLGYLLKGGKRWLTPARKATVMKIPTPTTPRQVREFLGKAGFCRLFIPGFASLAAPLYPLTRPKVPFTWTEAHQEAFGRIKEALLSAPALALPDLTKPFALYVDEKEGVARGVLTQTLGPWRRPVAYLSKKLDPVASGWPTCLKAIAAVALLLKDADKLTLGQNVLVIAPHNLESIVRQPPDRWMTNARMTHYQSLLLNERVSFAPPAILNPATLLPVESDDTPIHICSEILAEETGTRPDLRDQPLPGVPAWYTDGSSFIMDGRRQAGAAIVDNKRTVWASNLPEGTSAQKAELIALTQALRLAEGKSINIYTDSRYAFATAHVHGAIYKQRGWLTSAGKDIKNKEEILALLEAIHLPKRVAIIHCPGHQRGTDPVATGNRKADEAAKQAAQSTRILTETTKNAGKRTADGSEFEKRTADGSEFESPKKKAKVE

SEQ ID NO: 1776 - protein, 2210 aa, synthetic construct
MPAAKRVKLDGGDKKYSIGLDIGTNSVGWAVITDEYKVPSKKFKVLGNTDRHSIKKNLIGALLFDSGETAEATRLKRTARRRYTRRKNRICYLQEIFSNEMAKVDDSFFHRLEESFLVEEDKKHERHPIFGNIVDEVAYHEKYPTIYHLRKKLVDSTDKADLRLIYLALAHMIKFRGHFLIEGDLNPDNSDVDKLFIQLVQTYNQLFEENPINASGVDAKAILSARLSKSRRLENLIAQLPGEKKNGLFGNLIALSLGLTPNFKSNFDLAEDAKLQLSKDTYDDDLDNLLAQIGDQYADLFLAAKNLSDAILLSDILRVNTEITKAPLSASMIKRYDEHHQDLTLLKALVRQQLPEKYKEIFFDQSKNGYAGYIDGGASQEEFYKFIKPILEKMDGTEELLVKLNREDLLRKQRTFDNGSIPHQIHLGELHAILRRQEDFYPFLKDNREKIEKILTFRIPYYVGPLARGNSRFAWMTRKSEETITPWNFEEVVDKGASAQSFIERMTNFDKNLPNEKVLPKHSLLYEYFTVYNELTKVKYVTEGMRKPAFLSGEQKKAIVDLLFKTNRKVTVKQLKEDYFKKIECFDSVEISGVEDRFNASLGTYHDLLKIIKDKDFLDNEENEDILEDIVLTLTLFEDREMIEERLKTYAHLFDDKVMKQLKRRRYTGWGRLSRKLINGIRDKQSGKTILDFLKSDGFANRNFMQLIHDDSLTFKEDIQKAQVSGQGDSLHEHIANLAGSPAIKKGILQTVKVVDELVKVMGRHKPENIVIEMARENQTTQKGQKNSRERMKRIEEGIKELGSQILKEHPVENTQLQNEKLYLYYLQNGRDMYVDQELDINRLSDYDVDHIVPQSFLKDDSIDNKVLTRSDKARGKSDNVPSEEVVKKMKNYWRQLLNAKLITQRKFDNLTKAERGGLSELDKAGFIKRQLVETRQITKHVAQILDSRMNTKYDENDKLIREVKVITLKSKLVSDFRKDFQFYKVREINNYHHAHDAYLNAVVGTALIKKYPKLESEFVYGDYKVYDVRKMIAKSEQEIGKATAKYFFYSNIMNFFKTEITLANGEIRKRPLIETNGETGEIVWDKGRDFATVRKVLSMPQVNIVKKTEVQTGGFSKESILPKRNSDKLIARKKDWDPKKYGGFDSPTVAYSVLVVAKVEKGKSKKLKSVKELLGITIMERSSFEKNPIDFLEAKGYKEVKKDLIIKLPKYSLFELENGRKRMLASAGELQKGNELALPSKYVNFLYLASHYEKLKGSPEDNEQKQLFVEQHKHYLDEIIEQISEFSKRVILADANLDKVLSAYNKHRDKPIREQAENIIHLFTLTNLGAPAAFKYFDTTIDRKRYTSTKEVLDATLIHQSITGLYETRIDLSQLGGDGGGSSGGTLGDQGSRGSDPLPEPRVTLTVEGIPTEFLVNTGAEHSVLTKPMGKMGSKRTVVAGATGSKVYPWTTKRLLKIGQKQVTHSFLVIPECPAPLLGRDLLTKLKAQIQFSTEGPQVTWEDRPAMCLVLNLEEEYRLHEKPVPPSIDPSWLQLFPMVWAEKAGMGLANQVPPVVVELKSDASPVAVRQYPMSKEAREGIRPHIQRFLDLGILVPCQSPWNTPLLPVKKPGTNDYRPVQDLREVNKRVQDIHPTVPNPYNLLSSLPPSHTWYSVLDLKDAFFCLKLHPNSQPLFAFEWRDPEKGNTGQLTWTRLPQGFKNSPTLFNEALHRDLASFRALNPQVVMLQYVDDLLVAAPTYRDCKEGTRRLLQELSKLGYRVSAKKAQLCREEVTYLGYLLKGGKRWLTPARKATVMKIPTPTTPRQVREFLGKAGFCRLFIPGFASLAAPLYPLTRPKVPFTWTEAHQEAFGRIKEALLSAPALALPDLTKPFALYVDEKEGVARGVLTQTLGPWRRPVAYLSKKLDPVASGWPTCLKAIAAVALLLKDADKLTLGQNVLVIAPHNLESIVRQPPDRWMTNARMTHYQSLLLNERVSFAPPAILNPATLLPVESDDTPIHICSEILAEETGTRPDLRDQPLPGVPAWYTDGSSFIMDGRRQAGAAIVDNKRTVWASNLPEGTSAQKAELIALTQALRLAEGKSINIYTDSRYAFATAHVHGAIYKQRGWLTSAGKDIKNKEEILALLEAIHLPKRVAIIHCPGHQRGTDPVATGNRKADEAAKQAAQSTRILTETTKNAGKRTADGSEFEKRTADGSEFESPKKKAKVE

SEQ ID NO: 1777 - protein, 2222 aa, synthetic construct
MPAAKRVKLDGGDKKYSIGLDIGTNSVGWAVITDEYKVPSKKFKVLGNTDRHSIKKNLIGALLFDSGETAEATRLKRTARRRYTRRKNRICYLQEIFSNEMAKVDDSFFHRLEESFLVEEDKKHERHPIFGNIVDEVAYHEKYPTIYHLRKKLVDSTDKADLRLIYLALAHMIKFRGHFLIEGDLNPDNSDVDKLFIQLVQTYNQLFEENPINASGVDAKAILSARLSKSRRLENLIAQLPGEKKNGLFGNLIALSLGLTPNFKSNFDLAEDAKLQLSKDTYDDDLDNLLAQIGDQYADLFLAAKNLSDAILLSDILRVNTEITKAPLSASMIKRYDEHHQDLTLLKALVRQQLPEKYKEIFFDQSKNGYAGYIDGGASQEEFYKFIKPILEKMDGTEELLVKLNREDLLRKQRTFDNGSIPHQIHLGELHAILRRQEDFYPFLKDNREKIEKILTFRIPYYVGPLARGNSRFAWMTRKSEETITPWNFEEVVDKGASAQSFIERMTNFDKNLPNEKVLPKHSLLYEYFTVYNELTKVKYVTEGMRKPAFLSGEQKKAIVDLLFKTNRKVTVKQLKEDYFKKIECFDSVEISGVEDRFNASLGTYHDLLKIIKDKDFLDNEENEDILEDIVLTLTLFEDREMIEERLKTYAHLFDDKVMKQLKRRRYTGWGRLSRKLINGIRDKQSGKTILDFLKSDGFANRNFMQLIHDDSLTFKEDIQKAQVSGQGDSLHEHIANLAGSPAIKKGILQTVKVVDELVKVMGRHKPENIVIEMARENQTTQKGQKNSRERMKRIEEGIKELGSQILKEHPVENTQLQNEKLYLYYLQNGRDMYVDQELDINRLSDYDVDHIVPQSFLKDDSIDNKVLTRSDKARGKSDNVPSEEVVKKMKNYWRQLLNAKLITQRKFDNLTKAERGGLSELDKAGFIKRQLVETRQITKHVAQILDSRMNTKYDENDKLIREVKVITLKSKLVSDFRKDFQFYKVREINNYHHAHDAYLNAVVGTALIKKYPKLESEFVYGDYKVYDVRKMIAKSEQEIGKATAKYFFYSNIMNFFKTEITLANGEIRKRPLIETNGETGEIVWDKGRDFATVRKVLSMPQVNIVKKTEVQTGGFSKESILPKRNSDKLIARKKDWDPKKYGGFDSPTVAYSVLVVAKVEKGKSKKLKSVKELLGITIMERSSFEKNPIDFLEAKGYKEVKKDLIIKLPKYSLFELENGRKRMLASAGELQKGNELALPSKYVNFLYLASHYEKLKGSPEDNEQKQLFVEQHKHYLDEIIEQISEFSKRVILADANLDKVLSAYNKHRDKPIREQAENIIHLFTLTNLGAPAAFKYFDTTIDRKRYTSTKEVLDATLIHQSITGLYETRIDLSQLGGDGGGGGGSEAAAKGGGGSGGTLGDQGSRGSDPLPEPRVTLTVEGIPTEFLVNTGAEHSVLTKPMGKMGSKRTVVAGATGSKVYPWTTKRLLKIGQKQVTHSFLVIPECPAPLLGRDLLTKLKAQIQFSTEGPQVTWEDRPAMCLVLNLEEEYRLHEKPVPPSIDPSWLQLFPMVWAEKAGMGLANQVPPVVVELKSDASPVAVRQYPMSKEAREGIRPHIQRFLDLGILVPCQSPWNTPLLPVKKPGTNDYRPVQDLREVNKRVQDIHPTVPNPYNLLSSLPPSHTWYSVLDLKDAFFCLKLHPNSQPLFAFEWRDPEKGNTGQLTWTRLPQGFKNSPTLFNEALHRDLASFRALNPQVVMLQYVDDLLVAAPTYRDCKEGTRRLLQELSKLGYRVSAKKAQLCREEVTYLGYLLKGGKRWLTPARKATVMKIPTPTTPRQVREFLGKAGFCRLFIPGFASLAAPLYPLTRPKVPFTWTEAHQEAFGRIKEALLSAPALALPDLTKPFALYVDEKEGVARGVLTQTLGPWRRPVAYLSKKLDPVASGWPTCLKAIAAVALLLKDADKLTLGQNVLVIAPHNLESIVRQPPDRWMTNARMTHYQSLLLNERVSFAPPAILNPATLLPVESDDTPIHICSEILAEETGTRPDLRDQPLPGVPAWYTDGSSFIMDGRRQAGAAIVDNKRTVWASNLPEGTSAQKAELIALTQALRLAEGKSINIYTDSRYAFATAHVHGAIYKQRGWLTSAGKDIKNKEEILALLEAIHLPKRVAIIHCPGHQRGTDPVATGNRKADEAAKQAAQSTRILTETTKNAGKRTADGSEFEKRTADGSEFESPKKKAKVE

SEQ ID NO: 1778 - protein, 2237 aa, synthetic construct
MPAAKRVKLDGGDKKYSIGLDIGTNSVGWAVITDEYKVPSKKFKVLGNTDRHSIKKNLIGALLFDSGETAEATRLKRTARRRYTRRKNRICYLQEIFSNEMAKVDDSFFHRLEESFLVEEDKKHERHPIFGNIVDEVAYHEKYPTIYHLRKKLVDSTDKADLRLIYLALAHMIKFRGHFLIEGDLNPDNSDVDKLFIQLVQTYNQLFEENPINASGVDAKAILSARLSKSRRLENLIAQLPGEKKNGLFGNLIALSLGLTPNFKSNFDLAEDAKLQLSKDTYDDDLDNLLAQIGDQYADLFLAAKNLSDAILLSDILRVNTEITKAPLSASMIKRYDEHHQDLTLLKALVRQQLPEKYKEIFFDQSKNGYAGYIDGGASQEEFYKFIKPILEKMDGTEELLVKLNREDLLRKQRTFDNGSIPHQIHLGELHAILRRQEDFYPFLKDNREKIEKILTFRIPYYVGPLARGNSRFAWMTRKSEETITPWNFEEVVDKGASAQSFIERMTNFDKNLPNEKVLPKHSLLYEYFTVYNELTKVKYVTEGMRKPAFLSGEQKKAIVDLLFKTNRKVTVKQLKEDYFKKIECFDSVEISGVEDRFNASLGTYHDLLKIIKDKDFLDNEENEDILEDIVLTLTLFEDREMIEERLKTYAHLFDDKVMKQLKRRRYTGWGRLSRKLINGIRDKQSGKTILDFLKSDGFANRNFMQLIHDDSLTFKEDIQKAQVSGQGDSLHEHIANLAGSPAIKKGILQTVKVVDELVKVMGRHKPENIVIEMARENQTTQKGQKNSRERMKRIEEGIKELGSQILKEHPVENTQLQNEKLYLYYLQNGRDMYVDQELDINRLSDYDVDHIVPQSFLKDDSIDNKVLTRSDKARGKSDNVPSEEVVKKMKNYWRQLLNAKLITQRKFDNLTKAERGGLSELDKAGFIKRQLVETRQITKHVAQILDSRMNTKYDENDKLIREVKVITLKSKLVSDFRKDFQFYKVREINNYHHAHDAYLNAVVGTALIKKYPKLESEFVYGDYKVYDVRKMIAKSEQEIGKATAKYFFYSNIMNFFKTEITLANGEIRKRPLIETNGETGEIVWDKGRDFATVRKVLSMPQVNIVKKTEVQTGGFSKESILPKRNSDKLIARKKDWDPKKYGGFDSPTVAYSVLVVAKVEKGKSKKLKSVKELLGITIMERSSFEKNPIDFLEAKGYKEVKKDLIIKLPKYSLFELENGRKRMLASAGELQKGNELALPSKYVNFLYLASHYEKLKGSPEDNEQKQLFVEQHKHYLDEIIEQISEFSKRVILADANLDKVLSAYNKHRDKPIREQAENIIHLFTLTNLGAPAAFKYFDTTIDRKRYTSTKEVLDATLIHQSITGLYETRIDLSQLGGDGGEAAAKEAAAKEAAAKEAAAKEAAAKEAAAKGGTLGDQGSRGSDPLPEPRVTLTVEGIPTEFLVNTGAEHSVLTKPMGKMGSKRTVVAGATGSKVYPWTTKRLLKIGQKQVTHSFLVIPECPAPLLGRDLLTKLKAQIQFSTEGPQVTWEDRPAMCLVLNLEEEYRLHEKPVPPSIDPSWLQLFPMVWAEKAGMGLANQVPPVVVELKSDASPVAVRQYPMSKEAREGIRPHIQRFLDLGILVPCQSPWNTPLLPVKKPGTNDYRPVQDLREVNKRVQDIHPTVPNPYNLLSSLPPSHTWYSVLDLKDAFFCLKLHPNSQPLFAFEWRDPEKGNTGQLTWTRLPQGFKNSPTLFNEALHRDLASFRALNPQVVMLQYVDDLLVAAPTYRDCKEGTRRLLQELSKLGYRVSAKKAQLCREEVTYLGYLLKGGKRWLTPARKATVMKIPTPTTPRQVREFLGKAGFCRLFIPGFASLAAPLYPLTRPKVPFTWTEAHQEAFGRIKEALLSAPALALPDLTKPFALYVDEKEGVARGVLTQTLGPWRRPVAYLSKKLDPVASGWPTCLKAIAAVALLLKDADKLTLGQNVLVIAPHNLESIVRQPPDRWMTNARMTHYQSLLLNERVSFAPPAILNPATLLPVESDDTPIHICSEILAEETGTRPDLRDQPLPGVPAWYTDGSSFIMDGRRQAGAAIVDNKRTVWASNLPEGTSAQKAELIALTQALRLAEGKSINIYTDSRYAFATAHVHGAIYKQRGWLTSAGKDIKNKEEILALLEAIHLPKRVAIIHCPGHQRGTDPVATGNRKADEAAKQAAQSTRILTETTKNAGKRTADGSEFEKRTADGSEFESPKKKAKVE

SEQ ID NO: 1779 - protein, 2216 aa, synthetic construct
MPAAKRVKLDGGDKKYSIGLDIGTNSVGWAVITDEYKVPSKKFKVLGNTDRHSIKKNLIGALLFDSGETAEATRLKRTARRRYTRRKNRICYLQEIFSNEMAKVDDSFFHRLEESFLVEEDKKHERHPIFGNIVDEVAYHEKYPTIYHLRKKLVDSTDKADLRLIYLALAHMIKFRGHFLIEGDLNPDNSDVDKLFIQLVQTYNQLFEENPINASGVDAKAILSARLSKSRRLENLIAQLPGEKKNGLFGNLIALSLGLTPNFKSNFDLAEDAKLQLSKDTYDDDLDNLLAQIGDQYADLFLAAKNLSDAILLSDILRVNTEITKAPLSASMIKRYDEHHQDLTLLKALVRQQLPEKYKEIFFDQSKNGYAGYIDGGASQEEFYKFIKPILEKMDGTEELLVKLNREDLLRKQRTFDNGSIPHQIHLGELHAILRRQEDFYPFLKDNREKIEKILTFRIPYYVGPLARGNSRFAWMTRKSEETITPWNFEEVVDKGASAQSFIERMTNFDKNLPNEKVLPKHSLLYEYFTVYNELTKVKYVTEGMRKPAFLSGEQKKAIVDLLFKTNRKVTVKQLKEDYFKKIECFDSVEISGVEDRFNASLGTYHDLLKIIKDKDFLDNEENEDILEDIVLTLTLFEDREMIEERLKTYAHLFDDKVMKQLKRRRYTGWGRLSRKLINGIRDKQSGKTILDFLKSDGFANRNFMQLIHDDSLTFKEDIQKAQVSGQGDSLHEHIANLAGSPAIKKGILQTVKVVDELVKVMGRHKPENIVIEMARENQTTQKGQKNSRERMKRIEEGIKELGSQILKEHPVENTQLQNEKLYLYYLQNGRDMYVDQELDINRLSDYDVDHIVPQSFLKDDSIDNKVLTRSDKARGKSDNVPSEEVVKKMKNYWRQLLNAKLITQRKFDNLTKAERGGLSELDKAGFIKRQLVETRQITKHVAQILDSRMNTKYDENDKLIREVKVITLKSKLVSDFRKDFQFYKVREINNYHHAHDAYLNAVVGTALIKKYPKLESEFVYGDYKVYDVRKMIAKSEQEIGKATAKYFFYSNIMNFFKTEITLANGEIRKRPLIETNGETGEIVWDKGRDFATVRKVLSMPQVNIVKKTEVQTGGFSKESILPKRNSDKLIARKKDWDPKKYGGFDSPTVAYSVLVVAKVEKGKSKKLKSVKELLGITIMERSSFEKNPIDFLEAKGYKEVKKDLIIKLPKYSLFELENGRKRMLASAGELQKGNELALPSKYVNFLYLASHYEKLKGSPEDNEQKQLFVEQHKHYLDEIIEQISEFSKRVILADANLDKVLSAYNKHRDKPIREQAENIIHLFTLTNLGAPAAFKYFDTTIDRKRYTSTKEVLDATLIHQSITGLYETRIDLSQLGGDGGGGSPAPGGGGGTLGDQGSRGSDPLPEPRVTLTVEGIPTEFLVNTGAEHSVLTKPMGKMGSKRTVVAGATGSKVYPWTTKRLLKIGQKQVTHSFLVIPECPAPLLGRDLLTKLKAQIQFSTEGPQVTWEDRPAMCLVLNLEEEYRLHEKPVPPSIDPSWLQLFPMVWAEKAGMGLANQVPPVVVELKSDASPVAVRQYPMSKEAREGIRPHIQRFLDLGILVPCQSPWNTPLLPVKKPGTNDYRPVQDLREVNKRVQDIHPTVPNPYNLLSSLPPSHTWYSVLDLKDAFFCLKLHPNSQPLFAFEWRDPEKGNTGQLTWTRLPQGFKNSPTLFNEALHRDLASFRALNPQVVMLQYVDDLLVAAPTYRDCKEGTRRLLQELSKLGYRVSAKKAQLCREEVTYLGYLLKGGKRWLTPARKATVMKIPTPTTPRQVREFLGKAGFCRLFIPGFASLAAPLYPLTRPKVPFTWTEAHQEAFGRIKEALLSAPALALPDLTKPFALYVDEKEGVARGVLTQTLGPWRRPVAYLSKKLDPVASGWPTCLKAIAAVALLLKDADKLTLGQNVLVIAPHNLESIVRQPPDRWMTNARMTHYQSLLLNERVSFAPPAILNPATLLPVESDDTPIHICSEILAEETGTRPDLRDQPLPGVPAWYTDGSSFIMDGRRQAGAAIVDNKRTVWASNLPEGTSAQKAELIALTQALRLAEGKSINIYTDSRYAFATAHVHGAIYKQRGWLTSAGKDIKNKEEILALLEAIHLPKRVAIIHCPGHQRGTDPVATGNRKADEAAKQAAQSTRILTETTKNAGKRTADGSEFEKRTADGSEFESPKKKAKVE

SEQ ID NO: 1780 - protein, 2213 aa, synthetic construct
MPAAKRVKLDGGDKKYSIGLDIGTNSVGWAVITDEYKVPSKKFKVLGNTDRHSIKKNLIGALLFDSGETAEATRLKRTARRRYTRRKNRICYLQEIFSNEMAKVDDSFFHRLEESFLVEEDKKHERHPIFGNIVDEVAYHEKYPTIYHLRKKLVDSTDKADLRLIYLALAHMIKFRGHFLIEGDLNPDNSDVDKLFIQLVQTYNQLFEENPINASGVDAKAILSARLSKSRRLENLIAQLPGEKKNGLFGNLIALSLGLTPNFKSNFDLAEDAKLQLSKDTYDDDLDNLLAQIGDQYADLFLAAKNLSDAILLSDILRVNTEITKAPLSASMIKRYDEHHQDLTLLKALVRQQLPEKYKEIFFDQSKNGYAGYIDGGASQEEFYKFIKPILEKMDGTEELLVKLNREDLLRKQRTFDNGSIPHQIHLGELHAILRRQEDFYPFLKDNREKIEKILTFRIPYYVGPLARGNSRFAWMTRKSEETITPWNFEEVVDKGASAQSFIERMTNFDKNLPNEKVLPKHSLLYEYFTVYNELTKVKYVTEGMRKPAFLSGEQKKAIVDLLFKTNRKVTVKQLKEDYFKKIECFDSVEISGVEDRFNASLGTYHDLLKIIKDKDFLDNEENEDILEDIVLTLTLFEDREMIEERLKTYAHLFDDKVMKQLKRRRYTGWGRLSRKLINGIRDKQSGKTILDFLKSDGFANRNFMQLIHDDSLTFKEDIQKAQVSGQGDSLHEHIANLAGSPAIKKGILQTVKVVDELVKVMGRHKPENIVIEMARENQTTQKGQKNSRERMKRIEEGIKELGSQILKEHPVENTQLQNEKLYLYYLQNGRDMYVDQELDINRLSDYDVDHIVPQSFLKDDSIDNKVLTRSDKARGKSDNVPSEEVVKKMKNYWRQLLNAKLITQRKFDNLTKAERGGLSELDKAGFIKRQLVETRQITKHVAQILDSRMNTKYDENDKLIREVKVITLKSKLVSDFRKDFQFYKVREINNYHHAHDAYLNAVVGTALIKKYPKLESEFVYGDYKVYDVRKMIAKSEQEIGKATAKYFFYSNIMNFFKTEITLANGEIRKRPLIETNGETGEIVWDKGRDFATVRKVLSMPQVNIVKKTEVQTGGFSKESILPKRNSDKLIARKKDWDPKKYGGFDSPTVAYSVLVVAKVEKGKSKKLKSVKELLGITIMERSSFEKNPIDFLEAKGYKEVKKDLIIKLPKYSLFELENGRKRMLASAGELQKGNELALPSKYVNFLYLASHYEKLKGSPEDNEQKQLFVEQHKHYLDEIIEQISEFSKRVILADANLDKVLSAYNKHRDKPIREQAENIIHLFTLTNLGAPAAFKYFDTTIDRKRYTSTKEVLDATLIHQSITGLYETRIDLSQLGGDGGPAPGSSGGTLGDQGSRGSDPLPEPRVTLTVEGIPTEFLVNTGAEHSVLTKPMGKMGSKRTVVAGATGSKVYPWTTKRLLKIGQKQVTHSFLVIPECPAPLLGRDLLTKLKAQIQFSTEGPQVTWEDRPAMCLVLNLEEEYRLHEKPVPPSIDPSWLQLFPMVWAEKAGMGLANQVPPVVVELKSDASPVAVRQYPMSKEAREGIRPHIQRFLDLGILVPCQSPWNTPLLPVKKPGTNDYRPVQDLREVNKRVQDIHPTVPNPYNLLSSLPPSHTWYSVLDLKDAFFCLKLHPNSQPLFAFEWRDPEKGNTGQLTWTRLPQGFKNSPTLFNEALHRDLASFRALNPQVVMLQYVDDLLVAAPTYRDCKEGTRRLLQELSKLGYRVSAKKAQLCREEVTYLGYLLKGGKRWLTPARKATVMKIPTPTTPRQVREFLGKAGFCRLFIPGFASLAAPLYPLTRPKVPFTWTEAHQEAFGRIKEALLSAPALALPDLTKPFALYVDEKEGVARGVLTQTLGPWRRPVAYLSKKLDPVASGWPTCLKAIAAVALLLKDADKLTLGQNVLVIAPHNLESIVRQPPDRWMTNARMTHYQSLLLNERVSFAPPAILNPATLLPVESDDTPIHICSEILAEETGTRPDLRDQPLPGVPAWYTDGSSFIMDGRRQAGAAIVDNKRTVWASNLPEGTSAQKAELIALTQALRLAEGKSINIYTDSRYAFATAHVHGAIYKQRGWLTSAGKDIKNKEEILALLEAIHLPKRVAIIHCPGHQRGTDPVATGNRKADEAAKQAAQSTRILTETTKNAGKRTADGSEFEKRTADGSEFESPKKKAKVE

SEQ ID NO: 1781 - protein, 2222 aa, synthetic construct
MPAAKRVKLDGGDKKYSIGLDIGTNSVGWAVITDEYKVPSKKFKVLGNTDRHSIKKNLIGALLFDSGETAEATRLKRTARRRYTRRKNRICYLQEIFSNEMAKVDDSFFHRLEESFLVEEDKKHERHPIFGNIVDEVAYHEKYPTIYHLRKKLVDSTDKADLRLIYLALAHMIKFRGHFLIEGDLNPDNSDVDKLFIQLVQTYNQLFEENPINASGVDAKAILSARLSKSRRLENLIAQLPGEKKNGLFGNLIALSLGLTPNFKSNFDLAEDAKLQLSKDTYDDDLDNLLAQIGDQYADLFLAAKNLSDAILLSDILRVNTEITKAPLSASMIKRYDEHHQDLTLLKALVRQQLPEKYKEIFFDQSKNGYAGYIDGGASQEEFYKFIKPILEKMDGTEELLVKLNREDLLRKQRTFDNGSIPHQIHLGELHAILRRQEDFYPFLKDNREKIEKILTFRIPYYVGPLARGNSRFAWMTRKSEETITPWNFEEVVDKGASAQSFIERMTNFDKNLPNEKVLPKHSLLYEYFTVYNELTKVKYVTEGMRKPAFLSGEQKKAIVDLLFKTNRKVTVKQLKEDYFKKIECFDSVEISGVEDRFNASLGTYHDLLKIIKDKDFLDNEENEDILEDIVLTLTLFEDREMIEERLKTYAHLFDDKVMKQLKRRRYTGWGRLSRKLINGIRDKQSGKTILDFLKSDGFANRNFMQLIHDDSLTFKEDIQKAQVSGQGDSLHEHIANLAGSPAIKKGILQTVKVVDELVKVMGRHKPENIVIEMARENQTTQKGQKNSRERMKRIEEGIKELGSQILKEHPVENTQLQNEKLYLYYLQNGRDMYVDQELDINRLSDYDVDHIVPQSFLKDDSIDNKVLTRSDKARGKSDNVPSEEVVKKMKNYWRQLLNAKLITQRKFDNLTKAERGGLSELDKAGFIKRQLVETRQITKHVAQILDSRMNTKYDENDKLIREVKVITLKSKLVSDFRKDFQFYKVREINNYHHAHDAYLNAVVGTALIKKYPKLESEFVYGDYKVYDVRKMIAKSEQEIGKATAKYFFYSNIMNFFKTEITLANGEIRKRPLIETNGETGEIVWDKGRDFATVRKVLSMPQVNIVKKTEVQTGGFSKESILPKRNSDKLIARKKDWDPKKYGGFDSPTVAYSVLVVAKVEKGKSKKLKSVKELLGITIMERSSFEKNPIDFLEAKGYKEVKKDLIIKLPKYSLFELENGRKRMLASAGELQKGNELALPSKYVNFLYLASHYEKLKGSPEDNEQKQLFVEQHKHYLDEIIEQISEFSKRVILADANLDKVLSAYNKHRDKPIREQAENIIHLFTLTNLGAPAAFKYFDTTIDRKRYTSTKEVLDATLIHQSITGLYETRIDLSQLGGDGGEAAAKGGGGSEAAAKGGTLGDQGSRGSDPLPEPRVTLTVEGIPTEFLVNTGAEHSVLTKPMGKMGSKRTVVAGATGSKVYPWTTKRLLKIGQKQVTHSFLVIPECPAPLLGRDLLTKLKAQIQFSTEGPQVTWEDRPAMCLVLNLEEEYRLHEKPVPPSIDPSWLQLFPMVWAEKAGMGLANQVPPVVVELKSDASPVAVRQYPMSKEAREGIRPHIQRFLDLGILVPCQSPWNTPLLPVKKPGTNDYRPVQDLREVNKRVQDIHPTVPNPYNLLSSLPPSHTWYSVLDLKDAFFCLKLHPNSQPLFAFEWRDPEKGNTGQLTWTRLPQGFKNSPTLFNEALHRDLASFRALNPQVVMLQYVDDLLVAAPTYRDCKEGTRRLLQELSKLGYRVSAKKAQLCREEVTYLGYLLKGGKRWLTPARKATVMKIPTPTTPRQVREFLGKAGFCRLFIPGFASLAAPLYPLTRPKVPFTWTEAHQEAFGRIKEALLSAPALALPDLTKPFALYVDEKEGVARGVLTQTLGPWRRPVAYLSKKLDPVASGWPTCLKAIAAVALLLKDADKLTLGQNVLVIAPHNLESIVRQPPDRWMTNARMTHYQSLLLNERVSFAPPAILNPATLLPVESDDTPIHICSEILAEETGTRPDLRDQPLPGVPAWYTDGSSFIMDGRRQAGAAIVDNKRTVWASNLPEGTSAQKAELIALTQALRLAEGKSINIYTDSRYAFATAHVHGAIYKQRGWLTSAGKDIKNKEEILALLEAIHLPKRVAIIHCPGHQRGTDPVATGNRKADEAAKQAAQSTRILTETTKNAGKRTADGSEFEKRTADGSEFESPKKKAKVE

SEQ ID NO: 1782 - protein, 2219 aa, synthetic construct
MPAAKRVKLDGGDKKYSIGLDIGTNSVGWAVITDEYKVPSKKFKVLGNTDRHSIKKNLIGALLFDSGETAEATRLKRTARRRYTRRKNRICYLQEIFSNEMAKVDDSFFHRLEESFLVEEDKKHERHPIFGNIVDEVAYHEKYPTIYHLRKKLVDSTDKADLRLIYLALAHMIKFRGHFLIEGDLNPDNSDVDKLFIQLVQTYNQLFEENPINASGVDAKAILSARLSKSRRLENLIAQLPGEKKNGLFGNLIALSLGLTPNFKSNFDLAEDAKLQLSKDTYDDDLDNLLAQIGDQYADLFLAAKNLSDAILLSDILRVNTEITKAPLSASMIKRYDEHHQDLTLLKALVRQQLPEKYKEIFFDQSKNGYAGYIDGGASQEEFYKFIKPILEKMDGTEELLVKLNREDLLRKQRTFDNGSIPHQIHLGELHAILRRQEDFYPFLKDNREKIEKILTFRIPYYVGPLARGNSRFAWMTRKSEETITPWNFEEVVDKGASAQSFIERMTNFDKNLPNEKVLPKHSLLYEYFTVYNELTKVKYVTEGMRKPAFLSGEQKKAIVDLLFKTNRKVTVKQLKEDYFKKIECFDSVEISGVEDRFNASLGTYHDLLKIIKDKDFLDNEENEDILEDIVLTLTLFEDREMIEERLKTYAHLFDDKVMKQLKRRRYTGWGRLSRKLINGIRDKQSGKTILDFLKSDGFANRNFMQLIHDDSLTFKEDIQKAQVSGQGDSLHEHIANLAGSPAIKKGILQTVKVVDELVKVMGRHKPENIVIEMARENQTTQKGQKNSRERMKRIEEGIKELGSQILKEHPVENTQLQNEKLYLYYLQNGRDMYVDQELDINRLSDYDVDHIVPQSFLKDDSIDNKVLTRSDKARGKSDNVPSEEVVKKMKNYWRQLLNAKLITQRKFDNLTKAERGGLSELDKAGFIKRQLVETRQITKHVAQILDSRMNTKYDENDKLIREVKVITLKSKLVSDFRKDFQFYKVREINNYHHAHDAYLNAVVGTALIKKYPKLESEFVYGDYKVYDVRKMIAKSEQEIGKATAKYFFYSNIMNFFKTEITLANGEIRKRPLIETNGETGEIVWDKGRDFATVRKVLSMPQVNIVKKTEVQTGGFSKESILPKRNSDKLIARKKDWDPKKYGGFDSPTVAYSVLVVAKVEKGKSKKLKSVKELLGITIMERSSFEKNPIDFLEAKGYKEVKKDLIIKLPKYSLFELENGRKRMLASAGELQKGNELALPSKYVNFLYLASHYEKLKGSPEDNEQKQLFVEQHKHYLDEIIEQISEFSKRVILADANLDKVLSAYNKHRDKPIREQAENIIHLFTLTNLGAPAAFKYFDTTIDRKRYTSTKEVLDATLIHQSITGLYETRIDLSQLGGDGGGSAGSAAGSGEFGGTLGDQGSRGSDPLPEPRVTLTVEGIPTEFLVNTGAEHSVLTKPMGKMGSKRTVVAGATGSKVYPWTTKRLLKIGQKQVTHSFLVIPECPAPLLGRDLLTKLKAQIQFSTEGPQVTWEDRPAMCLVLNLEEEYRLHEKPVPPSIDPSWLQLFPMVWAEKAGMGLANQVPPVVVELKSDASPVAVRQYPMSKEAREGIRPHIQRFLDLGILVPCQSPWNTPLLPVKKPGTNDYRPVQDLREVNKRVQDIHPTVPNPYNLLSSLPPSHTWYSVLDLKDAFFCLKLHPNSQPLFAFEWRDPEKGNTGQLTWTRLPQGFKNSPTLFNEALHRDLASFRALNPQVVMLQYVDDLLVAAPTYRDCKEGTRRLLQELSKLGYRVSAKKAQLCREEVTYLGYLLKGGKRWLTPARKATVMKIPTPTTPRQVREFLGKAGFCRLFIPGFASLAAPLYPLTRPKVPFTWTEAHQEAFGRIKEALLSAPALALPDLTKPFALYVDEKEGVARGVLTQTLGPWRRPVAYLSKKLDPVASGWPTCLKAIAAVALLLKDADKLTLGQNVLVIAPHNLESIVRQPPDRWMTNARMTHYQSLLLNERVSFAPPAILNPATLLPVESDDTPIHICSEILAEETGTRPDLRDQPLPGVPAWYTDGSSFIMDGRRQAGAAIVDNKRTVWASNLPEGTSAQKAELIALTQALRLAEGKSINIYTDSRYAFATAHVHGAIYKQRGWLTSAGKDIKNKEEILALLEAIHLPKRVAIIHCPGHQRGTDPVATGNRKADEAAKQAAQSTRILTETTKNAGKRTADGSEFEKRTADGSEFESPKKKAKVE

SEQ ID NO: 1783 - protein, 2218 aa, synthetic construct
MPAAKRVKLDGGDKKYSIGLDIGTNSVGWAVITDEYKVPSKKFKVLGNTDRHSIKKNLIGALLFDSGETAEATRLKRTARRRYTRRKNRICYLQEIFSNEMAKVDDSFFHRLEESFLVEEDKKHERHPIFGNIVDEVAYHEKYPTIYHLRKKLVDSTDKADLRLIYLALAHMIKFRGHFLIEGDLNPDNSDVDKLFIQLVQTYNQLFEENPINASGVDAKAILSARLSKSRRLENLIAQLPGEKKNGLFGNLIALSLGLTPNFKSNFDLAEDAKLQLSKDTYDDDLDNLLAQIGDQYADLFLAAKNLSDAILLSDILRVNTEITKAPLSASMIKRYDEHHQDLTLLKALVRQQLPEKYKEIFFDQSKNGYAGYIDGGASQEEFYKFIKPILEKMDGTEELLVKLNREDLLRKQRTFDNGSIPHQIHLGELHAILRRQEDFYPFLKDNREKIEKILTFRIPYYVGPLARGNSRFAWMTRKSEETITPWNFEEVVDKGASAQSFIERMTNFDKNLPNEKVLPKHSLLYEYFTVYNELTKVKYVTEGMRKPAFLSGEQKKAIVDLLFKTNRKVTVKQLKEDYFKKIECFDSVEISGVEDRFNASLGTYHDLLKIIKDKDFLDNEENEDILEDIVLTLTLFEDREMIEERLKTYAHLFDDKVMKQLKRRRYTGWGRLSRKLINGIRDKQSGKTILDFLKSDGFANRNFMQLIHDDSLTFKEDIQKAQVSGQGDSLHEHIANLAGSPAIKKGILQTVKVVDELVKVMGRHKPENIVIEMARENQTTQKGQKNSRERMKRIEEGIKELGSQILKEHPVENTQLQNEKLYLYYLQNGRDMYVDQELDINRLSDYDVDHIVPQSFLKDDSIDNKVLTRSDKARGKSDNVPSEEVVKKMKNYWRQLLNAKLITQRKFDNLTKAERGGLSELDKAGFIKRQLVETRQITKHVAQILDSRMNTKYDENDKLIREVKVITLKSKLVSDFRKDFQFYKVREINNYHHAHDAYLNAVVGTALIKKYPKLESEFVYGDYKVYDVRKMIAKSEQEIGKATAKYFFYSNIMNFFKTEITLANGEIRKRPLIETNGETGEIVWDKGRDFATVRKVLSMPQVNIVKKTEVQTGGFSKESILPKRNSDKLIARKKDWDPKKYGGFDSPTVAYSVLVVAKVEKGKSKKLKSVKELLGITIMERSSFEKNPIDFLEAKGYKEVKKDLIIKLPKYSLFELENGRKRMLASAGELQKGNELALPSKYVNFLYLASHYEKLKGSPEDNEQKQLFVEQHKHYLDEIIEQISEFSKRVILADANLDKVLSAYNKHRDKPIREQAENIIHLFTLTNLGAPAAFKYFDTTIDRKRYTSTKEVLDATLIHQSITGLYETRIDLSQLGGDGGPAPAPAPAPAPGGTLGDQGSRGSDPLPEPRVTLTVEGIPTEFLVNTGAEHSVLTKPMGKMGSKRTVVAGATGSKVYPWTTKRLLKIGQKQVTHSFLVIPECPAPLLGRDLLTKLKAQIQFSTEGPQVTWEDRPAMCLVLNLEEEYRLHEKPVPPSIDPSWLQLFPMVWAEKAGMGLANQVPPVVVELKSDASPVAVRQYPMSKEAREGIRPHIQRFLDLGILVPCQSPWNTPLLPVKKPGTNDYRPVQDLREVNKRVQDIHPTVPNPYNLLSSLPPSHTWYSVLDLKDAFFCLKLHPNSQPLFAFEWRDPEKGNTGQLTWTRLPQGFKNSPTLFNEALHRDLASFRALNPQVVMLQYVDDLLVAAPTYRDCKEGTRRLLQELSKLGYRVSAKKAQLCREEVTYLGYLLKGGKRWLTPARKATVMKIPTPTTPRQVREFLGKAGFCRLFIPGFASLAAPLYPLTRPKVPFTWTEAHQEAFGRIKEALLSAPALALPDLTKPFALYVDEKEGVARGVLTQTLGPWRRPVAYLSKKLDPVASGWPTCLKAIAAVALLLKDADKLTLGQNVLVIAPHNLESIVRQPPDRWMTNARMTHYQSLLLNERVSFAPPAILNPATLLPVESDDTPIHICSEILAEETGTRPDLRDQPLPGVPAWYTDGSSFIMDGRRQAGAAIVDNKRTVWASNLPEGTSAQKAELIALTQALRLAEGKSINIYTDSRYAFATAHVHGAIYKQRGWLTSAGKDIKNKEEILALLEAIHLPKRVAIIHCPGHQRGTDPVATGNRKADEAAKQAAQSTRILTETTKNAGKRTADGSEFEKRTADGSEFESPKKKAKVE

SEQ ID NO: 1784 - protein, 2253 aa, synthetic construct
MPAAKRVKLDGGDKKYSIGLDIGTNSVGWAVITDEYKVPSKKFKVLGNTDRHSIKKNLIGALLFDSGETAEATRLKRTARRRYTRRKNRICYLQEIFSNEMAKVDDSFFHRLEESFLVEEDKKHERHPIFGNIVDEVAYHEKYPTIYHLRKKLVDSTDKADLRLIYLALAHMIKFRGHFLIEGDLNPDNSDVDKLFIQLVQTYNQLFEENPINASGVDAKAILSARLSKSRRLENLIAQLPGEKKNGLFGNLIALSLGLTPNFKSNFDLAEDAKLQLSKDTYDDDLDNLLAQIGDQYADLFLAAKNLSDAILLSDILRVNTEITKAPLSASMIKRYDEHHQDLTLLKALVRQQLPEKYKEIFFDQSKNGYAGYIDGGASQEEFYKFIKPILEKMDGTEELLVKLNREDLLRKQRTFDNGSIPHQIHLGELHAILRRQEDFYPFLKDNREKIEKILTFRIPYYVGPLARGNSRFAWMTRKSEETITPWNFEEVVDKGASAQSFIERMTNFDKNLPNEKVLPKHSLLYEYFTVYNELTKVKYVTEGMRKPAFLSGEQKKAIVDLLFKTNRKVTVKQLKEDYFKKIECFDSVEISGVEDRFNASLGTYHDLLKIIKDKDFLDNEENEDILEDIVLTLTLFEDREMIEERLKTYAHLFDDKVMKQLKRRRYTGWGRLSRKLINGIRDKQSGKTILDFLKSDGFANRNFMQLIHDDSLTFKEDIQKAQVSGQGDSLHEHIANLAGSPAIKKGILQTVKVVDELVKVMGRHKPENIVIEMARENQTTQKGQKNSRERMKRIEEGIKELGSQILKEHPVENTQLQNEKLYLYYLQNGRDMYVDQELDINRLSDYDVDHIVPQSFLKDDSIDNKVLTRSDKARGKSDNVPSEEVVKKMKNYWRQLLNAKLITQRKFDNLTKAERGGLSELDKAGFIKRQLVETRQITKHVAQILDSRMNTKYDENDKLIREVKVITLKSKLVSDFRKDFQFYKVREINNYHHAHDAYLNAVVGTALIKKYPKLESEFVYGDYKVYDVRKMIAKSEQEIGKATAKYFFYSNIMNFFKTEITLANGEIRKRPLIETNGETGEIVWDKGRDFATVRKVLSMPQVNIVKKTEVQTGGFSKESILPKRNSDKLIARKKDWDPKKYGGFDSPTVAYSVLVVAKVEKGKSKKLKSVKELLGITIMERSSFEKNPIDFLEAKGYKEVKKDLIIKLPKYSLFELENGRKRMLASAGELQKGNELALPSKYVNFLYLASHYEKLKGSPEDNEQKQLFVEQHKHYLDEIIEQISEFSKRVILADANLDKVLSAYNKHRDKPIREQAENIIHLFTLTNLGAPAAFKYFDTTIDRKRYTSTKEVLDATLIHQSITGLYETRIDLSQLGGDGGAEAAAKEAAAKEAAAKEAAAKALEAEAAAKEAAAKEAAAKEAAAKAGGTLGDQGSRGSDPLPEPRVTLTVEGIPTEFLVNTGAEHSVLTKPMGKMGSKRTVVAGATGSKVYPWTTKRLLKIGQKQVTHSFLVIPECPAPLLGRDLLTKLKAQIQFSTEGPQVTWEDRPAMCLVLNLEEEYRLHEKPVPPSIDPSWLQLFPMVWAEKAGMGLANQVPPVVVELKSDASPVAVRQYPMSKEAREGIRPHIQRFLDLGILVPCQSPWNTPLLPVKKPGTNDYRPVQDLREVNKRVQDIHPTVPNPYNLLSSLPPSHTWYSVLDLKDAFFCLKLHPNSQPLFAFEWRDPEKGNTGQLTWTRLPQGFKNSPTLFNEALHRDLASFRALNPQVVMLQYVDDLLVAAPTYRDCKEGTRRLLQELSKLGYRVSAKKAQLCREEVTYLGYLLKGGKRWLTPARKATVMKIPTPTTPRQVREFLGKAGFCRLFIPGFASLAAPLYPLTRPKVPFTWTEAHQEAFGRIKEALLSAPALALPDLTKPFALYVDEKEGVARGVLTQTLGPWRRPVAYLSKKLDPVASGWPTCLKAIAAVALLLKDADKLTLGQNVLVIAPHNLESIVRQPPDRWMTNARMTHYQSLLLNERVSFAPPAILNPATLLPVESDDTPIHICSEILAEETGTRPDLRDQPLPGVPAWYTDGSSFIMDGRRQAGAAIVDNKRTVWASNLPEGTSAQKAELIALTQALRLAEGKSINIYTDSRYAFATAHVHGAIYKQRGWLTSAGKDIKNKEEILALLEAIHLPKRVAIIHCPGHQRGTDPVATGNRKADEAAKQAAQSTRILTETTKNAGKRTADGSEFEKRTADGSEFESPKKKAKVE

SEQ ID NO: 1785 - protein, 2216 aa, synthetic construct
MPAAKRVKLDGGDKKYSIGLDIGTNSVGWAVITDEYKVPSKKFKVLGNTDRHSIKKNLIGALLFDSGETAEATRLKRTARRRYTRRKNRICYLQEIFSNEMAKVDDSFFHRLEESFLVEEDKKHERHPIFGNIVDEVAYHEKYPTIYHLRKKLVDSTDKADLRLIYLALAHMIKFRGHFLIEGDLNPDNSDVDKLFIQLVQTYNQLFEENPINASGVDAKAILSARLSKSRRLENLIAQLPGEKKNGLFGNLIALSLGLTPNFKSNFDLAEDAKLQLSKDTYDDDLDNLLAQIGDQYADLFLAAKNLSDAILLSDILRVNTEITKAPLSASMIKRYDEHHQDLTLLKALVRQQLPEKYKEIFFDQSKNGYAGYIDGGASQEEFYKFIKPILEKMDGTEELLVKLNREDLLRKQRTFDNGSIPHQIHLGELHAILRRQEDFYPFLKDNREKIEKILTFRIPYYVGPLARGNSRFAWMTRKSEETITPWNFEEVVDKGASAQSFIERMTNFDKNLPNEKVLPKHSLLYEYFTVYNELTKVKYVTEGMRKPAFLSGEQKKAIVDLLFKTNRKVTVKQLKEDYFKKIECFDSVEISGVEDRFNASLGTYHDLLKIIKDKDFLDNEENEDILEDIVLTLTLFEDREMIEERLKTYAHLFDDKVMKQLKRRRYTGWGRLSRKLINGIRDKQSGKTILDFLKSDGFANRNFMQLIHDDSLTFKEDIQKAQVSGQGDSLHEHIANLAGSPAIKKGILQTVKVVDELVKVMGRHKPENIVIEMARENQTTQKGQKNSRERMKRIEEGIKELGSQILKEHPVENTQLQNEKLYLYYLQNGRDMYVDQELDINRLSDYDVDHIVPQSFLKDDSIDNKVLTRSDKARGKSDNVPSEEVVKKMKNYWRQLLNAKLITQRKFDNLTKAERGGLSELDKAGFIKRQLVETRQITKHVAQILDSRMNTKYDENDKLIREVKVITLKSKLVSDFRKDFQFYKVREINNYHHAHDAYLNAVVGTALIKKYPKLESEFVYGDYKVYDVRKMIAKSEQEIGKATAKYFFYSNIMNFFKTEITLANGEIRKRPLIETNGETGEIVWDKGRDFATVRKVLSMPQVNIVKKTEVQTGGFSKESILPKRNSDKLIARKKDWDPKKYGGFDSPTVAYSVLVVAKVEKGKSKKLKSVKELLGITIMERSSFEKNPIDFLEAKGYKEVKKDLIIKLPKYSLFELENGRKRMLASAGELQKGNELALPSKYVNFLYLASHYEKLKGSPEDNEQKQLFVEQHKHYLDEIIEQISEFSKRVILADANLDKVLSAYNKHRDKPIREQAENIIHLFTLTNLGAPAAFKYFDTTIDRKRYTSTKEVLDATLIHQSITGLYETRIDLSQLGGDGGGGSGSSGGGGGTLGDQGSRGSDPLPEPRVTLTVEGIPTEFLVNTGAEHSVLTKPMGKMGSKRTVVAGATGSKVYPWTTKRLLKIGQKQVTHSFLVIPECPAPLLGRDLLTKLKAQIQFSTEGPQVTWEDRPAMCLVLNLEEEYRLHEKPVPPSIDPSWLQLFPMVWAEKAGMGLANQVPPVVVELKSDASPVAVRQYPMSKEAREGIRPHIQRFLDLGILVPCQSPWNTPLLPVKKPGTNDYRPVQDLREVNKRVQDIHPTVPNPYNLLSSLPPSHTWYSVLDLKDAFFCLKLHPNSQPLFAFEWRDPEKGNTGQLTWTRLPQGFKNSPTLFNEALHRDLASFRALNPQVVMLQYVDDLLVAAPTYRDCKEGTRRLLQELSKLGYRVSAKKAQLCREEVTYLGYLLKGGKRWLTPARKATVMKIPTPTTPRQVREFLGKAGFCRLFIPGFASLAAPLYPLTRPKVPFTWTEAHQEAFGRIKEALLSAPALALPDLTKPFALYVDEKEGVARGVLTQTLGPWRRPVAYLSKKLDPVASGWPTCLKAIAAVALLLKDADKLTLGQNVLVIAPHNLESIVRQPPDRWMTNARMTHYQSLLLNERVSFAPPAILNPATLLPVESDDTPIHICSEILAEETGTRPDLRDQPLPGVPAWYTDGSSFIMDGRRQAGAAIVDNKRTVWASNLPEGTSAQKAELIALTQALRLAEGKSINIYTDSRYAFATAHVHGAIYKQRGWLTSAGKDIKNKEEILALLEAIHLPKRVAIIHCPGHQRGTDPVATGNRKADEAAKQAAQSTRILTETTKNAGKRTADGSEFEKRTADGSEFESPKKKAKVE

SEQ ID NO: 1786 - protein, 2218 aa, synthetic construct
MPAAKRVKLDGGDKKYSIGLDIGTNSVGWAVITDEYKVPSKKFKVLGNTDRHSIKKNLIGALLFDSGETAEATRLKRTARRRYTRRKNRICYLQEIFSNEMAKVDDSFFHRLEESFLVEEDKKHERHPIFGNIVDEVAYHEKYPTIYHLRKKLVDSTDKADLRLIYLALAHMIKFRGHFLIEGDLNPDNSDVDKLFIQLVQTYNQLFEENPINASGVDAKAILSARLSKSRRLENLIAQLPGEKKNGLFGNLIALSLGLTPNFKSNFDLAEDAKLQLSKDTYDDDLDNLLAQIGDQYADLFLAAKNLSDAILLSDILRVNTEITKAPLSASMIKRYDEHHQDLTLLKALVRQQLPEKYKEIFFDQSKNGYAGYIDGGASQEEFYKFIKPILEKMDGTEELLVKLNREDLLRKQRTFDNGSIPHQIHLGELHAILRRQEDFYPFLKDNREKIEKILTFRIPYYVGPLARGNSRFAWMTRKSEETITPWNFEEVVDKGASAQSFIERMTNFDKNLPNEKVLPKHSLLYEYFTVYNELTKVKYVTEGMRKPAFLSGEQKKAIVDLLFKTNRKVTVKQLKEDYFKKIECFDSVEISGVEDRFNASLGTYHDLLKIIKDKDFLDNEENEDILEDIVLTLTLFEDREMIEERLKTYAHLFDDKVMKQLKRRRYTGWGRLSRKLINGIRDKQSGKTILDFLKSDGFANRNFMQLIHDDSLTFKEDIQKAQVSGQGDSLHEHIANLAGSPAIKKGILQTVKVVDELVKVMGRHKPENIVIEMARENQTTQKGQKNSRERMKRIEEGIKELGSQILKEHPVENTQLQNEKLYLYYLQNGRDMYVDQELDINRLSDYDVDHIVPQSFLKDDSIDNKVLTRSDKARGKSDNVPSEEVVKKMKNYWRQLLNAKLITQRKFDNLTKAERGGLSELDKAGFIKRQLVETRQITKHVAQILDSRMNTKYDENDKLIREVKVITLKSKLVSDFRKDFQFYKVREINNYHHAHDAYLNAVVGTALIKKYPKLESEFVYGDYKVYDVRKMIAKSEQEIGKATAKYFFYSNIMNFFKTEITLANGEIRKRPLIETNGETGEIVWDKGRDFATVRKVLSMPQVNIVKKTEVQTGGFSKESILPKRNSDKLIARKKDWDPKKYGGFDSPTVAYSVLVVAKVEKGKSKKLKSVKELLGITIMERSSFEKNPIDFLEAKGYKEVKKDLIIKLPKYSLFELENGRKRMLASAGELQKGNELALPSKYVNFLYLASHYEKLKGSPEDNEQKQLFVEQHKHYLDEIIEQISEFSKRVILADANLDKVLSAYNKHRDKPIREQAENIIHLFTLTNLGAPAAFKYFDTTIDRKRYTSTKEVLDATLIHQSITGLYETRIDLSQLGGDGGEAAAKPAPGGSGGTLGDQGSRGSDPLPEPRVTLTVEGIPTEFLVNTGAEHSVLTKPMGKMGSKRTVVAGATGSKVYPWTTKRLLKIGQKQVTHSFLVIPECPAPLLGRDLLTKLKAQIQFSTEGPQVTWEDRPAMCLVLNLEEEYRLHEKPVPPSIDPSWLQLFPMVWAEKAGMGLANQVPPVVVELKSDASPVAVRQYPMSKEAREGIRPHIQRFLDLGILVPCQSPWNTPLLPVKKPGTNDYRPVQDLREVNKRVQDIHPTVPNPYNLLSSLPPSHTWYSVLDLKDAFFCLKLHPNSQPLFAFEWRDPEKGNTGQLTWTRLPQGFKNSPTLFNEALHRDLASFRALNPQVVMLQYVDDLLVAAPTYRDCKEGTRRLLQELSKLGYRVSAKKAQLCREEVTYLGYLLKGGKRWLTPARKATVMKIPTPTTPRQVREFLGKAGFCRLFIPGFASLAAPLYPLTRPKVPFTWTEAHQEAFGRIKEALLSAPALALPDLTKPFALYVDEKEGVARGVLTQTLGPWRRPVAYLSKKLDPVASGWPTCLKAIAAVALLLKDADKLTLGQNVLVIAPHNLESIVRQPPDRWMTNARMTHYQSLLLNERVSFAPPAILNPATLLPVESDDTPIHICSEILAEETGTRPDLRDQPLPGVPAWYTDGSSFIMDGRRQAGAAIVDNKRTVWASNLPEGTSAQKAELIALTQALRLAEGKSINIYTDSRYAFATAHVHGAIYKQRGWLTSAGKDIKNKEEILALLEAIHLPKRVAIIHCPGHQRGTDPVATGNRKADEAAKQAAQSTRILTETTKNAGKRTADGSEFEKRTADGSEFESPKKKAKVE

SEQ ID NO: 1787 - protein, 2218 aa, synthetic construct
MPAAKRVKLDGGDKKYSIGLDIGTNSVGWAVITDEYKVPSKKFKVLGNTDRHSIKKNLIGALLFDSGETAEATRLKRTARRRYTRRKNRICYLQEIFSNEMAKVDDSFFHRLEESFLVEEDKKHERHPIFGNIVDEVAYHEKYPTIYHLRKKLVDSTDKADLRLIYLALAHMIKFRGHFLIEGDLNPDNSDVDKLFIQLVQTYNQLFEENPINASGVDAKAILSARLSKSRRLENLIAQLPGEKKNGLFGNLIALSLGLTPNFKSNFDLAEDAKLQLSKDTYDDDLDNLLAQIGDQYADLFLAAKNLSDAILLSDILRVNTEITKAPLSASMIKRYDEHHQDLTLLKALVRQQLPEKYKEIFFDQSKNGYAGYIDGGASQEEFYKFIKPILEKMDGTEELLVKLNREDLLRKQRTFDNGSIPHQIHLGELHAILRRQEDFYPFLKDNREKIEKILTFRIPYYVGPLARGNSRFAWMTRKSEETITPWNFEEVVDKGASAQSFIERMTNFDKNLPNEKVLPKHSLLYEYFTVYNELTKVKYVTEGMRKPAFLSGEQKKAIVDLLFKTNRKVTVKQLKEDYFKKIECFDSVEISGVEDRFNASLGTYHDLLKIIKDKDFLDNEENEDILEDIVLTLTLFEDREMIEERLKTYAHLFDDKVMKQLKRRRYTGWGRLSRKLINGIRDKQSGKTILDFLKSDGFANRNFMQLIHDDSLTFKEDIQKAQVSGQGDSLHEHIANLAGSPAIKKGILQTVKVVDELVKVMGRHKPENIVIEMARENQTTQKGQKNSRERMKRIEEGIKELGSQILKEHPVENTQLQNEKLYLYYLQNGRDMYVDQELDINRLSDYDVDHIVPQSFLKDDSIDNKVLTRSDKARGKSDNVPSEEVVKKMKNYWRQLLNAKLITQRKFDNLTKAERGGLSELDKAGFIKRQLVETRQITKHVAQILDSRMNTKYDENDKLIREVKVITLKSKLVSDFRKDFQFYKVREINNYHHAHDAYLNAVVGTALIKKYPKLESEFVYGDYKVYDVRKMIAKSEQEIGKATAKYFFYSNIMNFFKTEITLANGEIRKRPLIETNGETGEIVWDKGRDFATVRKVLSMPQVNIVKKTEVQTGGFSKESILPKRNSDKLIARKKDWDPKKYGGFDSPTVAYSVLVVAKVEKGKSKKLKSVKELLGITIMERSSFEKNPIDFLEAKGYKEVKKDLIIKLPKYSLFELENGRKRMLASAGELQKGNELALPSKYVNFLYLASHYEKLKGSPEDNEQKQLFVEQHKHYLDEIIEQISEFSKRVILADANLDKVLSAYNKHRDKPIREQAENIIHLFTLTNLGAPAAFKYFDTTIDRKRYTSTKEVLDATLIHQSITGLYETRIDLSQLGGDGGGGSPAPEAAAKGGTLGDQGSRGSDPLPEPRVTLTVEGIPTEFLVNTGAEHSVLTKPMGKMGSKRTVVAGATGSKVYPWTTKRLLKIGQKQVTHSFLVIPECPAPLLGRDLLTKLKAQIQFSTEGPQVTWEDRPAMCLVLNLEEEYRLHEKPVPPSIDPSWLQLFPMVWAEKAGMGLANQVPPVVVELKSDASPVAVRQYPMSKEAREGIRPHIQRFLDLGILVPCQSPWNTPLLPVKKPGTNDYRPVQDLREVNKRVQDIHPTVPNPYNLLSSLPPSHTWYSVLDLKDAFFCLKLHPNSQPLFAFEWRDPEKGNTGQLTWTRLPQGFKNSPTLFNEALHRDLASFRALNPQVVMLQYVDDLLVAAPTYRDCKEGTRRLLQELSKLGYRVSAKKAQLCREEVTYLGYLLKGGKRWLTPARKATVMKIPTPTTPRQVREFLGKAGFCRLFIPGFASLAAPLYPLTRPKVPFTWTEAHQEAFGRIKEALLSAPALALPDLTKPFALYVDEKEGVARGVLTQTLGPWRRPVAYLSKKLDPVASGWPTCLKAIAAVALLLKDADKLTLGQNVLVIAPHNLESIVRQPPDRWMTNARMTHYQSLLLNERVSFAPPAILNPATLLPVESDDTPIHICSEILAEETGTRPDLRDQPLPGVPAWYTDGSSFIMDGRRQAGAAIVDNKRTVWASNLPEGTSAQKAELIALTQALRLAEGKSINIYTDSRYAFATAHVHGAIYKQRGWLTSAGKDIKNKEEILALLEAIHLPKRVAIIHCPGHQRGTDPVATGNRKADEAAKQAAQSTRILTETTKNAGKRTADGSEFEKRTADGSEFESPKKKAKVE

SEQ ID NO: 1788 - protein, 2212 aa, synthetic construct
MPAAKRVKLDGGDKKYSIGLDIGTNSVGWAVITDEYKVPSKKFKVLGNTDRHSIKKNLIGALLFDSGETAEATRLKRTARRRYTRRKNRICYLQEIFSNEMAKVDDSFFHRLEESFLVEEDKKHERHPIFGNIVDEVAYHEKYPTIYHLRKKLVDSTDKADLRLIYLALAHMIKFRGHFLIEGDLNPDNSDVDKLFIQLVQTYNQLFEENPINASGVDAKAILSARLSKSRRLENLIAQLPGEKKNGLFGNLIALSLGLTPNFKSNFDLAEDAKLQLSKDTYDDDLDNLLAQIGDQYADLFLAAKNLSDAILLSDILRVNTEITKAPLSASMIKRYDEHHQDLTLLKALVRQQLPEKYKEIFFDQSKNGYAGYIDGGASQEEFYKFIKPILEKMDGTEELLVKLNREDLLRKQRTFDNGSIPHQIHLGELHAILRRQEDFYPFLKDNREKIEKILTFRIPYYVGPLARGNSRFAWMTRKSEETITPWNFEEVVDKGASAQSFIERMTNFDKNLPNEKVLPKHSLLYEYFTVYNELTKVKYVTEGMRKPAFLSGEQKKAIVDLLFKTNRKVTVKQLKEDYFKKIECFDSVEISGVEDRFNASLGTYHDLLKIIKDKDFLDNEENEDILEDIVLTLTLFEDREMIEERLKTYAHLFDDKVMKQLKRRRYTGWGRLSRKLINGIRDKQSGKTILDFLKSDGFANRNFMQLIHDDSLTFKEDIQKAQVSGQGDSLHEHIANLAGSPAIKKGILQTVKVVDELVKVMGRHKPENIVIEMARENQTTQKGQKNSRERMKRIEEGIKELGSQILKEHPVENTQLQNEKLYLYYLQNGRDMYVDQELDINRLSDYDVDHIVPQSFLKDDSIDNKVLTRSDKARGKSDNVPSEEVVKKMKNYWRQLLNAKLITQRKFDNLTKAERGGLSELDKAGFIKRQLVETRQITKHVAQILDSRMNTKYDENDKLIREVKVITLKSKLVSDFRKDFQFYKVREINNYHHAHDAYLNAVVGTALIKKYPKLESEFVYGDYKVYDVRKMIAKSEQEIGKATAKYFFYSNIMNFFKTEITLANGEIRKRPLIETNGETGEIVWDKGRDFATVRKVLSMPQVNIVKKTEVQTGGFSKESILPKRNSDKLIARKKDWDPKKYGGFDSPTVAYSVLVVAKVEKGKSKKLKSVKELLGITIMERSSFEKNPIDFLEAKGYKEVKKDLIIKLPKYSLFELENGRKRMLASAGELQKGNELALPSKYVNFLYLASHYEKLKGSPEDNEQKQLFVEQHKHYLDEIIEQISEFSKRVILADANLDKVLSAYNKHRDKPIREQAENIIHLFTLTNLGAPAAFKYFDTTIDRKRYTSTKEVLDATLIHQSITGLYETRIDLSQLGGDGGGGGGSGGTLGDQGSRGSDPLPEPRVTLTVEGIPTEFLVNTGAEHSVLTKPMGKMGSKRTVVAGATGSKVYPWTTKRLLKIGQKQVTHSFLVIPECPAPLLGRDLLTKLKAQIQFSTEGPQVTWEDRPAMCLVLNLEEEYRLHEKPVPPSIDPSWLQLFPMVWAEKAGMGLANQVPPVVVELKSDASPVAVRQYPMSKEAREGIRPHIQRFLDLGILVPCQSPWNTPLLPVKKPGTNDYRPVQDLREVNKRVQDIHPTVPNPYNLLSSLPPSHTWYSVLDLKDAFFCLKLHPNSQPLFAFEWRDPEKGNTGQLTWTRLPQGFKNSPTLFNEALHRDLASFRALNPQVVMLQYVDDLLVAAPTYRDCKEGTRRLLQELSKLGYRVSAKKAQLCREEVTYLGYLLKGGKRWLTPARKATVMKIPTPTTPRQVREFLGKAGFCRLFIPGFASLAAPLYPLTRPKVPFTWTEAHQEAFGRIKEALLSAPALALPDLTKPFALYVDEKEGVARGVLTQTLGPWRRPVAYLSKKLDPVASGWPTCLKAIAAVALLLKDADKLTLGQNVLVIAPHNLESIVRQPPDRWMTNARMTHYQSLLLNERVSFAPPAILNPATLLPVESDDTPIHICSEILAEETGTRPDLRDQPLPGVPAWYTDGSSFIMDGRRQAGAAIVDNKRTVWASNLPEGTSAQKAELIALTQALRLAEGKSINIYTDSRYAFATAHVHGAIYKQRGWLTSAGKDIKNKEEILALLEAIHLPKRVAIIHCPGHQRGTDPVATGNRKADEAAKQAAQSTRILTETTKNAGKRTADGSEFEKRTADGSEFESPKKKAKVE

SEQ ID NO: 1789 - protein, 2218 aa, synthetic construct
MPAAKRVKLDGGDKKYSIGLDIGTNSVGWAVITDEYKVPSKKFKVLGNTDRHSIKKNLIGALLFDSGETAEATRLKRTARRRYTRRKNRICYLQEIFSNEMAKVDDSFFHRLEESFLVEEDKKHERHPIFGNIVDEVAYHEKYPTIYHLRKKLVDSTDKADLRLIYLALAHMIKFRGHFLIEGDLNPDNSDVDKLFIQLVQTYNQLFEENPINASGVDAKAILSARLSKSRRLENLIAQLPGEKKNGLFGNLIALSLGLTPNFKSNFDLAEDAKLQLSKDTYDDDLDNLLAQIGDQYADLFLAAKNLSDAILLSDILRVNTEITKAPLSASMIKRYDEHHQDLTLLKALVRQQLPEKYKEIFFDQSKNGYAGYIDGGASQEEFYKFIKPILEKMDGTEELLVKLNREDLLRKQRTFDNGSIPHQIHLGELHAILRRQEDFYPFLKDNREKIEKILTFRIPYYVGPLARGNSRFAWMTRKSEETITPWNFEEVVDKGASAQSFIERMTNFDKNLPNEKVLPKHSLLYEYFTVYNELTKVKYVTEGMRKPAFLSGEQKKAIVDLLFKTNRKVTVKQLKEDYFKKIECFDSVEISGVEDRFNASLGTYHDLLKIIKDKDFLDNEENEDILEDIVLTLTLFEDREMIEERLKTYAHLFDDKVMKQLKRRRYTGWGRLSRKLINGIRDKQSGKTILDFLKSDGFANRNFMQLIHDDSLTFKEDIQKAQVSGQGDSLHEHIANLAGSPAIKKGILQTVKVVDELVKVMGRHKPENIVIEMARENQTTQKGQKNSRERMKRIEEGIKELGSQILKEHPVENTQLQNEKLYLYYLQNGRDMYVDQELDINRLSDYDVDHIVPQSFLKDDSIDNKVLTRSDKARGKSDNVPSEEVVKKMKNYWRQLLNAKLITQRKFDNLTKAERGGLSELDKAGFIKRQLVETRQITKHVAQILDSRMNTKYDENDKLIREVKVITLKSKLVSDFRKDFQFYKVREINNYHHAHDAYLNAVVGTALIKKYPKLESEFVYGDYKVYDVRKMIAKSEQEIGKATAKYFFYSNIMNFFKTEITLANGEIRKRPLIETNGETGEIVWDKGRDFATVRKVLSMPQVNIVKKTEVQTGGFSKESILPKRNSDKLIARKKDWDPKKYGGFDSPTVAYSVLVVAKVEKGKSKKLKSVKELLGITIMERSSFEKNPIDFLEAKGYKEVKKDLIIKLPKYSLFELENGRKRMLASAGELQKGNELALPSKYVNFLYLASHYEKLKGSPEDNEQKQLFVEQHKHYLDEIIEQISEFSKRVILADANLDKVLSAYNKHRDKPIREQAENIIHLFTLTNLGAPAAFKYFDTTIDRKRYTSTKEVLDATLIHQSITGLYETRIDLSQLGGDGGGGGEAAAKPAPGGTLGDQGSRGSDPLPEPRVTLTVEGIPTEFLVNTGAEHSVLTKPMGKMGSKRTVVAGATGSKVYPWTTKRLLKIGQKQVTHSFLVIPECPAPLLGRDLLTKLKAQIQFSTEGPQVTWEDRPAMCLVLNLEEEYRLHEKPVPPSIDPSWLQLFPMVWAEKAGMGLANQVPPVVVELKSDASPVAVRQYPMSKEAREGIRPHIQRFLDLGILVPCQSPWNTPLLPVKKPGTNDYRPVQDLREVNKRVQDIHPTVPNPYNLLSSLPPSHTWYSVLDLKDAFFCLKLHPNSQPLFAFEWRDPEKGNTGQLTWTRLPQGFKNSPTLFNEALHRDLASFRALNPQVVMLQYVDDLLVAAPTYRDCKEGTRRLLQELSKLGYRVSAKKAQLCREEVTYLGYLLKGGKRWLTPARKATVMKIPTPTTPRQVREFLGKAGFCRLFIPGFASLAAPLYPLTRPKVPFTWTEAHQEAFGRIKEALLSAPALALPDLTKPFALYVDEKEGVARGVLTQTLGPWRRPVAYLSKKLDPVASGWPTCLKAIAAVALLLKDADKLTLGQNVLVIAPHNLESIVRQPPDRWMTNARMTHYQSLLLNERVSFAPPAILNPATLLPVESDDTPIHICSEILAEETGTRPDLRDQPLPGVPAWYTDGSSFIMDGRRQAGAAIVDNKRTVWASNLPEGTSAQKAELIALTQALRLAEGKSINIYTDSRYAFATAHVHGAIYKQRGWLTSAGKDIKNKEEILALLEAIHLPKRVAIIHCPGHQRGTDPVATGNRKADEAAKQAAQSTRILTETTKNAGKRTADGSEFEKRTADGSEFESPKKKAKVE

SEQ ID NO: 1790 - protein, 2214 aa, synthetic construct
MPAAKRVKLDGGDKKYSIGLDIGTNSVGWAVITDEYKVPSKKFKVLGNTDRHSIKKNLIGALLFDSGETAEATRLKRTARRRYTRRKNRICYLQEIFSNEMAKVDDSFFHRLEESFLVEEDKKHERHPIFGNIVDEVAYHEKYPTIYHLRKKLVDSTDKADLRLIYLALAHMIKFRGHFLIEGDLNPDNSDVDKLFIQLVQTYNQLFEENPINASGVDAKAILSARLSKSRRLENLIAQLPGEKKNGLFGNLIALSLGLTPNFKSNFDLAEDAKLQLSKDTYDDDLDNLLAQIGDQYADLFLAAKNLSDAILLSDILRVNTEITKAPLSASMIKRYDEHHQDLTLLKALVRQQLPEKYKEIFFDQSKNGYAGYIDGGASQEEFYKFIKPILEKMDGTEELLVKLNREDLLRKQRTFDNGSIPHQIHLGELHAILRRQEDFYPFLKDNREKIEKILTFRIPYYVGPLARGNSRFAWMTRKSEETITPWNFEEVVDKGASAQSFIERMTNFDKNLPNEKVLPKHSLLYEYFTVYNELTKVKYVTEGMRKPAFLSGEQKKAIVDLLFKTNRKVTVKQLKEDYFKKIECFDSVEISGVEDRFNASLGTYHDLLKIIKDKDFLDNEENEDILEDIVLTLTLFEDREMIEERLKTYAHLFDDKVMKQLKRRRYTGWGRLSRKLINGIRDKQSGKTILDFLKSDGFANRNFMQLIHDDSLTFKEDIQKAQVSGQGDSLHEHIANLAGSPAIKKGILQTVKVVDELVKVMGRHKPENIVIEMARENQTTQKGQKNSRERMKRIEEGIKELGSQILKEHPVENTQLQNEKLYLYYLQNGRDMYVDQELDINRLSDYDVDHIVPQSFLKDDSIDNKVLTRSDKARGKSDNVPSEEVVKKMKNYWRQLLNAKLITQRKFDNLTKAERGGLSELDKAGFIKRQLVETRQITKHVAQILDSRMNTKYDENDKLIREVKVITLKSKLVSDFRKDFQFYKVREINNYHHAHDAYLNAVVGTALIKKYPKLESEFVYGDYKVYDVRKMIAKSEQEIGKATAKYFFYSNIMNFFKTEITLANGEIRKRPLIETNGETGEIVWDKGRDFATVRKVLSMPQVNIVKKTEVQTGGFSKESILPKRNSDKLIARKKDWDPKKYGGFDSPTVAYSVLVVAKVEKGKSKKLKSVKELLGITIMERSSFEKNPIDFLEAKGYKEVKKDLIIKLPKYSLFELENGRKRMLASAGELQKGNELALPSKYVNFLYLASHYEKLKGSPEDNEQKQLFVEQHKHYLDEIIEQISEFSKRVILADANLDKVLSAYNKHRDKPIREQAENIIHLFTLTNLGAPAAFKYFDTTIDRKRYTSTKEVLDATLIHQSITGLYETRIDLSQLGGDGGGGGGGGGGGTLGDQGSRGSDPLPEPRVTLTVEGIPTEFLVNTGAEHSVLTKPMGKMGSKRTVVAGATGSKVYPWTTKRLLKIGQKQVTHSFLVIPECPAPLLGRDLLTKLKAQIQFSTEGPQVTWEDRPAMCLVLNLEEEYRLHEKPVPPSIDPSWLQLFPMVWAEKAGMGLANQVPPVVVELKSDASPVAVRQYPMSKEAREGIRPHIQRFLDLGILVPCQSPWNTPLLPVKKPGTNDYRPVQDLREVNKRVQDIHPTVPNPYNLLSSLPPSHTWYSVLDLKDAFFCLKLHPNSQPLFAFEWRDPEKGNTGQLTWTRLPQGFKNSPTLFNEALHRDLASFRALNPQVVMLQYVDDLLVAAPTYRDCKEGTRRLLQELSKLGYRVSAKKAQLCREEVTYLGYLLKGGKRWLTPARKATVMKIPTPTTPRQVREFLGKAGFCRLFIPGFASLAAPLYPLTRPKVPFTWTEAHQEAFGRIKEALLSAPALALPDLTKPFALYVDEKEGVARGVLTQTLGPWRRPVAYLSKKLDPVASGWPTCLKAIAAVALLLKDADKLTLGQNVLVIAPHNLESIVRQPPDRWMTNARMTHYQSLLLNERVSFAPPAILNPATLLPVESDDTPIHICSEILAEETGTRPDLRDQPLPGVPAWYTDGSSFIMDGRRQAGAAIVDNKRTVWASNLPEGTSAQKAELIALTQALRLAEGKSINIYTDSRYAFATAHVHGAIYKQRGWLTSAGKDIKNKEEILALLEAIHLPKRVAIIHCPGHQRGTDPVATGNRKADEAAKQAAQSTRILTETTKNAGKRTADGSEFEKRTADGSEFESPKKKAKVE

SEQ ID NO: 1791 - protein, 2210 aa, synthetic construct
MPAAKRVKLDGGDKKYSIGLDIGTNSVGWAVITDEYKVPSKKFKVLGNTDRHSIKKNLIGALLFDSGETAEATRLKRTARRRYTRRKNRICYLQEIFSNEMAKVDDSFFHRLEESFLVEEDKKHERHPIFGNIVDEVAYHEKYPTIYHLRKKLVDSTDKADLRLIYLALAHMIKFRGHFLIEGDLNPDNSDVDKLFIQLVQTYNQLFEENPINASGVDAKAILSARLSKSRRLENLIAQLPGEKKNGLFGNLIALSLGLTPNFKSNFDLAEDAKLQLSKDTYDDDLDNLLAQIGDQYADLFLAAKNLSDAILLSDILRVNTEITKAPLSASMIKRYDEHHQDLTLLKALVRQQLPEKYKEIFFDQSKNGYAGYIDGGASQEEFYKFIKPILEKMDGTEELLVKLNREDLLRKQRTFDNGSIPHQIHLGELHAILRRQEDFYPFLKDNREKIEKILTFRIPYYVGPLARGNSRFAWMTRKSEETITPWNFEEVVDKGASAQSFIERMTNFDKNLPNEKVLPKHSLLYEYFTVYNELTKVKYVTEGMRKPAFLSGEQKKAIVDLLFKTNRKVTVKQLKEDYFKKIECFDSVEISGVEDRFNASLGTYHDLLKIIKDKDFLDNEENEDILEDIVLTLTLFEDREMIEERLKTYAHLFDDKVMKQLKRRRYTGWGRLSRKLINGIRDKQSGKTILDFLKSDGFANRNFMQLIHDDSLTFKEDIQKAQVSGQGDSLHEHIANLAGSPAIKKGILQTVKVVDELVKVMGRHKPENIVIEMARENQTTQKGQKNSRERMKRIEEGIKELGSQILKEHPVENTQLQNEKLYLYYLQNGRDMYVDQELDINRLSDYDVDHIVPQSFLKDDSIDNKVLTRSDKARGKSDNVPSEEVVKKMKNYWRQLLNAKLITQRKFDNLTKAERGGLSELDKAGFIKRQLVETRQITKHVAQILDSRMNTKYDENDKLIREVKVITLKSKLVSDFRKDFQFYKVREINNYHHAHDAYLNAVVGTALIKKYPKLESEFVYGDYKVYDVRKMIAKSEQEIGKATAKYFFYSNIMNFFKTEITLANGEIRKRPLIETNGETGEIVWDKGRDFATVRKVLSMPQVNIVKKTEVQTGGFSKESILPKRNSDKLIARKKDWDPKKYGGFDSPTVAYSVLVVAKVEKGKSKKLKSVKELLGITIMERSSFEKNPIDFLEAKGYKEVKKDLIIKLPKYSLFELENGRKRMLASAGELQKGNELALPSKYVNFLYLASHYEKLKGSPEDNEQKQLFVEQHKHYLDEIIEQISEFSKRVILADANLDKVLSAYNKHRDKPIREQAENIIHLFTLTNLGAPAAFKYFDTTIDRKRYTSTKEVLDATLIHQSITGLYETRIDLSQLGGDGGGGSGGTLGDQGSRGSDPLPEPRVTLTVEGIPTEFLVNTGAEHSVLTKPMGKMGSKRTVVAGATGSKVYPWTTKRLLKIGQKQVTHSFLVIPECPAPLLGRDLLTKLKAQIQFSTEGPQVTWEDRPAMCLVLNLEEEYRLHEKPVPPSIDPSWLQLFPMVWAEKAGMGLANQVPPVVVELKSDASPVAVRQYPMSKEAREGIRPHIQRFLDLGILVPCQSPWNTPLLPVKKPGTNDYRPVQDLREVNKRVQDIHPTVPNPYNLLSSLPPSHTWYSVLDLKDAFFCLKLHPNSQPLFAFEWRDPEKGNTGQLTWTRLPQGFKNSPTLFNEALHRDLASFRALNPQVVMLQYVDDLLVAAPTYRDCKEGTRRLLQELSKLGYRVSAKKAQLCREEVTYLGYLLKGGKRWLTPARKATVMKIPTPTTPRQVREFLGKAGFCRLFIPGFASLAAPLYPLTRPKVPFTWTEAHQEAFGRIKEALLSAPALALPDLTKPFALYVDEKEGVARGVLTQTLGPWRRPVAYLSKKLDPVASGWPTCLKAIAAVALLLKDADKLTLGQNVLVIAPHNLESIVRQPPDRWMTNARMTHYQSLLLNERVSFAPPAILNPATLLPVESDDTPIHICSEILAEETGTRPDLRDQPLPGVPAWYTDGSSFIMDGRRQAGAAIVDNKRTVWASNLPEGTSAQKAELIALTQALRLAEGKSINIYTDSRYAFATAHVHGAIYKQRGWLTSAGKDIKNKEEILALLEAIHLPKRVAIIHCPGHQRGTDPVATGNRKADEAAKQAAQSTRILTETTKNAGKRTADGSEFEKRTADGSEFESPKKKAKVE

SEQ ID NO: 1792 - protein, 2216 aa, synthetic construct
MPAAKRVKLDGGDKKYSIGLDIGTNSVGWAVITDEYKVPSKKFKVLGNTDRHSIKKNLIGALLFDSGETAEATRLKRTARRRYTRRKNRICYLQEIFSNEMAKVDDSFFHRLEESFLVEEDKKHERHPIFGNIVDEVAYHEKYPTIYHLRKKLVDSTDKADLRLIYLALAHMIKFRGHFLIEGDLNPDNSDVDKLFIQLVQTYNQLFEENPINASGVDAKAILSARLSKSRRLENLIAQLPGEKKNGLFGNLIALSLGLTPNFKSNFDLAEDAKLQLSKDTYDDDLDNLLAQIGDQYADLFLAAKNLSDAILLSDILRVNTEITKAPLSASMIKRYDEHHQDLTLLKALVRQQLPEKYKEIFFDQSKNGYAGYIDGGASQEEFYKFIKPILEKMDGTEELLVKLNREDLLRKQRTFDNGSIPHQIHLGELHAILRRQEDFYPFLKDNREKIEKILTFRIPYYVGPLARGNSRFAWMTRKSEETITPWNFEEVVDKGASAQSFIERMTNFDKNLPNEKVLPKHSLLYEYFTVYNELTKVKYVTEGMRKPAFLSGEQKKAIVDLLFKTNRKVTVKQLKEDYFKKIECFDSVEISGVEDRFNASLGTYHDLLKIIKDKDFLDNEENEDILEDIVLTLTLFEDREMIEERLKTYAHLFDDKVMKQLKRRRYTGWGRLSRKLINGIRDKQSGKTILDFLKSDGFANRNFMQLIHDDSLTFKEDIQKAQVSGQGDSLHEHIANLAGSPAIKKGILQTVKVVDELVKVMGRHKPENIVIEMARENQTTQKGQKNSRERMKRIEEGIKELGSQILKEHPVENTQLQNEKLYLYYLQNGRDMYVDQELDINRLSDYDVDHIVPQSFLKDDSIDNKVLTRSDKARGKSDNVPSEEVVKKMKNYWRQLLNAKLITQRKFDNLTKAERGGLSELDKAGFIKRQLVETRQITKHVAQILDSRMNTKYDENDKLIREVKVITLKSKLVSDFRKDFQFYKVREINNYHHAHDAYLNAVVGTALIKKYPKLESEFVYGDYKVYDVRKMIAKSEQEIGKATAKYFFYSNIMNFFKTEITLANGEIRKRPLIETNGETGEIVWDKGRDFATVRKVLSMPQVNIVKKTEVQTGGFSKESILPKRNSDKLIARKKDWDPKKYGGFDSPTVAYSVLVVAKVEKGKSKKLKSVKELLGITIMERSSFEKNPIDFLEAKGYKEVKKDLIIKLPKYSLFELENGRKRMLASAGELQKGNELALPSKYVNFLYLASHYEKLKGSPEDNEQKQLFVEQHKHYLDEIIEQISEFSKRVILADANLDKVLSAYNKHRDKPIREQAENIIHLFTLTNLGAPAAFKYFDTTIDRKRYTSTKEVLDATLIHQSITGLYETRIDLSQLGGDGGPAPGGSGGGGGTLGDQGSRGSDPLPEPRVTLTVEGIPTEFLVNTGAEHSVLTKPMGKMGSKRTVVAGATGSKVYPWTTKRLLKIGQKQVTHSFLVIPECPAPLLGRDLLTKLKAQIQFSTEGPQVTWEDRPAMCLVLNLEEEYRLHEKPVPPSIDPSWLQLFPMVWAEKAGMGLANQVPPVVVELKSDASPVAVRQYPMSKEAREGIRPHIQRFLDLGILVPCQSPWNTPLLPVKKPGTNDYRPVQDLREVNKRVQDIHPTVPNPYNLLSSLPPSHTWYSVLDLKDAFFCLKLHPNSQPLFAFEWRDPEKGNTGQLTWTRLPQGFKNSPTLFNEALHRDLASFRALNPQVVMLQYVDDLLVAAPTYRDCKEGTRRLLQELSKLGYRVSAKKAQLCREEVTYLGYLLKGGKRWLTPARKATVMKIPTPTTPRQVREFLGKAGFCRLFIPGFASLAAPLYPLTRPKVPFTWTEAHQEAFGRIKEALLSAPALALPDLTKPFALYVDEKEGVARGVLTQTLGPWRRPVAYLSKKLDPVASGWPTCLKAIAAVALLLKDADKLTLGQNVLVIAPHNLESIVRQPPDRWMTNARMTHYQSLLLNERVSFAPPAILNPATLLPVESDDTPIHICSEILAEETGTRPDLRDQPLPGVPAWYTDGSSFIMDGRRQAGAAIVDNKRTVWASNLPEGTSAQKAELIALTQALRLAEGKSINIYTDSRYAFATAHVHGAIYKQRGWLTSAGKDIKNKEEILALLEAIHLPKRVAIIHCPGHQRGTDPVATGNRKADEAAKQAAQSTRILTETTKNAGKRTADGSEFEKRTADGSEFESPKKKAKVE

SEQ ID NO: 1793 - protein, 2220 aa, synthetic construct
MPAAKRVKLDGGDKKYSIGLDIGTNSVGWAVITDEYKVPSKKFKVLGNTDRHSIKKNLIGALLFDSGETAEATRLKRTARRRYTRRKNRICYLQEIFSNEMAKVDDSFFHRLEESFLVEEDKKHERHPIFGNIVDEVAYHEKYPTIYHLRKKLVDSTDKADLRLIYLALAHMIKFRGHFLIEGDLNPDNSDVDKLFIQLVQTYNQLFEENPINASGVDAKAILSARLSKSRRLENLIAQLPGEKKNGLFGNLIALSLGLTPNFKSNFDLAEDAKLQLSKDTYDDDLDNLLAQIGDQYADLFLAAKNLSDAILLSDILRVNTEITKAPLSASMIKRYDEHHQDLTLLKALVRQQLPEKYKEIFFDQSKNGYAGYIDGGASQEEFYKFIKPILEKMDGTEELLVKLNREDLLRKQRTFDNGSIPHQIHLGELHAILRRQEDFYPFLKDNREKIEKILTFRIPYYVGPLARGNSRFAWMTRKSEETITPWNFEEVVDKGASAQSFIERMTNFDKNLPNEKVLPKHSLLYEYFTVYNELTKVKYVTEGMRKPAFLSGEQKKAIVDLLFKTNRKVTVKQLKEDYFKKIECFDSVEISGVEDRFNASLGTYHDLLKIIKDKDFLDNEENEDILEDIVLTLTLFEDREMIEERLKTYAHLFDDKVMKQLKRRRYTGWGRLSRKLINGIRDKQSGKTILDFLKSDGFANRNFMQLIHDDSLTFKEDIQKAQVSGQGDSLHEHIANLAGSPAIKKGILQTVKVVDELVKVMGRHKPENIVIEMARENQTTQKGQKNSRERMKRIEEGIKELGSQILKEHPVENTQLQNEKLYLYYLQNGRDMYVDQELDINRLSDYDVDHIVPQSFLKDDSIDNKVLTRSDKARGKSDNVPSEEVVKKMKNYWRQLLNAKLITQRKFDNLTKAERGGLSELDKAGFIKRQLVETRQITKHVAQILDSRMNTKYDENDKLIREVKVITLKSKLVSDFRKDFQFYKVREINNYHHAHDAYLNAVVGTALIKKYPKLESEFVYGDYKVYDVRKMIAKSEQEIGKATAKYFFYSNIMNFFKTEITLANGEIRKRPLIETNGETGEIVWDKGRDFATVRKVLSMPQVNIVKKTEVQTGGFSKESILPKRNSDKLIARKKDWDPKKYGGFDSPTVAYSVLVVAKVEKGKSKKLKSVKELLGITIMERSSFEKNPIDFLEAKGYKEVKKDLIIKLPKYSLFELENGRKRMLASAGELQKGNELALPSKYVNFLYLASHYEKLKGSPEDNEQKQLFVEQHKHYLDEIIEQISEFSKRVILADANLDKVLSAYNKHRDKPIREQAENIIHLFTLTNLGAPAAFKYFDTTIDRKRYTSTKEVLDATLIHQSITGLYETRIDLSQLGGDGGPAPAPAPAPAPAPGGTLGDQGSRGSDPLPEPRVTLTVEGIPTEFLVNTGAEHSVLTKPMGKMGSKRTVVAGATGSKVYPWTTKRLLKIGQKQVTHSFLVIPECPAPLLGRDLLTKLKAQIQFSTEGPQVTWEDRPAMCLVLNLEEEYRLHEKPVPPSIDPSWLQLFPMVWAEKAGMGLANQVPPVVVELKSDASPVAVRQYPMSKEAREGIRPHIQRFLDLGILVPCQSPWNTPLLPVKKPGTNDYRPVQDLREVNKRVQDIHPTVPNPYNLLSSLPPSHTWYSVLDLKDAFFCLKLHPNSQPLFAFEWRDPEKGNTGQLTWTRLPQGFKNSPTLFNEALHRDLASFRALNPQVVMLQYVDDLLVAAPTYRDCKEGTRRLLQELSKLGYRVSAKKAQLCREEVTYLGYLLKGGKRWLTPARKATVMKIPTPTTPRQVREFLGKAGFCRLFIPGFASLAAPLYPLTRPKVPFTWTEAHQEAFGRIKEALLSAPALALPDLTKPFALYVDEKEGVARGVLTQTLGPWRRPVAYLSKKLDPVASGWPTCLKAIAAVALLLKDADKLTLGQNVLVIAPHNLESIVRQPPDRWMTNARMTHYQSLLLNERVSFAPPAILNPATLLPVESDDTPIHICSEILAEETGTRPDLRDQPLPGVPAWYTDGSSFIMDGRRQAGAAIVDNKRTVWASNLPEGTSAQKAELIALTQALRLAEGKSINIYTDSRYAFATAHVHGAIYKQRGWLTSAGKDIKNKEEILALLEAIHLPKRVAIIHCPGHQRGTDPVATGNRKADEAAKQAAQSTRILTETTKNAGKRTADGSEFEKRTADGSEFESPKKKAKVE

SEQ ID NO: 1794 - protein, 2213 aa, synthetic construct
MPAAKRVKLDGGDKKYSIGLDIGTNSVGWAVITDEYKVPSKKFKVLGNTDRHSIKKNLIGALLFDSGETAEATRLKRTARRRYTRRKNRICYLQEIFSNEMAKVDDSFFHRLEESFLVEEDKKHERHPIFGNIVDEVAYHEKYPTIYHLRKKLVDSTDKADLRLIYLALAHMIKFRGHFLIEGDLNPDNSDVDKLFIQLVQTYNQLFEENPINASGVDAKAILSARLSKSRRLENLIAQLPGEKKNGLFGNLIALSLGLTPNFKSNFDLAEDAKLQLSKDTYDDDLDNLLAQIGDQYADLFLAAKNLSDAILLSDILRVNTEITKAPLSASMIKRYDEHHQDLTLLKALVRQQLPEKYKEIFFDQSKNGYAGYIDGGASQEEFYKFIKPILEKMDGTEELLVKLNREDLLRKQRTFDNGSIPHQIHLGELHAILRRQEDFYPFLKDNREKIEKILTFRIPYYVGPLARGNSRFAWMTRKSEETITPWNFEEVVDKGASAQSFIERMTNFDKNLPNEKVLPKHSLLYEYFTVYNELTKVKYVTEGMRKPAFLSGEQKKAIVDLLFKTNRKVTVKQLKEDYFKKIECFDSVEISGVEDRFNASLGTYHDLLKIIKDKDFLDNEENEDILEDIVLTLTLFEDREMIEERLKTYAHLFDDKVMKQLKRRRYTGWGRLSRKLINGIRDKQSGKTILDFLKSDGFANRNFMQLIHDDSLTFKEDIQKAQVSGQGDSLHEHIANLAGSPAIKKGILQTVKVVDELVKVMGRHKPENIVIEMARENQTTQKGQKNSRERMKRIEEGIKELGSQILKEHPVENTQLQNEKLYLYYLQNGRDMYVDQELDINRLSDYDVDHIVPQSFLKDDSIDNKVLTRSDKARGKSDNVPSEEVVKKMKNYWRQLLNAKLITQRKFDNLTKAERGGLSELDKAGFIKRQLVETRQITKHVAQILDSRMNTKYDENDKLIREVKVITLKSKLVSDFRKDFQFYKVREINNYHHAHDAYLNAVVGTALIKKYPKLESEFVYGDYKVYDVRKMIAKSEQEIGKATAKYFFYSNIMNFFKTEITLANGEIRKRPLIETNGETGEIVWDKGRDFATVRKVLSMPQVNIVKKTEVQTGGFSKESILPKRNSDKLIARKKDWDPKKYGGFDSPTVAYSVLVVAKVEKGKSKKLKSVKELLGITIMERSSFEKNPIDFLEAKGYKEVKKDLIIKLPKYSLFELENGRKRMLASAGELQKGNELALPSKYVNFLYLASHYEKLKGSPEDNEQKQLFVEQHKHYLDEIIEQISEFSKRVILADANLDKVLSAYNKHRDKPIREQAENIIHLFTLTNLGAPAAFKYFDTTIDRKRYTSTKEVLDATLIHQSITGLYETRIDLSQLGGDGGPAPGGGGGTLGDQGSRGSDPLPEPRVTLTVEGIPTEFLVNTGAEHSVLTKPMGKMGSKRTVVAGATGSKVYPWTTKRLLKIGQKQVTHSFLVIPECPAPLLGRDLLTKLKAQIQFSTEGPQVTWEDRPAMCLVLNLEEEYRLHEKPVPPSIDPSWLQLFPMVWAEKAGMGLANQVPPVVVELKSDASPVAVRQYPMSKEAREGIRPHIQRFLDLGILVPCQSPWNTPLLPVKKPGTNDYRPVQDLREVNKRVQDIHPTVPNPYNLLSSLPPSHTWYSVLDLKDAFFCLKLHPNSQPLFAFEWRDPEKGNTGQLTWTRLPQGFKNSPTLFNEALHRDLASFRALNPQVVMLQYVDDLLVAAPTYRDCKEGTRRLLQELSKLGYRVSAKKAQLCREEVTYLGYLLKGGKRWLTPARKATVMKIPTPTTPRQVREFLGKAGFCRLFIPGFASLAAPLYPLTRPKVPFTWTEAHQEAFGRIKEALLSAPALALPDLTKPFALYVDEKEGVARGVLTQTLGPWRRPVAYLSKKLDPVASGWPTCLKAIAAVALLLKDADKLTLGQNVLVIAPHNLESIVRQPPDRWMTNARMTHYQSLLLNERVSFAPPAILNPATLLPVESDDTPIHICSEILAEETGTRPDLRDQPLPGVPAWYTDGSSFIMDGRRQAGAAIVDNKRTVWASNLPEGTSAQKAELIALTQALRLAEGKSINIYTDSRYAFATAHVHGAIYKQRGWLTSAGKDIKNKEEILALLEAIHLPKRVAIIHCPGHQRGTDPVATGNRKADEAAKQAAQSTRILTETTKNAGKRTADGSEFEKRTADGSEFESPKKKAKVE

SEQ ID NO: 1795 - protein, 2218 aa, synthetic construct
MPAAKRVKLDGGDKKYSIGLDIGTNSVGWAVITDEYKVPSKKFKVLGNTDRHSIKKNLIGALLFDSGETAEATRLKRTARRRYTRRKNRICYLQEIFSNEMAKVDDSFFHRLEESFLVEEDKKHERHPIFGNIVDEVAYHEKYPTIYHLRKKLVDSTDKADLRLIYLALAHMIKFRGHFLIEGDLNPDNSDVDKLFIQLVQTYNQLFEENPINASGVDAKAILSARLSKSRRLENLIAQLPGEKKNGLFGNLIALSLGLTPNFKSNFDLAEDAKLQLSKDTYDDDLDNLLAQIGDQYADLFLAAKNLSDAILLSDILRVNTEITKAPLSASMIKRYDEHHQDLTLLKALVRQQLPEKYKEIFFDQSKNGYAGYIDGGASQEEFYKFIKPILEKMDGTEELLVKLNREDLLRKQRTFDNGSIPHQIHLGELHAILRRQEDFYPFLKDNREKIEKILTFRIPYYVGPLARGNSRFAWMTRKSEETITPWNFEEVVDKGASAQSFIERMTNFDKNLPNEKVLPKHSLLYEYFTVYNELTKVKYVTEGMRKPAFLSGEQKKAIVDLLFKTNRKVTVKQLKEDYFKKIECFDSVEISGVEDRFNASLGTYHDLLKIIKDKDFLDNEENEDILEDIVLTLTLFEDREMIEERLKTYAHLFDDKVMKQLKRRRYTGWGRLSRKLINGIRDKQSGKTILDFLKSDGFANRNFMQLIHDDSLTFKEDIQKAQVSGQGDSLHEHIANLAGSPAIKKGILQTVKVVDELVKVMGRHKPENIVIEMARENQTTQKGQKNSRERMKRIEEGIKELGSQILKEHPVENTQLQNEKLYLYYLQNGRDMYVDQELDINRLSDYDVDHIVPQSFLKDDSIDNKVLTRSDKARGKSDNVPSEEVVKKMKNYWRQLLNAKLITQRKFDNLTKAERGGLSELDKAGFIKRQLVETRQITKHVAQILDSRMNTKYDENDKLIREVKVITLKSKLVSDFRKDFQFYKVREINNYHHAHDAYLNAVVGTALIKKYPKLESEFVYGDYKVYDVRKMIAKSEQEIGKATAKYFFYSNIMNFFKTEITLANGEIRKRPLIETNGETGEIVWDKGRDFATVRKVLSMPQVNIVKKTEVQTGGFSKESILPKRNSDKLIARKKDWDPKKYGGFDSPTVAYSVLVVAKVEKGKSKKLKSVKELLGITIMERSSFEKNPIDFLEAKGYKEVKKDLIIKLPKYSLFELENGRKRMLASAGELQKGNELALPSKYVNFLYLASHYEKLKGSPEDNEQKQLFVEQHKHYLDEIIEQISEFSKRVILADANLDKVLSAYNKHRDKPIREQAENIIHLFTLTNLGAPAAFKYFDTTIDRKRYTSTKEVLDATLIHQSITGLYETRIDLSQLGGDGGGSSPAPEAAAKGGTLGDQGSRGSDPLPEPRVTLTVEGIPTEFLVNTGAEHSVLTKPMGKMGSKRTVVAGATGSKVYPWTTKRLLKIGQKQVTHSFLVIPECPAPLLGRDLLTKLKAQIQFSTEGPQVTWEDRPAMCLVLNLEEEYRLHEKPVPPSIDPSWLQLFPMVWAEKAGMGLANQVPPVVVELKSDASPVAVRQYPMSKEAREGIRPHIQRFLDLGILVPCQSPWNTPLLPVKKPGTNDYRPVQDLREVNKRVQDIHPTVPNPYNLLSSLPPSHTWYSVLDLKDAFFCLKLHPNSQPLFAFEWRDPEKGNTGQLTWTRLPQGFKNSPTLFNEALHRDLASFRALNPQVVMLQYVDDLLVAAPTYRDCKEGTRRLLQELSKLGYRVSAKKAQLCREEVTYLGYLLKGGKRWLTPARKATVMKIPTPTTPRQVREFLGKAGFCRLFIPGFASLAAPLYPLTRPKVPFTWTEAHQEAFGRIKEALLSAPALALPDLTKPFALYVDEKEGVARGVLTQTLGPWRRPVAYLSKKLDPVASGWPTCLKAIAAVALLLKDADKLTLGQNVLVIAPHNLESIVRQPPDRWMTNARMTHYQSLLLNERVSFAPPAILNPATLLPVESDDTPIHICSEILAEETGTRPDLRDQPLPGVPAWYTDGSSFIMDGRRQAGAAIVDNKRTVWASNLPEGTSAQKAELIALTQALRLAEGKSINIYTDSRYAFATAHVHGAIYKQRGWLTSAGKDIKNKEEILALLEAIHLPKRVAIIHCPGHQRGTDPVATGNRKADEAAKQAAQSTRILTETTKNAGKRTADGSEFEKRTADGSEFESPKKKAKVE

SEQ ID NO: 1796 - protein, 2218 aa, synthetic construct
MPAAKRVKLDGGDKKYSIGLDIGTNSVGWAVITDEYKVPSKKFKVLGNTDRHSIKKNLIGALLFDSGETAEATRLKRTARRRYTRRKNRICYLQEIFSNEMAKVDDSFFHRLEESFLVEEDKKHERHPIFGNIVDEVAYHEKYPTIYHLRKKLVDSTDKADLRLIYLALAHMIKFRGHFLIEGDLNPDNSDVDKLFIQLVQTYNQLFEENPINASGVDAKAILSARLSKSRRLENLIAQLPGEKKNGLFGNLIALSLGLTPNFKSNFDLAEDAKLQLSKDTYDDDLDNLLAQIGDQYADLFLAAKNLSDAILLSDILRVNTEITKAPLSASMIKRYDEHHQDLTLLKALVRQQLPEKYKEIFFDQSKNGYAGYIDGGASQEEFYKFIKPILEKMDGTEELLVKLNREDLLRKQRTFDNGSIPHQIHLGELHAILRRQEDFYPFLKDNREKIEKILTFRIPYYVGPLARGNSRFAWMTRKSEETITPWNFEEVVDKGASAQSFIERMTNFDKNLPNEKVLPKHSLLYEYFTVYNELTKVKYVTEGMRKPAFLSGEQKKAIVDLLFKTNRKVTVKQLKEDYFKKIECFDSVEISGVEDRFNASLGTYHDLLKIIKDKDFLDNEENEDILEDIVLTLTLFEDREMIEERLKTYAHLFDDKVMKQLKRRRYTGWGRLSRKLINGIRDKQSGKTILDFLKSDGFANRNFMQLIHDDSLTFKEDIQKAQVSGQGDSLHEHIANLAGSPAIKKGILQTVKVVDELVKVMGRHKPENIVIEMARENQTTQKGQKNSRERMKRIEEGIKELGSQILKEHPVENTQLQNEKLYLYYLQNGRDMYVDQELDINRLSDYDVDHIVPQSFLKDDSIDNKVLTRSDKARGKSDNVPSEEVVKKMKNYWRQLLNAKLITQRKFDNLTKAERGGLSELDKAGFIKRQLVETRQITKHVAQILDSRMNTKYDENDKLIREVKVITLKSKLVSDFRKDFQFYKVREINNYHHAHDAYLNAVVGTALIKKYPKLESEFVYGDYKVYDVRKMIAKSEQEIGKATAKYFFYSNIMNFFKTEITLANGEIRKRPLIETNGETGEIVWDKGRDFATVRKVLSMPQVNIVKKTEVQTGGFSKESILPKRNSDKLIARKKDWDPKKYGGFDSPTVAYSVLVVAKVEKGKSKKLKSVKELLGITIMERSSFEKNPIDFLEAKGYKEVKKDLIIKLPKYSLFELENGRKRMLASAGELQKGNELALPSKYVNFLYLASHYEKLKGSPEDNEQKQLFVEQHKHYLDEIIEQISEFSKRVILADANLDKVLSAYNKHRDKPIREQAENIIHLFTLTNLGAPAAFKYFDTTIDRKRYTSTKEVLDATLIHQSITGLYETRIDLSQLGGDGGGGGEAAAKGSSGGTLGDQGSRGSDPLPEPRVTLTVEGIPTEFLVNTGAEHSVLTKPMGKMGSKRTVVAGATGSKVYPWTTKRLLKIGQKQVTHSFLVIPECPAPLLGRDLLTKLKAQIQFSTEGPQVTWEDRPAMCLVLNLEEEYRLHEKPVPPSIDPSWLQLFPMVWAEKAGMGLANQVPPVVVELKSDASPVAVRQYPMSKEAREGIRPHIQRFLDLGILVPCQSPWNTPLLPVKKPGTNDYRPVQDLREVNKRVQDIHPTVPNPYNLLSSLPPSHTWYSVLDLKDAFFCLKLHPNSQPLFAFEWRDPEKGNTGQLTWTRLPQGFKNSPTLFNEALHRDLASFRALNPQVVMLQYVDDLLVAAPTYRDCKEGTRRLLQELSKLGYRVSAKKAQLCREEVTYLGYLLKGGKRWLTPARKATVMKIPTPTTPRQVREFLGKAGFCRLFIPGFASLAAPLYPLTRPKVPFTWTEAHQEAFGRIKEALLSAPALALPDLTKPFALYVDEKEGVARGVLTQTLGPWRRPVAYLSKKLDPVASGWPTCLKAIAAVALLLKDADKLTLGQNVLVIAPHNLESIVRQPPDRWMTNARMTHYQSLLLNERVSFAPPAILNPATLLPVESDDTPIHICSEILAEETGTRPDLRDQPLPGVPAWYTDGSSFIMDGRRQAGAAIVDNKRTVWASNLPEGTSAQKAELIALTQALRLAEGKSINIYTDSRYAFATAHVHGAIYKQRGWLTSAGKDIKNKEEILALLEAIHLPKRVAIIHCPGHQRGTDPVATGNRKADEAAKQAAQSTRILTETTKNAGKRTADGSEFEKRTADGSEFESPKKKAKVE

SEQ ID NO: 1797 - protein, 2215 aa, synthetic construct
MPAAKRVKLDGGDKKYSIGLDIGTNSVGWAVITDEYKVPSKKFKVLGNTDRHSIKKNLIGALLFDSGETAEATRLKRTARRRYTRRKNRICYLQEIFSNEMAKVDDSFFHRLEESFLVEEDKKHERHPIFGNIVDEVAYHEKYPTIYHLRKKLVDSTDKADLRLIYLALAHMIKFRGHFLIEGDLNPDNSDVDKLFIQLVQTYNQLFEENPINASGVDAKAILSARLSKSRRLENLIAQLPGEKKNGLFGNLIALSLGLTPNFKSNFDLAEDAKLQLSKDTYDDDLDNLLAQIGDQYADLFLAAKNLSDAILLSDILRVNTEITKAPLSASMIKRYDEHHQDLTLLKALVRQQLPEKYKEIFFDQSKNGYAGYIDGGASQEEFYKFIKPILEKMDGTEELLVKLNREDLLRKQRTFDNGSIPHQIHLGELHAILRRQEDFYPFLKDNREKIEKILTFRIPYYVGPLARGNSRFAWMTRKSEETITPWNFEEVVDKGASAQSFIERMTNFDKNLPNEKVLPKHSLLYEYFTVYNELTKVKYVTEGMRKPAFLSGEQKKAIVDLLFKTNRKVTVKQLKEDYFKKIECFDSVEISGVEDRFNASLGTYHDLLKIIKDKDFLDNEENEDILEDIVLTLTLFEDREMIEERLKTYAHLFDDKVMKQLKRRRYTGWGRLSRKLINGIRDKQSGKTILDFLKSDGFANRNFMQLIHDDSLTFKEDIQKAQVSGQGDSLHEHIANLAGSPAIKKGILQTVKVVDELVKVMGRHKPENIVIEMARENQTTQKGQKNSRERMKRIEEGIKELGSQILKEHPVENTQLQNEKLYLYYLQNGRDMYVDQELDINRLSDYDVDHIVPQSFLKDDSIDNKVLTRSDKARGKSDNVPSEEVVKKMKNYWRQLLNAKLITQRKFDNLTKAERGGLSELDKAGFIKRQLVETRQITKHVAQILDSRMNTKYDENDKLIREVKVITLKSKLVSDFRKDFQFYKVREINNYHHAHDAYLNAVVGTALIKKYPKLESEFVYGDYKVYDVRKMIAKSEQEIGKATAKYFFYSNIMNFFKTEITLANGEIRKRPLIETNGETGEIVWDKGRDFATVRKVLSMPQVNIVKKTEVQTGGFSKESILPKRNSDKLIARKKDWDPKKYGGFDSPTVAYSVLVVAKVEKGKSKKLKSVKELLGITIMERSSFEKNPIDFLEAKGYKEVKKDLIIKLPKYSLFELENGRKRMLASAGELQKGNELALPSKYVNFLYLASHYEKLKGSPEDNEQKQLFVEQHKHYLDEIIEQISEFSKRVILADANLDKVLSAYNKHRDKPIREQAENIIHLFTLTNLGAPAAFKYFDTTIDRKRYTSTKEVLDATLIHQSITGLYETRIDLSQLGGDGGGSSEAAAKGGTLGDQGSRGSDPLPEPRVTLTVEGIPTEFLVNTGAEHSVLTKPMGKMGSKRTVVAGATGSKVYPWTTKRLLKIGQKQVTHSFLVIPECPAPLLGRDLLTKLKAQIQFSTEGPQVTWEDRPAMCLVLNLEEEYRLHEKPVPPSIDPSWLQLFPMVWAEKAGMGLANQVPPVVVELKSDASPVAVRQYPMSKEAREGIRPHIQRFLDLGILVPCQSPWNTPLLPVKKPGTNDYRPVQDLREVNKRVQDIHPTVPNPYNLLSSLPPSHTWYSVLDLKDAFFCLKLHPNSQPLFAFEWRDPEKGNTGQLTWTRLPQGFKNSPTLFNEALHRDLASFRALNPQVVMLQYVDDLLVAAPTYRDCKEGTRRLLQELSKLGYRVSAKKAQLCREEVTYLGYLLKGGKRWLTPARKATVMKIPTPTTPRQVREFLGKAGFCRLFIPGFASLAAPLYPLTRPKVPFTWTEAHQEAFGRIKEALLSAPALALPDLTKPFALYVDEKEGVARGVLTQTLGPWRRPVAYLSKKLDPVASGWPTCLKAIAAVALLLKDADKLTLGQNVLVIAPHNLESIVRQPPDRWMTNARMTHYQSLLLNERVSFAPPAILNPATLLPVESDDTPIHICSEILAEETGTRPDLRDQPLPGVPAWYTDGSSFIMDGRRQAGAAIVDNKRTVWASNLPEGTSAQKAELIALTQALRLAEGKSINIYTDSRYAFATAHVHGAIYKQRGWLTSAGKDIKNKEEILALLEAIHLPKRVAIIHCPGHQRGTDPVATGNRKADEAAKQAAQSTRILTETTKNAGKRTADGSEFEKRTADGSEFESPKKKAKVE

SEQ ID NO: 1798 - protein, 2211 aa, synthetic construct
MPAAKRVKLDGGDKKYSIGLDIGTNSVGWAVITDEYKVPSKKFKVLGNTDRHSIKKNLIGALLFDSGETAEATRLKRTARRRYTRRKNRICYLQEIFSNEMAKVDDSFFHRLEESFLVEEDKKHERHPIFGNIVDEVAYHEKYPTIYHLRKKLVDSTDKADLRLIYLALAHMIKFRGHFLIEGDLNPDNSDVDKLFIQLVQTYNQLFEENPINASGVDAKAILSARLSKSRRLENLIAQLPGEKKNGLFGNLIALSLGLTPNFKSNFDLAEDAKLQLSKDTYDDDLDNLLAQIGDQYADLFLAAKNLSDAILLSDILRVNTEITKAPLSASMIKRYDEHHQDLTLLKALVRQQLPEKYKEIFFDQSKNGYAGYIDGGASQEEFYKFIKPILEKMDGTEELLVKLNREDLLRKQRTFDNGSIPHQIHLGELHAILRRQEDFYPFLKDNREKIEKILTFRIPYYVGPLARGNSRFAWMTRKSEETITPWNFEEVVDKGASAQSFIERMTNFDKNLPNEKVLPKHSLLYEYFTVYNELTKVKYVTEGMRKPAFLSGEQKKAIVDLLFKTNRKVTVKQLKEDYFKKIECFDSVEISGVEDRFNASLGTYHDLLKIIKDKDFLDNEENEDILEDIVLTLTLFEDREMIEERLKTYAHLFDDKVMKQLKRRRYTGWGRLSRKLINGIRDKQSGKTILDFLKSDGFANRNFMQLIHDDSLTFKEDIQKAQVSGQGDSLHEHIANLAGSPAIKKGILQTVKVVDELVKVMGRHKPENIVIEMARENQTTQKGQKNSRERMKRIEEGIKELGSQILKEHPVENTQLQNEKLYLYYLQNGRDMYVDQELDINRLSDYDVDHIVPQSFLKDDSIDNKVLTRSDKARGKSDNVPSEEVVKKMKNYWRQLLNAKLITQRKFDNLTKAERGGLSELDKAGFIKRQLVETRQITKHVAQILDSRMNTKYDENDKLIREVKVITLKSKLVSDFRKDFQFYKVREINNYHHAHDAYLNAVVGTALIKKYPKLESEFVYGDYKVYDVRKMIAKSEQEIGKATAKYFFYSNIMNFFKTEITLANGEIRKRPLIETNGETGEIVWDKGRDFATVRKVLSMPQVNIVKKTEVQTGGFSKESILPKRNSDKLIARKKDWDPKKYGGFDSPTVAYSVLVVAKVEKGKSKKLKSVKELLGITIMERSSFEKNPIDFLEAKGYKEVKKDLIIKLPKYSLFELENGRKRMLASAGELQKGNELALPSKYVNFLYLASHYEKLKGSPEDNEQKQLFVEQHKHYLDEIIEQISEFSKRVILADANLDKVLSAYNKHRDKPIREQAENIIHLFTLTNLGAPAAFKYFDTTIDRKRYTSTKEVLDATLIHQSITGLYETRIDLSQLGGDGGGGGGGGTLGDQGSRGSDPLPEPRVTLTVEGIPTEFLVNTGAEHSVLTKPMGKMGSKRTVVAGATGSKVYPWTTKRLLKIGQKQVTHSFLVIPECPAPLLGRDLLTKLKAQIQFSTEGPQVTWEDRPAMCLVLNLEEEYRLHEKPVPPSIDPSWLQLFPMVWAEKAGMGLANQVPPVVVELKSDASPVAVRQYPMSKEAREGIRPHIQRFLDLGILVPCQSPWNTPLLPVKKPGTNDYRPVQDLREVNKRVQDIHPTVPNPYNLLSSLPPSHTWYSVLDLKDAFFCLKLHPNSQPLFAFEWRDPEKGNTGQLTWTRLPQGFKNSPTLFNEALHRDLASFRALNPQVVMLQYVDDLLVAAPTYRDCKEGTRRLLQELSKLGYRVSAKKAQLCREEVTYLGYLLKGGKRWLTPARKATVMKIPTPTTPRQVREFLGKAGFCRLFIPGFASLAAPLYPLTRPKVPFTWTEAHQEAFGRIKEALLSAPALALPDLTKPFALYVDEKEGVARGVLTQTLGPWRRPVAYLSKKLDPVASGWPTCLKAIAAVALLLKDADKLTLGQNVLVIAPHNLESIVRQPPDRWMTNARMTHYQSLLLNERVSFAPPAILNPATLLPVESDDTPIHICSEILAEETGTRPDLRDQPLPGVPAWYTDGSSFIMDGRRQAGAAIVDNKRTVWASNLPEGTSAQKAELIALTQALRLAEGKSINIYTDSRYAFATAHVHGAIYKQRGWLTSAGKDIKNKEEILALLEAIHLPKRVAIIHCPGHQRGTDPVATGNRKADEAAKQAAQSTRILTETTKNAGKRTADGSEFEKRTADGSEFESPKKKAKVE

SEQ ID NO: 1799 - protein, 2215 aa, synthetic construct
MPAAKRVKLDGGDKKYSIGLDIGTNSVGWAVITDEYKVPSKKFKVLGNTDRHSIKKNLIGALLFDSGETAEATRLKRTARRRYTRRKNRICYLQEIFSNEMAKVDDSFFHRLEESFLVEEDKKHERHPIFGNIVDEVAYHEKYPTIYHLRKKLVDSTDKADLRLIYLALAHMIKFRGHFLIEGDLNPDNSDVDKLFIQLVQTYNQLFEENPINASGVDAKAILSARLSKSRRLENLIAQLPGEKKNGLFGNLIALSLGLTPNFKSNFDLAEDAKLQLSKDTYDDDLDNLLAQIGDQYADLFLAAKNLSDAILLSDILRVNTEITKAPLSASMIKRYDEHHQDLTLLKALVRQQLPEKYKEIFFDQSKNGYAGYIDGGASQEEFYKFIKPILEKMDGTEELLVKLNREDLLRKQRTFDNGSIPHQIHLGELHAILRRQEDFYPFLKDNREKIEKILTFRIPYYVGPLARGNSRFAWMTRKSEETITPWNFEEVVDKGASAQSFIERMTNFDKNLPNEKVLPKHSLLYEYFTVYNELTKVKYVTEGMRKPAFLSGEQKKAIVDLLFKTNRKVTVKQLKEDYFKKIECFDSVEISGVEDRFNASLGTYHDLLKIIKDKDFLDNEENEDILEDIVLTLTLFEDREMIEERLKTYAHLFDDKVMKQLKRRRYTGWGRLSRKLINGIRDKQSGKTILDFLKSDGFANRNFMQLIHDDSLTFKEDIQKAQVSGQGDSLHEHIANLAGSPAIKKGILQTVKVVDELVKVMGRHKPENIVIEMARENQTTQKGQKNSRERMKRIEEGIKELGSQILKEHPVENTQLQNEKLYLYYLQNGRDMYVDQELDINRLSDYDVDHIVPQSFLKDDSIDNKVLTRSDKARGKSDNVPSEEVVKKMKNYWRQLLNAKLITQRKFDNLTKAERGGLSELDKAGFIKRQLVETRQITKHVAQILDSRMNTKYDENDKLIREVKVITLKSKLVSDFRKDFQFYKVREINNYHHAHDAYLNAVVGTALIKKYPKLESEFVYGDYKVYDVRKMIAKSEQEIGKATAKYFFYSNIMNFFKTEITLANGEIRKRPLIETNGETGEIVWDKGRDFATVRKVLSMPQVNIVKKTEVQTGGFSKESILPKRNSDKLIARKKDWDPKKYGGFDSPTVAYSVLVVAKVEKGKSKKLKSVKELLGITIMERSSFEKNPIDFLEAKGYKEVKKDLIIKLPKYSLFELENGRKRMLASAGELQKGNELALPSKYVNFLYLASHYEKLKGSPEDNEQKQLFVEQHKHYLDEIIEQISEFSKRVILADANLDKVLSAYNKHRDKPIREQAENIIHLFTLTNLGAPAAFKYFDTTIDRKRYTSTKEVLDATLIHQSITGLYETRIDLSQLGGDGGGGGGGGGGGGTLGDQGSRGSDPLPEPRVTLTVEGIPTEFLVNTGAEHSVLTKPMGKMGSKRTVVAGATGSKVYPWTTKRLLKIGQKQVTHSFLVIPECPAPLLGRDLLTKLKAQIQFSTEGPQVTWEDRPAMCLVLNLEEEYRLHEKPVPPSIDPSWLQLFPMVWAEKAGMGLANQVPPVVVELKSDASPVAVRQYPMSKEAREGIRPHIQRFLDLGILVPCQSPWNTPLLPVKKPGTNDYRPVQDLREVNKRVQDIHPTVPNPYNLLSSLPPSHTWYSVLDLKDAFFCLKLHPNSQPLFAFEWRDPEKGNTGQLTWTRLPQGFKNSPTLFNEALHRDLASFRALNPQVVMLQYVDDLLVAAPTYRDCKEGTRRLLQELSKLGYRVSAKKAQLCREEVTYLGYLLKGGKRWLTPARKATVMKIPTPTTPRQVREFLGKAGFCRLFIPGFASLAAPLYPLTRPKVPFTWTEAHQEAFGRIKEALLSAPALALPDLTKPFALYVDEKEGVARGVLTQTLGPWRRPVAYLSKKLDPVASGWPTCLKAIAAVALLLKDADKLTLGQNVLVIAPHNLESIVRQPPDRWMTNARMTHYQSLLLNERVSFAPPAILNPATLLPVESDDTPIHICSEILAEETGTRPDLRDQPLPGVPAWYTDGSSFIMDGRRQAGAAIVDNKRTVWASNLPEGTSAQKAELIALTQALRLAEGKSINIYTDSRYAFATAHVHGAIYKQRGWLTSAGKDIKNKEEILALLEAIHLPKRVAIIHCPGHQRGTDPVATGNRKADEAAKQAAQSTRILTETTKNAGKRTADGSEFEKRTADGSEFESPKKKAKVE

SEQ ID NO: 1800 - protein, 2223 aa, synthetic construct
MPAAKRVKLDGGDKKYSIGLDIGTNSVGWAVITDEYKVPSKKFKVLGNTDRHSIKKNLIGALLFDSGETAEATRLKRTARRRYTRRKNRICYLQEIFSNEMAKVDDSFFHRLEESFLVEEDKKHERHPIFGNIVDEVAYHEKYPTIYHLRKKLVDSTDKADLRLIYLALAHMIKFRGHFLIEGDLNPDNSDVDKLFIQLVQTYNQLFEENPINASGVDAKAILSARLSKSRRLENLIAQLPGEKKNGLFGNLIALSLGLTPNFKSNFDLAEDAKLQLSKDTYDDDLDNLLAQIGDQYADLFLAAKNLSDAILLSDILRVNTEITKAPLSASMIKRYDEHHQDLTLLKALVRQQLPEKYKEIFFDQSKNGYAGYIDGGASQEEFYKFIKPILEKMDGTEELLVKLNREDLLRKQRTFDNGSIPHQIHLGELHAILRRQEDFYPFLKDNREKIEKILTFRIPYYVGPLARGNSRFAWMTRKSEETITPWNFEEVVDKGASAQSFIERMTNFDKNLPNEKVLPKHSLLYEYFTVYNELTKVKYVTEGMRKPAFLSGEQKKAIVDLLFKTNRKVTVKQLKEDYFKKIECFDSVEISGVEDRFNASLGTYHDLLKIIKDKDFLDNEENEDILEDIVLTLTLFEDREMIEERLKTYAHLFDDKVMKQLKRRRYTGWGRLSRKLINGIRDKQSGKTILDFLKSDGFANRNFMQLIHDDSLTFKEDIQKAQVSGQGDSLHEHIANLAGSPAIKKGILQTVKVVDELVKVMGRHKPENIVIEMARENQTTQKGQKNSRERMKRIEEGIKELGSQILKEHPVENTQLQNEKLYLYYLQNGRDMYVDQELDINRLSDYDVDHIVPQSFLKDDSIDNKVLTRSDKARGKSDNVPSEEVVKKMKNYWRQLLNAKLITQRKFDNLTKAERGGLSELDKAGFIKRQLVETRQITKHVAQILDSRMNTKYDENDKLIREVKVITLKSKLVSDFRKDFQFYKVREINNYHHAHDAYLNAVVGTALIKKYPKLESEFVYGDYKVYDVRKMIAKSEQEIGKATAKYFFYSNIMNFFKTEITLANGEIRKRPLIETNGETGEIVWDKGRDFATVRKVLSMPQVNIVKKTEVQTGGFSKESILPKRNSDKLIARKKDWDPKKYGGFDSPTVAYSVLVVAKVEKGKSKKLKSVKELLGITIMERSSFEKNPIDFLEAKGYKEVKKDLIIKLPKYSLFELENGRKRMLASAGELQKGNELALPSKYVNFLYLASHYEKLKGSPEDNEQKQLFVEQHKHYLDEIIEQISEFSKRVILADANLDKVLSAYNKHRDKPIREQAENIIHLFTLTNLGAPAAFKYFDTTIDRKRYTSTKEVLDATLIHQSITGLYETRIDLSQLGGDGGSGSETPGTSESATPESGGTLGDQGSRGSDPLPEPRVTLTVEGIPTEFLVNTGAEHSVLTKPMGKMGSKRTVVAGATGSKVYPWTTKRLLKIGQKQVTHSFLVIPECPAPLLGRDLLTKLKAQIQFSTEGPQVTWEDRPAMCLVLNLEEEYRLHEKPVPPSIDPSWLQLFPMVWAEKAGMGLANQVPPVVVELKSDASPVAVRQYPMSKEAREGIRPHIQRFLDLGILVPCQSPWNTPLLPVKKPGTNDYRPVQDLREVNKRVQDIHPTVPNPYNLLSSLPPSHTWYSVLDLKDAFFCLKLHPNSQPLFAFEWRDPEKGNTGQLTWTRLPQGFKNSPTLFNEALHRDLASFRALNPQVVMLQYVDDLLVAAPTYRDCKEGTRRLLQELSKLGYRVSAKKAQLCREEVTYLGYLLKGGKRWLTPARKATVMKIPTPTTPRQVREFLGKAGFCRLFIPGFASLAAPLYPLTRPKVPFTWTEAHQEAFGRIKEALLSAPALALPDLTKPFALYVDEKEGVARGVLTQTLGPWRRPVAYLSKKLDPVASGWPTCLKAIAAVALLLKDADKLTLGQNVLVIAPHNLESIVRQPPDRWMTNARMTHYQSLLLNERVSFAPPAILNPATLLPVESDDTPIHICSEILAEETGTRPDLRDQPLPGVPAWYTDGSSFIMDGRRQAGAAIVDNKRTVWASNLPEGTSAQKAELIALTQALRLAEGKSINIYTDSRYAFATAHVHGAIYKQRGWLTSAGKDIKNKEEILALLEAIHLPKRVAIIHCPGHQRGTDPVATGNRKADEAAKQAAQSTRILTETTKNAGKRTADGSEFEKRTADGSEFESPKKKAKVE

SEQ ID NO: 1801 - protein, 2218 aa, synthetic construct
MPAAKRVKLDGGDKKYSIGLDIGTNSVGWAVITDEYKVPSKKFKVLGNTDRHSIKKNLIGALLFDSGETAEATRLKRTARRRYTRRKNRICYLQEIFSNEMAKVDDSFFHRLEESFLVEEDKKHERHPIFGNIVDEVAYHEKYPTIYHLRKKLVDSTDKADLRLIYLALAHMIKFRGHFLIEGDLNPDNSDVDKLFIQLVQTYNQLFEENPINASGVDAKAILSARLSKSRRLENLIAQLPGEKKNGLFGNLIALSLGLTPNFKSNFDLAEDAKLQLSKDTYDDDLDNLLAQIGDQYADLFLAAKNLSDAILLSDILRVNTEITKAPLSASMIKRYDEHHQDLTLLKALVRQQLPEKYKEIFFDQSKNGYAGYIDGGASQEEFYKFIKPILEKMDGTEELLVKLNREDLLRKQRTFDNGSIPHQIHLGELHAILRRQEDFYPFLKDNREKIEKILTFRIPYYVGPLARGNSRFAWMTRKSEETITPWNFEEVVDKGASAQSFIERMTNFDKNLPNEKVLPKHSLLYEYFTVYNELTKVKYVTEGMRKPAFLSGEQKKAIVDLLFKTNRKVTVKQLKEDYFKKIECFDSVEISGVEDRFNASLGTYHDLLKIIKDKDFLDNEENEDILEDIVLTLTLFEDREMIEERLKTYAHLFDDKVMKQLKRRRYTGWGRLSRKLINGIRDKQSGKTILDFLKSDGFANRNFMQLIHDDSLTFKEDIQKAQVSGQGDSLHEHIANLAGSPAIKKGILQTVKVVDELVKVMGRHKPENIVIEMARENQTTQKGQKNSRERMKRIEEGIKELGSQILKEHPVENTQLQNEKLYLYYLQNGRDMYVDQELDINRLSDYDVDHIVPQSFLKDDSIDNKVLTRSDKARGKSDNVPSEEVVKKMKNYWRQLLNAKLITQRKFDNLTKAERGGLSELDKAGFIKRQLVETRQITKHVAQILDSRMNTKYDENDKLIREVKVITLKSKLVSDFRKDFQFYKVREINNYHHAHDAYLNAVVGTALIKKYPKLESEFVYGDYKVYDVRKMIAKSEQEIGKATAKYFFYSNIMNFFKTEITLANGEIRKRPLIETNGETGEIVWDKGRDFATVRKVLSMPQVNIVKKTEVQTGGFSKESILPKRNSDKLIARKKDWDPKKYGGFDSPTVAYSVLVVAKVEKGKSKKLKSVKELLGITIMERSSFEKNPIDFLEAKGYKEVKKDLIIKLPKYSLFELENGRKRMLASAGELQKGNELALPSKYVNFLYLASHYEKLKGSPEDNEQKQLFVEQHKHYLDEIIEQISEFSKRVILADANLDKVLSAYNKHRDKPIREQAENIIHLFTLTNLGAPAAFKYFDTTIDRKRYTSTKEVLDATLIHQSITGLYETRIDLSQLGGDGGGSSGGSEAAAKGGTLGDQGSRGSDPLPEPRVTLTVEGIPTEFLVNTGAEHSVLTKPMGKMGSKRTVVAGATGSKVYPWTTKRLLKIGQKQVTHSFLVIPECPAPLLGRDLLTKLKAQIQFSTEGPQVTWEDRPAMCLVLNLEEEYRLHEKPVPPSIDPSWLQLFPMVWAEKAGMGLANQVPPVVVELKSDASPVAVRQYPMSKEAREGIRPHIQRFLDLGILVPCQSPWNTPLLPVKKPGTNDYRPVQDLREVNKRVQDIHPTVPNPYNLLSSLPPSHTWYSVLDLKDAFFCLKLHPNSQPLFAFEWRDPEKGNTGQLTWTRLPQGFKNSPTLFNEALHRDLASFRALNPQVVMLQYVDDLLVAAPTYRDCKEGTRRLLQELSKLGYRVSAKKAQLCREEVTYLGYLLKGGKRWLTPARKATVMKIPTPTTPRQVREFLGKAGFCRLFIPGFASLAAPLYPLTRPKVPFTWTEAHQEAFGRIKEALLSAPALALPDLTKPFALYVDEKEGVARGVLTQTLGPWRRPVAYLSKKLDPVASGWPTCLKAIAAVALLLKDADKLTLGQNVLVIAPHNLESIVRQPPDRWMTNARMTHYQSLLLNERVSFAPPAILNPATLLPVESDDTPIHICSEILAEETGTRPDLRDQPLPGVPAWYTDGSSFIMDGRRQAGAAIVDNKRTVWASNLPEGTSAQKAELIALTQALRLAEGKSINIYTDSRYAFATAHVHGAIYKQRGWLTSAGKDIKNKEEILALLEAIHLPKRVAIIHCPGHQRGTDPVATGNRKADEAAKQAAQSTRILTETTKNAGKRTADGSEFEKRTADGSEFESPKKKAKVE

SEQ ID NO: 1802 - protein, 2216 aa, synthetic construct
MPAAKRVKLDGGDKKYSIGLDIGTNSVGWAVITDEYKVPSKKFKVLGNTDRHSIKKNLIGALLFDSGETAEATRLKRTARRRYTRRKNRICYLQEIFSNEMAKVDDSFFHRLEESFLVEEDKKHERHPIFGNIVDEVAYHEKYPTIYHLRKKLVDSTDKADLRLIYLALAHMIKFRGHFLIEGDLNPDNSDVDKLFIQLVQTYNQLFEENPINASGVDAKAILSARLSKSRRLENLIAQLPGEKKNGLFGNLIALSLGLTPNFKSNFDLAEDAKLQLSKDTYDDDLDNLLAQIGDQYADLFLAAKNLSDAILLSDILRVNTEITKAPLSASMIKRYDEHHQDLTLLKALVRQQLPEKYKEIFFDQSKNGYAGYIDGGASQEEFYKFIKPILEKMDGTEELLVKLNREDLLRKQRTFDNGSIPHQIHLGELHAILRRQEDFYPFLKDNREKIEKILTFRIPYYVGPLARGNSRFAWMTRKSEETITPWNFEEVVDKGASAQSFIERMTNFDKNLPNEKVLPKHSLLYEYFTVYNELTKVKYVTEGMRKPAFLSGEQKKAIVDLLFKTNRKVTVKQLKEDYFKKIECFDSVEISGVEDRFNASLGTYHDLLKIIKDKDFLDNEENEDILEDIVLTLTLFEDREMIEERLKTYAHLFDDKVMKQLKRRRYTGWGRLSRKLINGIRDKQSGKTILDFLKSDGFANRNFMQLIHDDSLTFKEDIQKAQVSGQGDSLHEHIANLAGSPAIKKGILQTVKVVDELVKVMGRHKPENIVIEMARENQTTQKGQKNSRERMKRIEEGIKELGSQILKEHPVENTQLQNEKLYLYYLQNGRDMYVDQELDINRLSDYDVDHIVPQSFLKDDSIDNKVLTRSDKARGKSDNVPSEEVVKKMKNYWRQLLNAKLITQRKFDNLTKAERGGLSELDKAGFIKRQLVETRQITKHVAQILDSRMNTKYDENDKLIREVKVITLKSKLVSDFRKDFQFYKVREINNYHHAHDAYLNAVVGTALIKKYPKLESEFVYGDYKVYDVRKMIAKSEQEIGKATAKYFFYSNIMNFFKTEITLANGEIRKRPLIETNGETGEIVWDKGRDFATVRKVLSMPQVNIVKKTEVQTGGFSKESILPKRNSDKLIARKKDWDPKKYGGFDSPTVAYSVLVVAKVEKGKSKKLKSVKELLGITIMERSSFEKNPIDFLEAKGYKEVKKDLIIKLPKYSLFELENGRKRMLASAGELQKGNELALPSKYVNFLYLASHYEKLKGSPEDNEQKQLFVEQHKHYLDEIIEQISEFSKRVILADANLDKVLSAYNKHRDKPIREQAENIIHLFTLTNLGAPAAFKYFDTTIDRKRYTSTKEVLDATLIHQSITGLYETRIDLSQLGGDGGGGSPAPGSSGGTLGDQGSRGSDPLPEPRVTLTVEGIPTEFLVNTGAEHSVLTKPMGKMGSKRTVVAGATGSKVYPWTTKRLLKIGQKQVTHSFLVIPECPAPLLGRDLLTKLKAQIQFSTEGPQVTWEDRPAMCLVLNLEEEYRLHEKPVPPSIDPSWLQLFPMVWAEKAGMGLANQVPPVVVELKSDASPVAVRQYPMSKEAREGIRPHIQRFLDLGILVPCQSPWNTPLLPVKKPGTNDYRPVQDLREVNKRVQDIHPTVPNPYNLLSSLPPSHTWYSVLDLKDAFFCLKLHPNSQPLFAFEWRDPEKGNTGQLTWTRLPQGFKNSPTLFNEALHRDLASFRALNPQVVMLQYVDDLLVAAPTYRDCKEGTRRLLQELSKLGYRVSAKKAQLCREEVTYLGYLLKGGKRWLTPARKATVMKIPTPTTPRQVREFLGKAGFCRLFIPGFASLAAPLYPLTRPKVPFTWTEAHQEAFGRIKEALLSAPALALPDLTKPFALYVDEKEGVARGVLTQTLGPWRRPVAYLSKKLDPVASGWPTCLKAIAAVALLLKDADKLTLGQNVLVIAPHNLESIVRQPPDRWMTNARMTHYQSLLLNERVSFAPPAILNPATLLPVESDDTPIHICSEILAEETGTRPDLRDQPLPGVPAWYTDGSSFIMDGRRQAGAAIVDNKRTVWASNLPEGTSAQKAELIALTQALRLAEGKSINIYTDSRYAFATAHVHGAIYKQRGWLTSAGKDIKNKEEILALLEAIHLPKRVAIIHCPGHQRGTDPVATGNRKADEAAKQAAQSTRILTETTKNAGKRTADGSEFEKRTADGSEFESPKKKAKVE

SEQ ID NO: 1803 - protein, 2237 aa, synthetic construct
MPAAKRVKLDGGDKKYSIGLDIGTNSVGWAVITDEYKVPSKKFKVLGNTDRHSIKKNLIGALLFDSGETAEATRLKRTARRRYTRRKNRICYLQEIFSNEMAKVDDSFFHRLEESFLVEEDKKHERHPIFGNIVDEVAYHEKYPTIYHLRKKLVDSTDKADLRLIYLALAHMIKFRGHFLIEGDLNPDNSDVDKLFIQLVQTYNQLFEENPINASGVDAKAILSARLSKSRRLENLIAQLPGEKKNGLFGNLIALSLGLTPNFKSNFDLAEDAKLQLSKDTYDDDLDNLLAQIGDQYADLFLAAKNLSDAILLSDILRVNTEITKAPLSASMIKRYDEHHQDLTLLKALVRQQLPEKYKEIFFDQSKNGYAGYIDGGASQEEFYKFIKPILEKMDGTEELLVKLNREDLLRKQRTFDNGSIPHQIHLGELHAILRRQEDFYPFLKDNREKIEKILTFRIPYYVGPLARGNSRFAWMTRKSEETITPWNFEEVVDKGASAQSFIERMTNFDKNLPNEKVLPKHSLLYEYFTVYNELTKVKYVTEGMRKPAFLSGEQKKAIVDLLFKTNRKVTVKQLKEDYFKKIECFDSVEISGVEDRFNASLGTYHDLLKIIKDKDFLDNEENEDILEDIVLTLTLFEDREMIEERLKTYAHLFDDKVMKQLKRRRYTGWGRLSRKLINGIRDKQSGKTILDFLKSDGFANRNFMQLIHDDSLTFKEDIQKAQVSGQGDSLHEHIANLAGSPAIKKGILQTVKVVDELVKVMGRHKPENIVIEMARENQTTQKGQKNSRERMKRIEEGIKELGSQILKEHPVENTQLQNEKLYLYYLQNGRDMYVDQELDINRLSDYDVDHIVPQSFLKDDSIDNKVLTRSDKARGKSDNVPSEEVVKKMKNYWRQLLNAKLITQRKFDNLTKAERGGLSELDKAGFIKRQLVETRQITKHVAQILDSRMNTKYDENDKLIREVKVITLKSKLVSDFRKDFQFYKVREINNYHHAHDAYLNAVVGTALIKKYPKLESEFVYGDYKVYDVRKMIAKSEQEIGKATAKYFFYSNIMNFFKTEITLANGEIRKRPLIETNGETGEIVWDKGRDFATVRKVLSMPQVNIVKKTEVQTGGFSKESILPKRNSDKLIARKKDWDPKKYGGFDSPTVAYSVLVVAKVEKGKSKKLKSVKELLGITIMERSSFEKNPIDFLEAKGYKEVKKDLIIKLPKYSLFELENGRKRMLASAGELQKGNELALPSKYVNFLYLASHYEKLKGSPEDNEQKQLFVEQHKHYLDEIIEQISEFSKRVILADANLDKVLSAYNKHRDKPIREQAENIIHLFTLTNLGAPAAFKYFDTTIDRKRYTSTKEVLDATLIHQSITGLYETRIDLSQLGGDGGGGGGSGGGGSGGGGSGGGGSGGGGSGGGGSGGTLGDQGSRGSDPLPEPRVTLTVEGIPTEFLVNTGAEHSVLTKPMGKMGSKRTVVAGATGSKVYPWTTKRLLKIGQKQVTHSFLVIPECPAPLLGRDLLTKLKAQIQFSTEGPQVTWEDRPAMCLVLNLEEEYRLHEKPVPPSIDPSWLQLFPMVWAEKAGMGLANQVPPVVVELKSDASPVAVRQYPMSKEAREGIRPHIQRFLDLGILVPCQSPWNTPLLPVKKPGTNDYRPVQDLREVNKRVQDIHPTVPNPYNLLSSLPPSHTWYSVLDLKDAFFCLKLHPNSQPLFAFEWRDPEKGNTGQLTWTRLPQGFKNSPTLFNEALHRDLASFRALNPQVVMLQYVDDLLVAAPTYRDCKEGTRRLLQELSKLGYRVSAKKAQLCREEVTYLGYLLKGGKRWLTPARKATVMKIPTPTTPRQVREFLGKAGFCRLFIPGFASLAAPLYPLTRPKVPFTWTEAHQEAFGRIKEALLSAPALALPDLTKPFALYVDEKEGVARGVLTQTLGPWRRPVAYLSKKLDPVASGWPTCLKAIAAVALLLKDADKLTLGQNVLVIAPHNLESIVRQPPDRWMTNARMTHYQSLLLNERVSFAPPAILNPATLLPVESDDTPIHICSEILAEETGTRPDLRDQPLPGVPAWYTDGSSFIMDGRRQAGAAIVDNKRTVWASNLPEGTSAQKAELIALTQALRLAEGKSINIYTDSRYAFATAHVHGAIYKQRGWLTSAGKDIKNKEEILALLEAIHLPKRVAIIHCPGHQRGTDPVATGNRKADEAAKQAAQSTRILTETTKNAGKRTADGSEFEKRTADGSEFESPKKKAKVE

SEQ ID NO: 1804 - protein, 2218 aa, synthetic construct
MPAAKRVKLDGGDKKYSIGLDIGTNSVGWAVITDEYKVPSKKFKVLGNTDRHSIKKNLIGALLFDSGETAEATRLKRTARRRYTRRKNRICYLQEIFSNEMAKVDDSFFHRLEESFLVEEDKKHERHPIFGNIVDEVAYHEKYPTIYHLRKKLVDSTDKADLRLIYLALAHMIKFRGHFLIEGDLNPDNSDVDKLFIQLVQTYNQLFEENPINASGVDAKAILSARLSKSRRLENLIAQLPGEKKNGLFGNLIALSLGLTPNFKSNFDLAEDAKLQLSKDTYDDDLDNLLAQIGDQYADLFLAAKNLSDAILLSDILRVNTEITKAPLSASMIKRYDEHHQDLTLLKALVRQQLPEKYKEIFFDQSKNGYAGYIDGGASQEEFYKFIKPILEKMDGTEELLVKLNREDLLRKQRTFDNGSIPHQIHLGELHAILRRQEDFYPFLKDNREKIEKILTFRIPYYVGPLARGNSRFAWMTRKSEETITPWNFEEVVDKGASAQSFIERMTNFDKNLPNEKVLPKHSLLYEYFTVYNELTKVKYVTEGMRKPAFLSGEQKKAIVDLLFKTNRKVTVKQLKEDYFKKIECFDSVEISGVEDRFNASLGTYHDLLKIIKDKDFLDNEENEDILEDIVLTLTLFEDREMIEERLKTYAHLFDDKVMKQLKRRRYTGWGRLSRKLINGIRDKQSGKTILDFLKSDGFANRNFMQLIHDDSLTFKEDIQKAQVSGQGDSLHEHIANLAGSPAIKKGILQTVKVVDELVKVMGRHKPENIVIEMARENQTTQKGQKNSRERMKRIEEGIKELGSQILKEHPVENTQLQNEKLYLYYLQNGRDMYVDQELDINRLSDYDVDHIVPQSFLKDDSIDNKVLTRSDKARGKSDNVPSEEVVKKMKNYWRQLLNAKLITQRKFDNLTKAERGGLSELDKAGFIKRQLVETRQITKHVAQILDSRMNTKYDENDKLIREVKVITLKSKLVSDFRKDFQFYKVREINNYHHAHDAYLNAVVGTALIKKYPKLESEFVYGDYKVYDVRKMIAKSEQEIGKATAKYFFYSNIMNFFKTEITLANGEIRKRPLIETNGETGEIVWDKGRDFATVRKVLSMPQVNIVKKTEVQTGGFSKESILPKRNSDKLIARKKDWDPKKYGGFDSPTVAYSVLVVAKVEKGKSKKLKSVKELLGITIMERSSFEKNPIDFLEAKGYKEVKKDLIIKLPKYSLFELENGRKRMLASAGELQKGNELALPSKYVNFLYLASHYEKLKGSPEDNEQKQLFVEQHKHYLDEIIEQISEFSKRVILADANLDKVLSAYNKHRDKPIREQAENIIHLFTLTNLGAPAAFKYFDTTIDRKRYTSTKEVLDATLIHQSITGLYETRIDLSQLGGDGGEAAAKGSSPAPGGTLGDQGSRGSDPLPEPRVTLTVEGIPTEFLVNTGAEHSVLTKPMGKMGSKRTVVAGATGSKVYPWTTKRLLKIGQKQVTHSFLVIPECPAPLLGRDLLTKLKAQIQFSTEGPQVTWEDRPAMCLVLNLEEEYRLHEKPVPPSIDPSWLQLFPMVWAEKAGMGLANQVPPVVVELKSDASPVAVRQYPMSKEAREGIRPHIQRFLDLGILVPCQSPWNTPLLPVKKPGTNDYRPVQDLREVNKRVQDIHPTVPNPYNLLSSLPPSHTWYSVLDLKDAFFCLKLHPNSQPLFAFEWRDPEKGNTGQLTWTRLPQGFKNSPTLFNEALHRDLASFRALNPQVVMLQYVDDLLVAAPTYRDCKEGTRRLLQELSKLGYRVSAKKAQLCREEVTYLGYLLKGGKRWLTPARKATVMKIPTPTTPRQVREFLGKAGFCRLFIPGFASLAAPLYPLTRPKVPFTWTEAHQEAFGRIKEALLSAPALALPDLTKPFALYVDEKEGVARGVLTQTLGPWRRPVAYLSKKLDPVASGWPTCLKAIAAVALLLKDADKLTLGQNVLVIAPHNLESIVRQPPDRWMTNARMTHYQSLLLNERVSFAPPAILNPATLLPVESDDTPIHICSEILAEETGTRPDLRDQPLPGVPAWYTDGSSFIMDGRRQAGAAIVDNKRTVWASNLPEGTSAQKAELIALTQALRLAEGKSINIYTDSRYAFATAHVHGAIYKQRGWLTSAGKDIKNKEEILALLEAIHLPKRVAIIHCPGHQRGTDPVATGNRKADEAAKQAAQSTRILTETTKNAGKRTADGSEFEKRTADGSEFESPKKKAKVE

SEQ ID NO: 1805 - protein, 2218 aa, synthetic construct
MPAAKRVKLDGGDKKYSIGLDIGTNSVGWAVITDEYKVPSKKFKVLGNTDRHSIKKNLIGALLFDSGETAEATRLKRTARRRYTRRKNRICYLQEIFSNEMAKVDDSFFHRLEESFLVEEDKKHERHPIFGNIVDEVAYHEKYPTIYHLRKKLVDSTDKADLRLIYLALAHMIKFRGHFLIEGDLNPDNSDVDKLFIQLVQTYNQLFEENPINASGVDAKAILSARLSKSRRLENLIAQLPGEKKNGLFGNLIALSLGLTPNFKSNFDLAEDAKLQLSKDTYDDDLDNLLAQIGDQYADLFLAAKNLSDAILLSDILRVNTEITKAPLSASMIKRYDEHHQDLTLLKALVRQQLPEKYKEIFFDQSKNGYAGYIDGGASQEEFYKFIKPILEKMDGTEELLVKLNREDLLRKQRTFDNGSIPHQIHLGELHAILRRQEDFYPFLKDNREKIEKILTFRIPYYVGPLARGNSRFAWMTRKSEETITPWNFEEVVDKGASAQSFIERMTNFDKNLPNEKVLPKHSLLYEYFTVYNELTKVKYVTEGMRKPAFLSGEQKKAIVDLLFKTNRKVTVKQLKEDYFKKIECFDSVEISGVEDRFNASLGTYHDLLKIIKDKDFLDNEENEDILEDIVLTLTLFEDREMIEERLKTYAHLFDDKVMKQLKRRRYTGWGRLSRKLINGIRDKQSGKTILDFLKSDGFANRNFMQLIHDDSLTFKEDIQKAQVSGQGDSLHEHIANLAGSPAIKKGILQTVKVVDELVKVMGRHKPENIVIEMARENQTTQKGQKNSRERMKRIEEGIKELGSQILKEHPVENTQLQNEKLYLYYLQNGRDMYVDQELDINRLSDYDVDHIVPQSFLKDDSIDNKVLTRSDKARGKSDNVPSEEVVKKMKNYWRQLLNAKLITQRKFDNLTKAERGGLSELDKAGFIKRQLVETRQITKHVAQILDSRMNTKYDENDKLIREVKVITLKSKLVSDFRKDFQFYKVREINNYHHAHDAYLNAVVGTALIKKYPKLESEFVYGDYKVYDVRKMIAKSEQEIGKATAKYFFYSNIMNFFKTEITLANGEIRKRPLIETNGETGEIVWDKGRDFATVRKVLSMPQVNIVKKTEVQTGGFSKESILPKRNSDKLIARKKDWDPKKYGGFDSPTVAYSVLVVAKVEKGKSKKLKSVKELLGITIMERSSFEKNPIDFLEAKGYKEVKKDLIIKLPKYSLFELENGRKRMLASAGELQKGNELALPSKYVNFLYLASHYEKLKGSPEDNEQKQLFVEQHKHYLDEIIEQISEFSKRVILADANLDKVLSAYNKHRDKPIREQAENIIHLFTLTNLGAPAAFKYFDTTIDRKRYTSTKEVLDATLIHQSITGLYETRIDLSQLGGDGGGGSGSSEAAAKGGTLGDQGSRGSDPLPEPRVTLTVEGIPTEFLVNTGAEHSVLTKPMGKMGSKRTVVAGATGSKVYPWTTKRLLKIGQKQVTHSFLVIPECPAPLLGRDLLTKLKAQIQFSTEGPQVTWEDRPAMCLVLNLEEEYRLHEKPVPPSIDPSWLQLFPMVWAEKAGMGLANQVPPVVVELKSDASPVAVRQYPMSKEAREGIRPHIQRFLDLGILVPCQSPWNTPLLPVKKPGTNDYRPVQDLREVNKRVQDIHPTVPNPYNLLSSLPPSHTWYSVLDLKDAFFCLKLHPNSQPLFAFEWRDPEKGNTGQLTWTRLPQGFKNSPTLFNEALHRDLASFRALNPQVVMLQYVDDLLVAAPTYRDCKEGTRRLLQELSKLGYRVSAKKAQLCREEVTYLGYLLKGGKRWLTPARKATVMKIPTPTTPRQVREFLGKAGFCRLFIPGFASLAAPLYPLTRPKVPFTWTEAHQEAFGRIKEALLSAPALALPDLTKPFALYVDEKEGVARGVLTQTLGPWRRPVAYLSKKLDPVASGWPTCLKAIAAVALLLKDADKLTLGQNVLVIAPHNLESIVRQPPDRWMTNARMTHYQSLLLNERVSFAPPAILNPATLLPVESDDTPIHICSEILAEETGTRPDLRDQPLPGVPAWYTDGSSFIMDGRRQAGAAIVDNKRTVWASNLPEGTSAQKAELIALTQALRLAEGKSINIYTDSRYAFATAHVHGAIYKQRGWLTSAGKDIKNKEEILALLEAIHLPKRVAIIHCPGHQRGTDPVATGNRKADEAAKQAAQSTRILTETTKNAGKRTADGSEFEKRTADGSEFESPKKKAKVE

SEQ ID NO: 1806 - protein, 2216 aa, synthetic construct
MPAAKRVKLDGGDKKYSIGLDIGTNSVGWAVITDEYKVPSKKFKVLGNTDRHSIKKNLIGALLFDSGETAEATRLKRTARRRYTRRKNRICYLQEIFSNEMAKVDDSFFHRLEESFLVEEDKKHERHPIFGNIVDEVAYHEKYPTIYHLRKKLVDSTDKADLRLIYLALAHMIKFRGHFLIEGDLNPDNSDVDKLFIQLVQTYNQLFEENPINASGVDAKAILSARLSKSRRLENLIAQLPGEKKNGLFGNLIALSLGLTPNFKSNFDLAEDAKLQLSKDTYDDDLDNLLAQIGDQYADLFLAAKNLSDAILLSDILRVNTEITKAPLSASMIKRYDEHHQDLTLLKALVRQQLPEKYKEIFFDQSKNGYAGYIDGGASQEEFYKFIKPILEKMDGTEELLVKLNREDLLRKQRTFDNGSIPHQIHLGELHAILRRQEDFYPFLKDNREKIEKILTFRIPYYVGPLARGNSRFAWMTRKSEETITPWNFEEVVDKGASAQSFIERMTNFDKNLPNEKVLPKHSLLYEYFTVYNELTKVKYVTEGMRKPAFLSGEQKKAIVDLLFKTNRKVTVKQLKEDYFKKIECFDSVEISGVEDRFNASLGTYHDLLKIIKDKDFLDNEENEDILEDIVLTLTLFEDREMIEERLKTYAHLFDDKVMKQLKRRRYTGWGRLSRKLINGIRDKQSGKTILDFLKSDGFANRNFMQLIHDDSLTFKEDIQKAQVSGQGDSLHEHIANLAGSPAIKKGILQTVKVVDELVKVMGRHKPENIVIEMARENQTTQKGQKNSRERMKRIEEGIKELGSQILKEHPVENTQLQNEKLYLYYLQNGRDMYVDQELDINRLSDYDVDHIVPQSFLKDDSIDNKVLTRSDKARGKSDNVPSEEVVKKMKNYWRQLLNAKLITQRKFDNLTKAERGGLSELDKAGFIKRQLVETRQITKHVAQILDSRMNTKYDENDKLIREVKVITLKSKLVSDFRKDFQFYKVREINNYHHAHDAYLNAVVGTALIKKYPKLESEFVYGDYKVYDVRKMIAKSEQEIGKATAKYFFYSNIMNFFKTEITLANGEIRKRPLIETNGETGEIVWDKGRDFATVRKVLSMPQVNIVKKTEVQTGGFSKESILPKRNSDKLIARKKDWDPKKYGGFDSPTVAYSVLVVAKVEKGKSKKLKSVKELLGITIMERSSFEKNPIDFLEAKGYKEVKKDLIIKLPKYSLFELENGRKRMLASAGELQKGNELALPSKYVNFLYLASHYEKLKGSPEDNEQKQLFVEQHKHYLDEIIEQISEFSKRVILADANLDKVLSAYNKHRDKPIREQAENIIHLFTLTNLGAPAAFKYFDTTIDRKRYTSTKEVLDATLIHQSITGLYETRIDLSQLGGDGGPAPGSSGGGGGTLGDQGSRGSDPLPEPRVTLTVEGIPTEFLVNTGAEHSVLTKPMGKMGSKRTVVAGATGSKVYPWTTKRLLKIGQKQVTHSFLVIPECPAPLLGRDLLTKLKAQIQFSTEGPQVTWEDRPAMCLVLNLEEEYRLHEKPVPPSIDPSWLQLFPMVWAEKAGMGLANQVPPVVVELKSDASPVAVRQYPMSKEAREGIRPHIQRFLDLGILVPCQSPWNTPLLPVKKPGTNDYRPVQDLREVNKRVQDIHPTVPNPYNLLSSLPPSHTWYSVLDLKDAFFCLKLHPNSQPLFAFEWRDPEKGNTGQLTWTRLPQGFKNSPTLFNEALHRDLASFRALNPQVVMLQYVDDLLVAAPTYRDCKEGTRRLLQELSKLGYRVSAKKAQLCREEVTYLGYLLKGGKRWLTPARKATVMKIPTPTTPRQVREFLGKAGFCRLFIPGFASLAAPLYPLTRPKVPFTWTEAHQEAFGRIKEALLSAPALALPDLTKPFALYVDEKEGVARGVLTQTLGPWRRPVAYLSKKLDPVASGWPTCLKAIAAVALLLKDADKLTLGQNVLVIAPHNLESIVRQPPDRWMTNARMTHYQSLLLNERVSFAPPAILNPATLLPVESDDTPIHICSEILAEETGTRPDLRDQPLPGVPAWYTDGSSFIMDGRRQAGAAIVDNKRTVWASNLPEGTSAQKAELIALTQALRLAEGKSINIYTDSRYAFATAHVHGAIYKQRGWLTSAGKDIKNKEEILALLEAIHLPKRVAIIHCPGHQRGTDPVATGNRKADEAAKQAAQSTRILTETTKNAGKRTADGSEFEKRTADGSEFESPKKKAKVE

SEQ ID NO: 1807 - protein, 2213 aa, synthetic construct
MPAAKRVKLDGGDKKYSIGLDIGTNSVGWAVITDEYKVPSKKFKVLGNTDRHSIKKNLIGALLFDSGETAEATRLKRTARRRYTRRKNRICYLQEIFSNEMAKVDDSFFHRLEESFLVEEDKKHERHPIFGNIVDEVAYHEKYPTIYHLRKKLVDSTDKADLRLIYLALAHMIKFRGHFLIEGDLNPDNSDVDKLFIQLVQTYNQLFEENPINASGVDAKAILSARLSKSRRLENLIAQLPGEKKNGLFGNLIALSLGLTPNFKSNFDLAEDAKLQLSKDTYDDDLDNLLAQIGDQYADLFLAAKNLSDAILLSDILRVNTEITKAPLSASMIKRYDEHHQDLTLLKALVRQQLPEKYKEIFFDQSKNGYAGYIDGGASQEEFYKFIKPILEKMDGTEELLVKLNREDLLRKQRTFDNGSIPHQIHLGELHAILRRQEDFYPFLKDNREKIEKILTFRIPYYVGPLARGNSRFAWMTRKSEETITPWNFEEVVDKGASAQSFIERMTNFDKNLPNEKVLPKHSLLYEYFTVYNELTKVKYVTEGMRKPAFLSGEQKKAIVDLLFKTNRKVTVKQLKEDYFKKIECFDSVEISGVEDRFNASLGTYHDLLKIIKDKDFLDNEENEDILEDIVLTLTLFEDREMIEERLKTYAHLFDDKVMKQLKRRRYTGWGRLSRKLINGIRDKQSGKTILDFLKSDGFANRNFMQLIHDDSLTFKEDIQKAQVSGQGDSLHEHIANLAGSPAIKKGILQTVKVVDELVKVMGRHKPENIVIEMARENQTTQKGQKNSRERMKRIEEGIKELGSQILKEHPVENTQLQNEKLYLYYLQNGRDMYVDQELDINRLSDYDVDHIVPQSFLKDDSIDNKVLTRSDKARGKSDNVPSEEVVKKMKNYWRQLLNAKLITQRKFDNLTKAERGGLSELDKAGFIKRQLVETRQITKHVAQILDSRMNTKYDENDKLIREVKVITLKSKLVSDFRKDFQFYKVREINNYHHAHDAYLNAVVGTALIKKYPKLESEFVYGDYKVYDVRKMIAKSEQEIGKATAKYFFYSNIMNFFKTEITLANGEIRKRPLIETNGETGEIVWDKGRDFATVRKVLSMPQVNIVKKTEVQTGGFSKESILPKRNSDKLIARKKDWDPKKYGGFDSPTVAYSVLVVAKVEKGKSKKLKSVKELLGITIMERSSFEKNPIDFLEAKGYKEVKKDLIIKLPKYSLFELENGRKRMLASAGELQKGNELALPSKYVNFLYLASHYEKLKGSPEDNEQKQLFVEQHKHYLDEIIEQISEFSKRVILADANLDKVLSAYNKHRDKPIREQAENIIHLFTLTNLGAPAAFKYFDTTIDRKRYTSTKEVLDATLIHQSITGLYETRIDLSQLGGDGGGGGPAPGGTLGDQGSRGSDPLPEPRVTLTVEGIPTEFLVNTGAEHSVLTKPMGKMGSKRTVVAGATGSKVYPWTTKRLLKIGQKQVTHSFLVIPECPAPLLGRDLLTKLKAQIQFSTEGPQVTWEDRPAMCLVLNLEEEYRLHEKPVPPSIDPSWLQLFPMVWAEKAGMGLANQVPPVVVELKSDASPVAVRQYPMSKEAREGIRPHIQRFLDLGILVPCQSPWNTPLLPVKKPGTNDYRPVQDLREVNKRVQDIHPTVPNPYNLLSSLPPSHTWYSVLDLKDAFFCLKLHPNSQPLFAFEWRDPEKGNTGQLTWTRLPQGFKNSPTLFNEALHRDLASFRALNPQVVMLQYVDDLLVAAPTYRDCKEGTRRLLQELSKLGYRVSAKKAQLCREEVTYLGYLLKGGKRWLTPARKATVMKIPTPTTPRQVREFLGKAGFCRLFIPGFASLAAPLYPLTRPKVPFTWTEAHQEAFGRIKEALLSAPALALPDLTKPFALYVDEKEGVARGVLTQTLGPWRRPVAYLSKKLDPVASGWPTCLKAIAAVALLLKDADKLTLGQNVLVIAPHNLESIVRQPPDRWMTNARMTHYQSLLLNERVSFAPPAILNPATLLPVESDDTPIHICSEILAEETGTRPDLRDQPLPGVPAWYTDGSSFIMDGRRQAGAAIVDNKRTVWASNLPEGTSAQKAELIALTQALRLAEGKSINIYTDSRYAFATAHVHGAIYKQRGWLTSAGKDIKNKEEILALLEAIHLPKRVAIIHCPGHQRGTDPVATGNRKADEAAKQAAQSTRILTETTKNAGKRTADGSEFEKRTADGSEFESPKKKAKVE

SEQ ID NO: 1808 - protein, 2213 aa, synthetic construct
MPAAKRVKLDGGDKKYSIGLDIGTNSVGWAVITDEYKVPSKKFKVLGNTDRHSIKKNLIGALLFDSGETAEATRLKRTARRRYTRRKNRICYLQEIFSNEMAKVDDSFFHRLEESFLVEEDKKHERHPIFGNIVDEVAYHEKYPTIYHLRKKLVDSTDKADLRLIYLALAHMIKFRGHFLIEGDLNPDNSDVDKLFIQLVQTYNQLFEENPINASGVDAKAILSARLSKSRRLENLIAQLPGEKKNGLFGNLIALSLGLTPNFKSNFDLAEDAKLQLSKDTYDDDLDNLLAQIGDQYADLFLAAKNLSDAILLSDILRVNTEITKAPLSASMIKRYDEHHQDLTLLKALVRQQLPEKYKEIFFDQSKNGYAGYIDGGASQEEFYKFIKPILEKMDGTEELLVKLNREDLLRKQRTFDNGSIPHQIHLGELHAILRRQEDFYPFLKDNREKIEKILTFRIPYYVGPLARGNSRFAWMTRKSEETITPWNFEEVVDKGASAQSFIERMTNFDKNLPNEKVLPKHSLLYEYFTVYNELTKVKYVTEGMRKPAFLSGEQKKAIVDLLFKTNRKVTVKQLKEDYFKKIECFDSVEISGVEDRFNASLGTYHDLLKIIKDKDFLDNEENEDILEDIVLTLTLFEDREMIEERLKTYAHLFDDKVMKQLKRRRYTGWGRLSRKLINGIRDKQSGKTILDFLKSDGFANRNFMQLIHDDSLTFKEDIQKAQVSGQGDSLHEHIANLAGSPAIKKGILQTVKVVDELVKVMGRHKPENIVIEMARENQTTQKGQKNSRERMKRIEEGIKELGSQILKEHPVENTQLQNEKLYLYYLQNGRDMYVDQELDINRLSDYDVDHIVPQSFLKDDSIDNKVLTRSDKARGKSDNVPSEEVVKKMKNYWRQLLNAKLITQRKFDNLTKAERGGLSELDKAGFIKRQLVETRQITKHVAQILDSRMNTKYDENDKLIREVKVITLKSKLVSDFRKDFQFYKVREINNYHHAHDAYLNAVVGTALIKKYPKLESEFVYGDYKVYDVRKMIAKSEQEIGKATAKYFFYSNIMNFFKTEITLANGEIRKRPLIETNGETGEIVWDKGRDFATVRKVLSMPQVNIVKKTEVQTGGFSKESILPKRNSDKLIARKKDWDPKKYGGFDSPTVAYSVLVVAKVEKGKSKKLKSVKELLGITIMERSSFEKNPIDFLEAKGYKEVKKDLIIKLPKYSLFELENGRKRMLASAGELQKGNELALPSKYVNFLYLASHYEKLKGSPEDNEQKQLFVEQHKHYLDEIIEQISEFSKRVILADANLDKVLSAYNKHRDKPIREQAENIIHLFTLTNLGAPAAFKYFDTTIDRKRYTSTKEVLDATLIHQSITGLYETRIDLSQLGGDGGGGSGSSGGTLGDQGSRGSDPLPEPRVTLTVEGIPTEFLVNTGAEHSVLTKPMGKMGSKRTVVAGATGSKVYPWTTKRLLKIGQKQVTHSFLVIPECPAPLLGRDLLTKLKAQIQFSTEGPQVTWEDRPAMCLVLNLEEEYRLHEKPVPPSIDPSWLQLFPMVWAEKAGMGLANQVPPVVVELKSDASPVAVRQYPMSKEAREGIRPHIQRFLDLGILVPCQSPWNTPLLPVKKPGTNDYRPVQDLREVNKRVQDIHPTVPNPYNLLSSLPPSHTWYSVLDLKDAFFCLKLHPNSQPLFAFEWRDPEKGNTGQLTWTRLPQGFKNSPTLFNEALHRDLASFRALNPQVVMLQYVDDLLVAAPTYRDCKEGTRRLLQELSKLGYRVSAKKAQLCREEVTYLGYLLKGGKRWLTPARKATVMKIPTPTTPRQVREFLGKAGFCRLFIPGFASLAAPLYPLTRPKVPFTWTEAHQEAFGRIKEALLSAPALALPDLTKPFALYVDEKEGVARGVLTQTLGPWRRPVAYLSKKLDPVASGWPTCLKAIAAVALLLKDADKLTLGQNVLVIAPHNLESIVRQPPDRWMTNARMTHYQSLLLNERVSFAPPAILNPATLLPVESDDTPIHICSEILAEETGTRPDLRDQPLPGVPAWYTDGSSFIMDGRRQAGAAIVDNKRTVWASNLPEGTSAQKAELIALTQALRLAEGKSINIYTDSRYAFATAHVHGAIYKQRGWLTSAGKDIKNKEEILALLEAIHLPKRVAIIHCPGHQRGTDPVATGNRKADEAAKQAAQSTRILTETTKNAGKRTADGSEFEKRTADGSEFESPKKKAKVE

SEQ ID NO: 1809 - protein, 2227 aa, synthetic construct
MPAAKRVKLDGGDKKYSIGLDIGTNSVGWAVITDEYKVPSKKFKVLGNTDRHSIKKNLIGALLFDSGETAEATRLKRTARRRYTRRKNRICYLQEIFSNEMAKVDDSFFHRLEESFLVEEDKKHERHPIFGNIVDEVAYHEKYPTIYHLRKKLVDSTDKADLRLIYLALAHMIKFRGHFLIEGDLNPDNSDVDKLFIQLVQTYNQLFEENPINASGVDAKAILSARLSKSRRLENLIAQLPGEKKNGLFGNLIALSLGLTPNFKSNFDLAEDAKLQLSKDTYDDDLDNLLAQIGDQYADLFLAAKNLSDAILLSDILRVNTEITKAPLSASMIKRYDEHHQDLTLLKALVRQQLPEKYKEIFFDQSKNGYAGYIDGGASQEEFYKFIKPILEKMDGTEELLVKLNREDLLRKQRTFDNGSIPHQIHLGELHAILRRQEDFYPFLKDNREKIEKILTFRIPYYVGPLARGNSRFAWMTRKSEETITPWNFEEVVDKGASAQSFIERMTNFDKNLPNEKVLPKHSLLYEYFTVYNELTKVKYVTEGMRKPAFLSGEQKKAIVDLLFKTNRKVTVKQLKEDYFKKIECFDSVEISGVEDRFNASLGTYHDLLKIIKDKDFLDNEENEDILEDIVLTLTLFEDREMIEERLKTYAHLFDDKVMKQLKRRRYTGWGRLSRKLINGIRDKQSGKTILDFLKSDGFANRNFMQLIHDDSLTFKEDIQKAQVSGQGDSLHEHIANLAGSPAIKKGILQTVKVVDELVKVMGRHKPENIVIEMARENQTTQKGQKNSRERMKRIEEGIKELGSQILKEHPVENTQLQNEKLYLYYLQNGRDMYVDQELDINRLSDYDVDHIVPQSFLKDDSIDNKVLTRSDKARGKSDNVPSEEVVKKMKNYWRQLLNAKLITQRKFDNLTKAERGGLSELDKAGFIKRQLVETRQITKHVAQILDSRMNTKYDENDKLIREVKVITLKSKLVSDFRKDFQFYKVREINNYHHAHDAYLNAVVGTALIKKYPKLESEFVYGDYKVYDVRKMIAKSEQEIGKATAKYFFYSNIMNFFKTEITLANGEIRKRPLIETNGETGEIVWDKGRDFATVRKVLSMPQVNIVKKTEVQTGGFSKESILPKRNSDKLIARKKDWDPKKYGGFDSPTVAYSVLVVAKVEKGKSKKLKSVKELLGITIMERSSFEKNPIDFLEAKGYKEVKKDLIIKLPKYSLFELENGRKRMLASAGELQKGNELALPSKYVNFLYLASHYEKLKGSPEDNEQKQLFVEQHKHYLDEIIEQISEFSKRVILADANLDKVLSAYNKHRDKPIREQAENIIHLFTLTNLGAPAAFKYFDTTIDRKRYTSTKEVLDATLIHQSITGLYETRIDLSQLGGDGGEAAAKEAAAKEAAAKEAAAKGGTLGDQGSRGSDPLPEPRVTLTVEGIPTEFLVNTGAEHSVLTKPMGKMGSKRTVVAGATGSKVYPWTTKRLLKIGQKQVTHSFLVIPECPAPLLGRDLLTKLKAQIQFSTEGPQVTWEDRPAMCLVLNLEEEYRLHEKPVPPSIDPSWLQLFPMVWAEKAGMGLANQVPPVVVELKSDASPVAVRQYPMSKEAREGIRPHIQRFLDLGILVPCQSPWNTPLLPVKKPGTNDYRPVQDLREVNKRVQDIHPTVPNPYNLLSSLPPSHTWYSVLDLKDAFFCLKLHPNSQPLFAFEWRDPEKGNTGQLTWTRLPQGFKNSPTLFNEALHRDLASFRALNPQVVMLQYVDDLLVAAPTYRDCKEGTRRLLQELSKLGYRVSAKKAQLCREEVTYLGYLLKGGKRWLTPARKATVMKIPTPTTPRQVREFLGKAGFCRLFIPGFASLAAPLYPLTRPKVPFTWTEAHQEAFGRIKEALLSAPALALPDLTKPFALYVDEKEGVARGVLTQTLGPWRRPVAYLSKKLDPVASGWPTCLKAIAAVALLLKDADKLTLGQNVLVIAPHNLESIVRQPPDRWMTNARMTHYQSLLLNERVSFAPPAILNPATLLPVESDDTPIHICSEILAEETGTRPDLRDQPLPGVPAWYTDGSSFIMDGRRQAGAAIVDNKRTVWASNLPEGTSAQKAELIALTQALRLAEGKSINIYTDSRYAFATAHVHGAIYKQRGWLTSAGKDIKNKEEILALLEAIHLPKRVAIIHCPGHQRGTDPVATGNRKADEAAKQAAQSTRILTETTKNAGKRTADGSEFEKRTADGSEFESPKKKAKVE

SEQ ID NO: 1810 - protein, 2218 aa, synthetic construct
MPAAKRVKLDGGDKKYSIGLDIGTNSVGWAVITDEYKVPSKKFKVLGNTDRHSIKKNLIGALLFDSGETAEATRLKRTARRRYTRRKNRICYLQEIFSNEMAKVDDSFFHRLEESFLVEEDKKHERHPIFGNIVDEVAYHEKYPTIYHLRKKLVDSTDKADLRLIYLALAHMIKFRGHFLIEGDLNPDNSDVDKLFIQLVQTYNQLFEENPINASGVDAKAILSARLSKSRRLENLIAQLPGEKKNGLFGNLIALSLGLTPNFKSNFDLAEDAKLQLSKDTYDDDLDNLLAQIGDQYADLFLAAKNLSDAILLSDILRVNTEITKAPLSASMIKRYDEHHQDLTLLKALVRQQLPEKYKEIFFDQSKNGYAGYIDGGASQEEFYKFIKPILEKMDGTEELLVKLNREDLLRKQRTFDNGSIPHQIHLGELHAILRRQEDFYPFLKDNREKIEKILTFRIPYYVGPLARGNSRFAWMTRKSEETITPWNFEEVVDKGASAQSFIERMTNFDKNLPNEKVLPKHSLLYEYFTVYNELTKVKYVTEGMRKPAFLSGEQKKAIVDLLFKTNRKVTVKQLKEDYFKKIECFDSVEISGVEDRFNASLGTYHDLLKIIKDKDFLDNEENEDILEDIVLTLTLFEDREMIEERLKTYAHLFDDKVMKQLKRRRYTGWGRLSRKLINGIRDKQSGKTILDFLKSDGFANRNFMQLIHDDSLTFKEDIQKAQVSGQGDSLHEHIANLAGSPAIKKGILQTVKVVDELVKVMGRHKPENIVIEMARENQTTQKGQKNSRERMKRIEEGIKELGSQILKEHPVENTQLQNEKLYLYYLQNGRDMYVDQELDINRLSDYDVDHIVPQSFLKDDSIDNKVLTRSDKARGKSDNVPSEEVVKKMKNYWRQLLNAKLITQRKFDNLTKAERGGLSELDKAGFIKRQLVETRQITKHVAQILDSRMNTKYDENDKLIREVKVITLKSKLVSDFRKDFQFYKVREINNYHHAHDAYLNAVVGTALIKKYPKLESEFVYGDYKVYDVRKMIAKSEQEIGKATAKYFFYSNIMNFFKTEITLANGEIRKRPLIETNGETGEIVWDKGRDFATVRKVLSMPQVNIVKKTEVQTGGFSKESILPKRNSDKLIARKKDWDPKKYGGFDSPTVAYSVLVVAKVEKGKSKKLKSVKELLGITIMERSSFEKNPIDFLEAKGYKEVKKDLIIKLPKYSLFELENGRKRMLASAGELQKGNELALPSKYVNFLYLASHYEKLKGSPEDNEQKQLFVEQHKHYLDEIIEQISEFSKRVILADANLDKVLSAYNKHRDKPIREQAENIIHLFTLTNLGAPAAFKYFDTTIDRKRYTSTKEVLDATLIHQSITGLYETRIDLSQLGGDGGPAPGGSEAAAKGGTLGDQGSRGSDPLPEPRVTLTVEGIPTEFLVNTGAEHSVLTKPMGKMGSKRTVVAGATGSKVYPWTTKRLLKIGQKQVTHSFLVIPECPAPLLGRDLLTKLKAQIQFSTEGPQVTWEDRPAMCLVLNLEEEYRLHEKPVPPSIDPSWLQLFPMVWAEKAGMGLANQVPPVVVELKSDASPVAVRQYPMSKEAREGIRPHIQRFLDLGILVPCQSPWNTPLLPVKKPGTNDYRPVQDLREVNKRVQDIHPTVPNPYNLLSSLPPSHTWYSVLDLKDAFFCLKLHPNSQPLFAFEWRDPEKGNTGQLTWTRLPQGFKNSPTLFNEALHRDLASFRALNPQVVMLQYVDDLLVAAPTYRDCKEGTRRLLQELSKLGYRVSAKKAQLCREEVTYLGYLLKGGKRWLTPARKATVMKIPTPTTPRQVREFLGKAGFCRLFIPGFASLAAPLYPLTRPKVPFTWTEAHQEAFGRIKEALLSAPALALPDLTKPFALYVDEKEGVARGVLTQTLGPWRRPVAYLSKKLDPVASGWPTCLKAIAAVALLLKDADKLTLGQNVLVIAPHNLESIVRQPPDRWMTNARMTHYQSLLLNERVSFAPPAILNPATLLPVESDDTPIHICSEILAEETGTRPDLRDQPLPGVPAWYTDGSSFIMDGRRQAGAAIVDNKRTVWASNLPEGTSAQKAELIALTQALRLAEGKSINIYTDSRYAFATAHVHGAIYKQRGWLTSAGKDIKNKEEILALLEAIHLPKRVAIIHCPGHQRGTDPVATGNRKADEAAKQAAQSTRILTETTKNAGKRTADGSEFEKRTADGSEFESPKKKAKVE

SEQ ID NO: 1811 - protein, 2213 aa, synthetic construct
MPAAKRVKLDGGDKKYSIGLDIGTNSVGWAVITDEYKVPSKKFKVLGNTDRHSIKKNLIGALLFDSGETAEATRLKRTARRRYTRRKNRICYLQEIFSNEMAKVDDSFFHRLEESFLVEEDKKHERHPIFGNIVDEVAYHEKYPTIYHLRKKLVDSTDKADLRLIYLALAHMIKFRGHFLIEGDLNPDNSDVDKLFIQLVQTYNQLFEENPINASGVDAKAILSARLSKSRRLENLIAQLPGEKKNGLFGNLIALSLGLTPNFKSNFDLAEDAKLQLSKDTYDDDLDNLLAQIGDQYADLFLAAKNLSDAILLSDILRVNTEITKAPLSASMIKRYDEHHQDLTLLKALVRQQLPEKYKEIFFDQSKNGYAGYIDGGASQEEFYKFIKPILEKMDGTEELLVKLNREDLLRKQRTFDNGSIPHQIHLGELHAILRRQEDFYPFLKDNREKIEKILTFRIPYYVGPLARGNSRFAWMTRKSEETITPWNFEEVVDKGASAQSFIERMTNFDKNLPNEKVLPKHSLLYEYFTVYNELTKVKYVTEGMRKPAFLSGEQKKAIVDLLFKTNRKVTVKQLKEDYFKKIECFDSVEISGVEDRFNASLGTYHDLLKIIKDKDFLDNEENEDILEDIVLTLTLFEDREMIEERLKTYAHLFDDKVMKQLKRRRYTGWGRLSRKLINGIRDKQSGKTILDFLKSDGFANRNFMQLIHDDSLTFKEDIQKAQVSGQGDSLHEHIANLAGSPAIKKGILQTVKVVDELVKVMGRHKPENIVIEMARENQTTQKGQKNSRERMKRIEEGIKELGSQILKEHPVENTQLQNEKLYLYYLQNGRDMYVDQELDINRLSDYDVDHIVPQSFLKDDSIDNKVLTRSDKARGKSDNVPSEEVVKKMKNYWRQLLNAKLITQRKFDNLTKAERGGLSELDKAGFIKRQLVETRQITKHVAQILDSRMNTKYDENDKLIREVKVITLKSKLVSDFRKDFQFYKVREINNYHHAHDAYLNAVVGTALIKKYPKLESEFVYGDYKVYDVRKMIAKSEQEIGKATAKYFFYSNIMNFFKTEITLANGEIRKRPLIETNGETGEIVWDKGRDFATVRKVLSMPQVNIVKKTEVQTGGFSKESILPKRNSDKLIARKKDWDPKKYGGFDSPTVAYSVLVVAKVEKGKSKKLKSVKELLGITIMERSSFEKNPIDFLEAKGYKEVKKDLIIKLPKYSLFELENGRKRMLASAGELQKGNELALPSKYVNFLYLASHYEKLKGSPEDNEQKQLFVEQHKHYLDEIIEQISEFSKRVILADANLDKVLSAYNKHRDKPIREQAENIIHLFTLTNLGAPAAFKYFDTTIDRKRYTSTKEVLDATLIHQSITGLYETRIDLSQLGGDGGPAPGGSGGTLGDQGSRGSDPLPEPRVTLTVEGIPTEFLVNTGAEHSVLTKPMGKMGSKRTVVAGATGSKVYPWTTKRLLKIGQKQVTHSFLVIPECPAPLLGRDLLTKLKAQIQFSTEGPQVTWEDRPAMCLVLNLEEEYRLHEKPVPPSIDPSWLQLFPMVWAEKAGMGLANQVPPVVVELKSDASPVAVRQYPMSKEAREGIRPHIQRFLDLGILVPCQSPWNTPLLPVKKPGTNDYRPVQDLREVNKRVQDIHPTVPNPYNLLSSLPPSHTWYSVLDLKDAFFCLKLHPNSQPLFAFEWRDPEKGNTGQLTWTRLPQGFKNSPTLFNEALHRDLASFRALNPQVVMLQYVDDLLVAAPTYRDCKEGTRRLLQELSKLGYRVSAKKAQLCREEVTYLGYLLKGGKRWLTPARKATVMKIPTPTTPRQVREFLGKAGFCRLFIPGFASLAAPLYPLTRPKVPFTWTEAHQEAFGRIKEALLSAPALALPDLTKPFALYVDEKEGVARGVLTQTLGPWRRPVAYLSKKLDPVASGWPTCLKAIAAVALLLKDADKLTLGQNVLVIAPHNLESIVRQPPDRWMTNARMTHYQSLLLNERVSFAPPAILNPATLLPVESDDTPIHICSEILAEETGTRPDLRDQPLPGVPAWYTDGSSFIMDGRRQAGAAIVDNKRTVWASNLPEGTSAQKAELIALTQALRLAEGKSINIYTDSRYAFATAHVHGAIYKQRGWLTSAGKDIKNKEEILALLEAIHLPKRVAIIHCPGHQRGTDPVATGNRKADEAAKQAAQSTRILTETTKNAGKRTADGSEFEKRTADGSEFESPKKKAKVE

SEQ ID NO: 1812 - protein, 2218 aa, synthetic construct
MPAAKRVKLDGGDKKYSIGLDIGTNSVGWAVITDEYKVPSKKFKVLGNTDRHSIKKNLIGALLFDSGETAEATRLKRTARRRYTRRKNRICYLQEIFSNEMAKVDDSFFHRLEESFLVEEDKKHERHPIFGNIVDEVAYHEKYPTIYHLRKKLVDSTDKADLRLIYLALAHMIKFRGHFLIEGDLNPDNSDVDKLFIQLVQTYNQLFEENPINASGVDAKAILSARLSKSRRLENLIAQLPGEKKNGLFGNLIALSLGLTPNFKSNFDLAEDAKLQLSKDTYDDDLDNLLAQIGDQYADLFLAAKNLSDAILLSDILRVNTEITKAPLSASMIKRYDEHHQDLTLLKALVRQQLPEKYKEIFFDQSKNGYAGYIDGGASQEEFYKFIKPILEKMDGTEELLVKLNREDLLRKQRTFDNGSIPHQIHLGELHAILRRQEDFYPFLKDNREKIEKILTFRIPYYVGPLARGNSRFAWMTRKSEETITPWNFEEVVDKGASAQSFIERMTNFDKNLPNEKVLPKHSLLYEYFTVYNELTKVKYVTEGMRKPAFLSGEQKKAIVDLLFKTNRKVTVKQLKEDYFKKIECFDSVEISGVEDRFNASLGTYHDLLKIIKDKDFLDNEENEDILEDIVLTLTLFEDREMIEERLKTYAHLFDDKVMKQLKRRRYTGWGRLSRKLINGIRDKQSGKTILDFLKSDGFANRNFMQLIHDDSLTFKEDIQKAQVSGQGDSLHEHIANLAGSPAIKKGILQTVKVVDELVKVMGRHKPENIVIEMARENQTTQKGQKNSRERMKRIEEGIKELGSQILKEHPVENTQLQNEKLYLYYLQNGRDMYVDQELDINRLSDYDVDHIVPQSFLKDDSIDNKVLTRSDKARGKSDNVPSEEVVKKMKNYWRQLLNAKLITQRKFDNLTKAERGGLSELDKAGFIKRQLVETRQITKHVAQILDSRMNTKYDENDKLIREVKVITLKSKLVSDFRKDFQFYKVREINNYHHAHDAYLNAVVGTALIKKYPKLESEFVYGDYKVYDVRKMIAKSEQEIGKATAKYFFYSNIMNFFKTEITLANGEIRKRPLIETNGETGEIVWDKGRDFATVRKVLSMPQVNIVKKTEVQTGGFSKESILPKRNSDKLIARKKDWDPKKYGGFDSPTVAYSVLVVAKVEKGKSKKLKSVKELLGITIMERSSFEKNPIDFLEAKGYKEVKKDLIIKLPKYSLFELENGRKRMLASAGELQKGNELALPSKYVNFLYLASHYEKLKGSPEDNEQKQLFVEQHKHYLDEIIEQISEFSKRVILADANLDKVLSAYNKHRDKPIREQAENIIHLFTLTNLGAPAAFKYFDTTIDRKRYTSTKEVLDATLIHQSITGLYETRIDLSQLGGDGGGGGPAPEAAAKGGTLGDQGSRGSDPLPEPRVTLTVEGIPTEFLVNTGAEHSVLTKPMGKMGSKRTVVAGATGSKVYPWTTKRLLKIGQKQVTHSFLVIPECPAPLLGRDLLTKLKAQIQFSTEGPQVTWEDRPAMCLVLNLEEEYRLHEKPVPPSIDPSWLQLFPMVWAEKAGMGLANQVPPVVVELKSDASPVAVRQYPMSKEAREGIRPHIQRFLDLGILVPCQSPWNTPLLPVKKPGTNDYRPVQDLREVNKRVQDIHPTVPNPYNLLSSLPPSHTWYSVLDLKDAFFCLKLHPNSQPLFAFEWRDPEKGNTGQLTWTRLPQGFKNSPTLFNEALHRDLASFRALNPQVVMLQYVDDLLVAAPTYRDCKEGTRRLLQELSKLGYRVSAKKAQLCREEVTYLGYLLKGGKRWLTPARKATVMKIPTPTTPRQVREFLGKAGFCRLFIPGFASLAAPLYPLTRPKVPFTWTEAHQEAFGRIKEALLSAPALALPDLTKPFALYVDEKEGVARGVLTQTLGPWRRPVAYLSKKLDPVASGWPTCLKAIAAVALLLKDADKLTLGQNVLVIAPHNLESIVRQPPDRWMTNARMTHYQSLLLNERVSFAPPAILNPATLLPVESDDTPIHICSEILAEETGTRPDLRDQPLPGVPAWYTDGSSFIMDGRRQAGAAIVDNKRTVWASNLPEGTSAQKAELIALTQALRLAEGKSINIYTDSRYAFATAHVHGAIYKQRGWLTSAGKDIKNKEEILALLEAIHLPKRVAIIHCPGHQRGTDPVATGNRKADEAAKQAAQSTRILTETTKNAGKRTADGSEFEKRTADGSEFESPKKKAKVE

SEQ ID NO: 1813 - protein, 2222 aa, synthetic construct
MPAAKRVKLDGGDKKYSIGLDIGTNSVGWAVITDEYKVPSKKFKVLGNTDRHSIKKNLIGALLFDSGETAEATRLKRTARRRYTRRKNRICYLQEIFSNEMAKVDDSFFHRLEESFLVEEDKKHERHPIFGNIVDEVAYHEKYPTIYHLRKKLVDSTDKADLRLIYLALAHMIKFRGHFLIEGDLNPDNSDVDKLFIQLVQTYNQLFEENPINASGVDAKAILSARLSKSRRLENLIAQLPGEKKNGLFGNLIALSLGLTPNFKSNFDLAEDAKLQLSKDTYDDDLDNLLAQIGDQYADLFLAAKNLSDAILLSDILRVNTEITKAPLSASMIKRYDEHHQDLTLLKALVRQQLPEKYKEIFFDQSKNGYAGYIDGGASQEEFYKFIKPILEKMDGTEELLVKLNREDLLRKQRTFDNGSIPHQIHLGELHAILRRQEDFYPFLKDNREKIEKILTFRIPYYVGPLARGNSRFAWMTRKSEETITPWNFEEVVDKGASAQSFIERMTNFDKNLPNEKVLPKHSLLYEYFTVYNELTKVKYVTEGMRKPAFLSGEQKKAIVDLLFKTNRKVTVKQLKEDYFKKIECFDSVEISGVEDRFNASLGTYHDLLKIIKDKDFLDNEENEDILEDIVLTLTLFEDREMIEERLKTYAHLFDDKVMKQLKRRRYTGWGRLSRKLINGIRDKQSGKTILDFLKSDGFANRNFMQLIHDDSLTFKEDIQKAQVSGQGDSLHEHIANLAGSPAIKKGILQTVKVVDELVKVMGRHKPENIVIEMARENQTTQKGQKNSRERMKRIEEGIKELGSQILKEHPVENTQLQNEKLYLYYLQNGRDMYVDQELDINRLSDYDVDHIVPQSFLKDDSIDNKVLTRSDKARGKSDNVPSEEVVKKMKNYWRQLLNAKLITQRKFDNLTKAERGGLSELDKAGFIKRQLVETRQITKHVAQILDSRMNTKYDENDKLIREVKVITLKSKLVSDFRKDFQFYKVREINNYHHAHDAYLNAVVGTALIKKYPKLESEFVYGDYKVYDVRKMIAKSEQEIGKATAKYFFYSNIMNFFKTEITLANGEIRKRPLIETNGETGEIVWDKGRDFATVRKVLSMPQVNIVKKTEVQTGGFSKESILPKRNSDKLIARKKDWDPKKYGGFDSPTVAYSVLVVAKVEKGKSKKLKSVKELLGITIMERSSFEKNPIDFLEAKGYKEVKKDLIIKLPKYSLFELENGRKRMLASAGELQKGNELALPSKYVNFLYLASHYEKLKGSPEDNEQKQLFVEQHKHYLDEIIEQISEFSKRVILADANLDKVLSAYNKHRDKPIREQAENIIHLFTLTNLGAPAAFKYFDTTIDRKRYTSTKEVLDATLIHQSITGLYETRIDLSQLGGDGGGSSGSSGSSGSSGSSGGTLGDQGSRGSDPLPEPRVTLTVEGIPTEFLVNTGAEHSVLTKPMGKMGSKRTVVAGATGSKVYPWTTKRLLKIGQKQVTHSFLVIPECPAPLLGRDLLTKLKAQIQFSTEGPQVTWEDRPAMCLVLNLEEEYRLHEKPVPPSIDPSWLQLFPMVWAEKAGMGLANQVPPVVVELKSDASPVAVRQYPMSKEAREGIRPHIQRFLDLGILVPCQSPWNTPLLPVKKPGTNDYRPVQDLREVNKRVQDIHPTVPNPYNLLSSLPPSHTWYSVLDLKDAFFCLKLHPNSQPLFAFEWRDPEKGNTGQLTWTRLPQGFKNSPTLFNEALHRDLASFRALNPQVVMLQYVDDLLVAAPTYRDCKEGTRRLLQELSKLGYRVSAKKAQLCREEVTYLGYLLKGGKRWLTPARKATVMKIPTPTTPRQVREFLGKAGFCRLFIPGFASLAAPLYPLTRPKVPFTWTEAHQEAFGRIKEALLSAPALALPDLTKPFALYVDEKEGVARGVLTQTLGPWRRPVAYLSKKLDPVASGWPTCLKAIAAVALLLKDADKLTLGQNVLVIAPHNLESIVRQPPDRWMTNARMTHYQSLLLNERVSFAPPAILNPATLLPVESDDTPIHICSEILAEETGTRPDLRDQPLPGVPAWYTDGSSFIMDGRRQAGAAIVDNKRTVWASNLPEGTSAQKAELIALTQALRLAEGKSINIYTDSRYAFATAHVHGAIYKQRGWLTSAGKDIKNKEEILALLEAIHLPKRVAIIHCPGHQRGTDPVATGNRKADEAAKQAAQSTRILTETTKNAGKRTADGSEFEKRTADGSEFESPKKKAKVE

SEQ ID NO: 1814 - protein, 2216 aa, synthetic construct
MPAAKRVKLDGGDKKYSIGLDIGTNSVGWAVITDEYKVPSKKFKVLGNTDRHSIKKNLIGALLFDSGETAEATRLKRTARRRYTRRKNRICYLQEIFSNEMAKVDDSFFHRLEESFLVEEDKKHERHPIFGNIVDEVAYHEKYPTIYHLRKKLVDSTDKADLRLIYLALAHMIKFRGHFLIEGDLNPDNSDVDKLFIQLVQTYNQLFEENPINASGVDAKAILSARLSKSRRLENLIAQLPGEKKNGLFGNLIALSLGLTPNFKSNFDLAEDAKLQLSKDTYDDDLDNLLAQIGDQYADLFLAAKNLSDAILLSDILRVNTEITKAPLSASMIKRYDEHHQDLTLLKALVRQQLPEKYKEIFFDQSKNGYAGYIDGGASQEEFYKFIKPILEKMDGTEELLVKLNREDLLRKQRTFDNGSIPHQIHLGELHAILRRQEDFYPFLKDNREKIEKILTFRIPYYVGPLARGNSRFAWMTRKSEETITPWNFEEVVDKGASAQSFIERMTNFDKNLPNEKVLPKHSLLYEYFTVYNELTKVKYVTEGMRKPAFLSGEQKKAIVDLLFKTNRKVTVKQLKEDYFKKIECFDSVEISGVEDRFNASLGTYHDLLKIIKDKDFLDNEENEDILEDIVLTLTLFEDREMIEERLKTYAHLFDDKVMKQLKRRRYTGWGRLSRKLINGIRDKQSGKTILDFLKSDGFANRNFMQLIHDDSLTFKEDIQKAQVSGQGDSLHEHIANLAGSPAIKKGILQTVKVVDELVKVMGRHKPENIVIEMARENQTTQKGQKNSRERMKRIEEGIKELGSQILKEHPVENTQLQNEKLYLYYLQNGRDMYVDQELDINRLSDYDVDHIVPQSFLKDDSIDNKVLTRSDKARGKSDNVPSEEVVKKMKNYWRQLLNAKLITQRKFDNLTKAERGGLSELDKAGFIKRQLVETRQITKHVAQILDSRMNTKYDENDKLIREVKVITLKSKLVSDFRKDFQFYKVREINNYHHAHDAYLNAVVGTALIKKYPKLESEFVYGDYKVYDVRKMIAKSEQEIGKATAKYFFYSNIMNFFKTEITLANGEIRKRPLIETNGETGEIVWDKGRDFATVRKVLSMPQVNIVKKTEVQTGGFSKESILPKRNSDKLIARKKDWDPKKYGGFDSPTVAYSVLVVAKVEKGKSKKLKSVKELLGITIMERSSFEKNPIDFLEAKGYKEVKKDLIIKLPKYSLFELENGRKRMLASAGELQKGNELALPSKYVNFLYLASHYEKLKGSPEDNEQKQLFVEQHKHYLDEIIEQISEFSKRVILADANLDKVLSAYNKHRDKPIREQAENIIHLFTLTNLGAPAAFKYFDTTIDRKRYTSTKEVLDATLIHQSITGLYETRIDLSQLGGDGGGSSGSSGSSGGTLGDQGSRGSDPLPEPRVTLTVEGIPTEFLVNTGAEHSVLTKPMGKMGSKRTVVAGATGSKVYPWTTKRLLKIGQKQVTHSFLVIPECPAPLLGRDLLTKLKAQIQFSTEGPQVTWEDRPAMCLVLNLEEEYRLHEKPVPPSIDPSWLQLFPMVWAEKAGMGLANQVPPVVVELKSDASPVAVRQYPMSKEAREGIRPHIQRFLDLGILVPCQSPWNTPLLPVKKPGTNDYRPVQDLREVNKRVQDIHPTVPNPYNLLSSLPPSHTWYSVLDLKDAFFCLKLHPNSQPLFAFEWRDPEKGNTGQLTWTRLPQGFKNSPTLFNEALHRDLASFRALNPQVVMLQYVDDLLVAAPTYRDCKEGTRRLLQELSKLGYRVSAKKAQLCREEVTYLGYLLKGGKRWLTPARKATVMKIPTPTTPRQVREFLGKAGFCRLFIPGFASLAAPLYPLTRPKVPFTWTEAHQEAFGRIKEALLSAPALALPDLTKPFALYVDEKEGVARGVLTQTLGPWRRPVAYLSKKLDPVASGWPTCLKAIAAVALLLKDADKLTLGQNVLVIAPHNLESIVRQPPDRWMTNARMTHYQSLLLNERVSFAPPAILNPATLLPVESDDTPIHICSEILAEETGTRPDLRDQPLPGVPAWYTDGSSFIMDGRRQAGAAIVDNKRTVWASNLPEGTSAQKAELIALTQALRLAEGKSINIYTDSRYAFATAHVHGAIYKQRGWLTSAGKDIKNKEEILALLEAIHLPKRVAIIHCPGHQRGTDPVATGNRKADEAAKQAAQSTRILTETTKNAGKRTADGSEFEKRTADGSEFESPKKKAKVE

SEQ ID NO: 1815 - protein, 2213 aa, synthetic construct
MPAAKRVKLDGGDKKYSIGLDIGTNSVGWAVITDEYKVPSKKFKVLGNTDRHSIKKNLIGALLFDSGETAEATRLKRTARRRYTRRKNRICYLQEIFSNEMAKVDDSFFHRLEESFLVEEDKKHERHPIFGNIVDEVAYHEKYPTIYHLRKKLVDSTDKADLRLIYLALAHMIKFRGHFLIEGDLNPDNSDVDKLFIQLVQTYNQLFEENPINASGVDAKAILSARLSKSRRLENLIAQLPGEKKNGLFGNLIALSLGLTPNFKSNFDLAEDAKLQLSKDTYDDDLDNLLAQIGDQYADLFLAAKNLSDAILLSDILRVNTEITKAPLSASMIKRYDEHHQDLTLLKALVRQQLPEKYKEIFFDQSKNGYAGYIDGGASQEEFYKFIKPILEKMDGTEELLVKLNREDLLRKQRTFDNGSIPHQIHLGELHAILRRQEDFYPFLKDNREKIEKILTFRIPYYVGPLARGNSRFAWMTRKSEETITPWNFEEVVDKGASAQSFIERMTNFDKNLPNEKVLPKHSLLYEYFTVYNELTKVKYVTEGMRKPAFLSGEQKKAIVDLLFKTNRKVTVKQLKEDYFKKIECFDSVEISGVEDRFNASLGTYHDLLKIIKDKDFLDNEENEDILEDIVLTLTLFEDREMIEERLKTYAHLFDDKVMKQLKRRRYTGWGRLSRKLINGIRDKQSGKTILDFLKSDGFANRNFMQLIHDDSLTFKEDIQKAQVSGQGDSLHEHIANLAGSPAIKKGILQTVKVVDELVKVMGRHKPENIVIEMARENQTTQKGQKNSRERMKRIEEGIKELGSQILKEHPVENTQLQNEKLYLYYLQNGRDMYVDQELDINRLSDYDVDHIVPQSFLKDDSIDNKVLTRSDKARGKSDNVPSEEVVKKMKNYWRQLLNAKLITQRKFDNLTKAERGGLSELDKAGFIKRQLVETRQITKHVAQILDSRMNTKYDENDKLIREVKVITLKSKLVSDFRKDFQFYKVREINNYHHAHDAYLNAVVGTALIKKYPKLESEFVYGDYKVYDVRKMIAKSEQEIGKATAKYFFYSNIMNFFKTEITLANGEIRKRPLIETNGETGEIVWDKGRDFATVRKVLSMPQVNIVKKTEVQTGGFSKESILPKRNSDKLIARKKDWDPKKYGGFDSPTVAYSVLVVAKVEKGKSKKLKSVKELLGITIMERSSFEKNPIDFLEAKGYKEVKKDLIIKLPKYSLFELENGRKRMLASAGELQKGNELALPSKYVNFLYLASHYEKLKGSPEDNEQKQLFVEQHKHYLDEIIEQISEFSKRVILADANLDKVLSAYNKHRDKPIREQAENIIHLFTLTNLGAPAAFKYFDTTIDRKRYTSTKEVLDATLIHQSITGLYETRIDLSQLGGDGGGSSPAPGGTLGDQGSRGSDPLPEPRVTLTVEGIPTEFLVNTGAEHSVLTKPMGKMGSKRTVVAGATGSKVYPWTTKRLLKIGQKQVTHSFLVIPECPAPLLGRDLLTKLKAQIQFSTEGPQVTWEDRPAMCLVLNLEEEYRLHEKPVPPSIDPSWLQLFPMVWAEKAGMGLANQVPPVVVELKSDASPVAVRQYPMSKEAREGIRPHIQRFLDLGILVPCQSPWNTPLLPVKKPGTNDYRPVQDLREVNKRVQDIHPTVPNPYNLLSSLPPSHTWYSVLDLKDAFFCLKLHPNSQPLFAFEWRDPEKGNTGQLTWTRLPQGFKNSPTLFNEALHRDLASFRALNPQVVMLQYVDDLLVAAPTYRDCKEGTRRLLQELSKLGYRVSAKKAQLCREEVTYLGYLLKGGKRWLTPARKATVMKIPTPTTPRQVREFLGKAGFCRLFIPGFASLAAPLYPLTRPKVPFTWTEAHQEAFGRIKEALLSAPALALPDLTKPFALYVDEKEGVARGVLTQTLGPWRRPVAYLSKKLDPVASGWPTCLKAIAAVALLLKDADKLTLGQNVLVIAPHNLESIVRQPPDRWMTNARMTHYQSLLLNERVSFAPPAILNPATLLPVESDDTPIHICSEILAEETGTRPDLRDQPLPGVPAWYTDGSSFIMDGRRQAGAAIVDNKRTVWASNLPEGTSAQKAELIALTQALRLAEGKSINIYTDSRYAFATAHVHGAIYKQRGWLTSAGKDIKNKEEILALLEAIHLPKRVAIIHCPGHQRGTDPVATGNRKADEAAKQAAQSTRILTETTKNAGKRTADGSEFEKRTADGSEFESPKKKAKVE

SEQ ID NO: 1816 - protein, 2218 aa, synthetic construct
MPAAKRVKLDGGDKKYSIGLDIGTNSVGWAVITDEYKVPSKKFKVLGNTDRHSIKKNLIGALLFDSGETAEATRLKRTARRRYTRRKNRICYLQEIFSNEMAKVDDSFFHRLEESFLVEEDKKHERHPIFGNIVDEVAYHEKYPTIYHLRKKLVDSTDKADLRLIYLALAHMIKFRGHFLIEGDLNPDNSDVDKLFIQLVQTYNQLFEENPINASGVDAKAILSARLSKSRRLENLIAQLPGEKKNGLFGNLIALSLGLTPNFKSNFDLAEDAKLQLSKDTYDDDLDNLLAQIGDQYADLFLAAKNLSDAILLSDILRVNTEITKAPLSASMIKRYDEHHQDLTLLKALVRQQLPEKYKEIFFDQSKNGYAGYIDGGASQEEFYKFIKPILEKMDGTEELLVKLNREDLLRKQRTFDNGSIPHQIHLGELHAILRRQEDFYPFLKDNREKIEKILTFRIPYYVGPLARGNSRFAWMTRKSEETITPWNFEEVVDKGASAQSFIERMTNFDKNLPNEKVLPKHSLLYEYFTVYNELTKVKYVTEGMRKPAFLSGEQKKAIVDLLFKTNRKVTVKQLKEDYFKKIECFDSVEISGVEDRFNASLGTYHDLLKIIKDKDFLDNEENEDILEDIVLTLTLFEDREMIEERLKTYAHLFDDKVMKQLKRRRYTGWGRLSRKLINGIRDKQSGKTILDFLKSDGFANRNFMQLIHDDSLTFKEDIQKAQVSGQGDSLHEHIANLAGSPAIKKGILQTVKVVDELVKVMGRHKPENIVIEMARENQTTQKGQKNSRERMKRIEEGIKELGSQILKEHPVENTQLQNEKLYLYYLQNGRDMYVDQELDINRLSDYDVDHIVPQSFLKDDSIDNKVLTRSDKARGKSDNVPSEEVVKKMKNYWRQLLNAKLITQRKFDNLTKAERGGLSELDKAGFIKRQLVETRQITKHVAQILDSRMNTKYDENDKLIREVKVITLKSKLVSDFRKDFQFYKVREINNYHHAHDAYLNAVVGTALIKKYPKLESEFVYGDYKVYDVRKMIAKSEQEIGKATAKYFFYSNIMNFFKTEITLANGEIRKRPLIETNGETGEIVWDKGRDFATVRKVLSMPQVNIVKKTEVQTGGFSKESILPKRNSDKLIARKKDWDPKKYGGFDSPTVAYSVLVVAKVEKGKSKKLKSVKELLGITIMERSSFEKNPIDFLEAKGYKEVKKDLIIKLPKYSLFELENGRKRMLASAGELQKGNELALPSKYVNFLYLASHYEKLKGSPEDNEQKQLFVEQHKHYLDEIIEQISEFSKRVILADANLDKVLSAYNKHRDKPIREQAENIIHLFTLTNLGAPAAFKYFDTTIDRKRYTSTKEVLDATLIHQSITGLYETRIDLSQLGGDGGPAPEAAAKGSSGGTLGDQGSRGSDPLPEPRVTLTVEGIPTEFLVNTGAEHSVLTKPMGKMGSKRTVVAGATGSKVYPWTTKRLLKIGQKQVTHSFLVIPECPAPLLGRDLLTKLKAQIQFSTEGPQVTWEDRPAMCLVLNLEEEYRLHEKPVPPSIDPSWLQLFPMVWAEKAGMGLANQVPPVVVELKSDASPVAVRQYPMSKEAREGIRPHIQRFLDLGILVPCQSPWNTPLLPVKKPGTNDYRPVQDLREVNKRVQDIHPTVPNPYNLLSSLPPSHTWYSVLDLKDAFFCLKLHPNSQPLFAFEWRDPEKGNTGQLTWTRLPQGFKNSPTLFNEALHRDLASFRALNPQVVMLQYVDDLLVAAPTYRDCKEGTRRLLQELSKLGYRVSAKKAQLCREEVTYLGYLLKGGKRWLTPARKATVMKIPTPTTPRQVREFLGKAGFCRLFIPGFASLAAPLYPLTRPKVPFTWTEAHQEAFGRIKEALLSAPALALPDLTKPFALYVDEKEGVARGVLTQTLGPWRRPVAYLSKKLDPVASGWPTCLKAIAAVALLLKDADKLTLGQNVLVIAPHNLESIVRQPPDRWMTNARMTHYQSLLLNERVSFAPPAILNPATLLPVESDDTPIHICSEILAEETGTRPDLRDQPLPGVPAWYTDGSSFIMDGRRQAGAAIVDNKRTVWASNLPEGTSAQKAELIALTQALRLAEGKSINIYTDSRYAFATAHVHGAIYKQRGWLTSAGKDIKNKEEILALLEAIHLPKRVAIIHCPGHQRGTDPVATGNRKADEAAKQAAQSTRILTETTKNAGKRTADGSEFEKRTADGSEFESPKKKAKVE

SEQ ID NO: 1817 - protein, 2218 aa, synthetic construct
MPAAKRVKLDGGDKKYSIGLDIGTNSVGWAVITDEYKVPSKKFKVLGNTDRHSIKKNLIGALLFDSGETAEATRLKRTARRRYTRRKNRICYLQEIFSNEMAKVDDSFFHRLEESFLVEEDKKHERHPIFGNIVDEVAYHEKYPTIYHLRKKLVDSTDKADLRLIYLALAHMIKFRGHFLIEGDLNPDNSDVDKLFIQLVQTYNQLFEENPINASGVDAKAILSARLSKSRRLENLIAQLPGEKKNGLFGNLIALSLGLTPNFKSNFDLAEDAKLQLSKDTYDDDLDNLLAQIGDQYADLFLAAKNLSDAILLSDILRVNTEITKAPLSASMIKRYDEHHQDLTLLKALVRQQLPEKYKEIFFDQSKNGYAGYIDGGASQEEFYKFIKPILEKMDGTEELLVKLNREDLLRKQRTFDNGSIPHQIHLGELHAILRRQEDFYPFLKDNREKIEKILTFRIPYYVGPLARGNSRFAWMTRKSEETITPWNFEEVVDKGASAQSFIERMTNFDKNLPNEKVLPKHSLLYEYFTVYNELTKVKYVTEGMRKPAFLSGEQKKAIVDLLFKTNRKVTVKQLKEDYFKKIECFDSVEISGVEDRFNASLGTYHDLLKIIKDKDFLDNEENEDILEDIVLTLTLFEDREMIEERLKTYAHLFDDKVMKQLKRRRYTGWGRLSRKLINGIRDKQSGKTILDFLKSDGFANRNFMQLIHDDSLTFKEDIQKAQVSGQGDSLHEHIANLAGSPAIKKGILQTVKVVDELVKVMGRHKPENIVIEMARENQTTQKGQKNSRERMKRIEEGIKELGSQILKEHPVENTQLQNEKLYLYYLQNGRDMYVDQELDINRLSDYDVDHIVPQSFLKDDSIDNKVLTRSDKARGKSDNVPSEEVVKKMKNYWRQLLNAKLITQRKFDNLTKAERGGLSELDKAGFIKRQLVETRQITKHVAQILDSRMNTKYDENDKLIREVKVITLKSKLVSDFRKDFQFYKVREINNYHHAHDAYLNAVVGTALIKKYPKLESEFVYGDYKVYDVRKMIAKSEQEIGKATAKYFFYSNIMNFFKTEITLANGEIRKRPLIETNGETGEIVWDKGRDFATVRKVLSMPQVNIVKKTEVQTGGFSKESILPKRNSDKLIARKKDWDPKKYGGFDSPTVAYSVLVVAKVEKGKSKKLKSVKELLGITIMERSSFEKNPIDFLEAKGYKEVKKDLIIKLPKYSLFELENGRKRMLASAGELQKGNELALPSKYVNFLYLASHYEKLKGSPEDNEQKQLFVEQHKHYLDEIIEQISEFSKRVILADANLDKVLSAYNKHRDKPIREQAENIIHLFTLTNLGAPAAFKYFDTTIDRKRYTSTKEVLDATLIHQSITGLYETRIDLSQLGGDGGGSSGGGEAAAKGGTLGDQGSRGSDPLPEPRVTLTVEGIPTEFLVNTGAEHSVLTKPMGKMGSKRTVVAGATGSKVYPWTTKRLLKIGQKQVTHSFLVIPECPAPLLGRDLLTKLKAQIQFSTEGPQVTWEDRPAMCLVLNLEEEYRLHEKPVPPSIDPSWLQLFPMVWAEKAGMGLANQVPPVVVELKSDASPVAVRQYPMSKEAREGIRPHIQRFLDLGILVPCQSPWNTPLLPVKKPGTNDYRPVQDLREVNKRVQDIHPTVPNPYNLLSSLPPSHTWYSVLDLKDAFFCLKLHPNSQPLFAFEWRDPEKGNTGQLTWTRLPQGFKNSPTLFNEALHRDLASFRALNPQVVMLQYVDDLLVAAPTYRDCKEGTRRLLQELSKLGYRVSAKKAQLCREEVTYLGYLLKGGKRWLTPARKATVMKIPTPTTPRQVREFLGKAGFCRLFIPGFASLAAPLYPLTRPKVPFTWTEAHQEAFGRIKEALLSAPALALPDLTKPFALYVDEKEGVARGVLTQTLGPWRRPVAYLSKKLDPVASGWPTCLKAIAAVALLLKDADKLTLGQNVLVIAPHNLESIVRQPPDRWMTNARMTHYQSLLLNERVSFAPPAILNPATLLPVESDDTPIHICSEILAEETGTRPDLRDQPLPGVPAWYTDGSSFIMDGRRQAGAAIVDNKRTVWASNLPEGTSAQKAELIALTQALRLAEGKSINIYTDSRYAFATAHVHGAIYKQRGWLTSAGKDIKNKEEILALLEAIHLPKRVAIIHCPGHQRGTDPVATGNRKADEAAKQAAQSTRILTETTKNAGKRTADGSEFEKRTADGSEFESPKKKAKVE

SEQ ID NO: 1818 - protein, 2216 aa, synthetic construct
MPAAKRVKLDGGDKKYSIGLDIGTNSVGWAVITDEYKVPSKKFKVLGNTDRHSIKKNLIGALLFDSGETAEATRLKRTARRRYTRRKNRICYLQEIFSNEMAKVDDSFFHRLEESFLVEEDKKHERHPIFGNIVDEVAYHEKYPTIYHLRKKLVDSTDKADLRLIYLALAHMIKFRGHFLIEGDLNPDNSDVDKLFIQLVQTYNQLFEENPINASGVDAKAILSARLSKSRRLENLIAQLPGEKKNGLFGNLIALSLGLTPNFKSNFDLAEDAKLQLSKDTYDDDLDNLLAQIGDQYADLFLAAKNLSDAILLSDILRVNTEITKAPLSASMIKRYDEHHQDLTLLKALVRQQLPEKYKEIFFDQSKNGYAGYIDGGASQEEFYKFIKPILEKMDGTEELLVKLNREDLLRKQRTFDNGSIPHQIHLGELHAILRRQEDFYPFLKDNREKIEKILTFRIPYYVGPLARGNSRFAWMTRKSEETITPWNFEEVVDKGASAQSFIERMTNFDKNLPNEKVLPKHSLLYEYFTVYNELTKVKYVTEGMRKPAFLSGEQKKAIVDLLFKTNRKVTVKQLKEDYFKKIECFDSVEISGVEDRFNASLGTYHDLLKIIKDKDFLDNEENEDILEDIVLTLTLFEDREMIEERLKTYAHLFDDKVMKQLKRRRYTGWGRLSRKLINGIRDKQSGKTILDFLKSDGFANRNFMQLIHDDSLTFKEDIQKAQVSGQGDSLHEHIANLAGSPAIKKGILQTVKVVDELVKVMGRHKPENIVIEMARENQTTQKGQKNSRERMKRIEEGIKELGSQILKEHPVENTQLQNEKLYLYYLQNGRDMYVDQELDINRLSDYDVDHIVPQSFLKDDSIDNKVLTRSDKARGKSDNVPSEEVVKKMKNYWRQLLNAKLITQRKFDNLTKAERGGLSELDKAGFIKRQLVETRQITKHVAQILDSRMNTKYDENDKLIREVKVITLKSKLVSDFRKDFQFYKVREINNYHHAHDAYLNAVVGTALIKKYPKLESEFVYGDYKVYDVRKMIAKSEQEIGKATAKYFFYSNIMNFFKTEITLANGEIRKRPLIETNGETGEIVWDKGRDFATVRKVLSMPQVNIVKKTEVQTGGFSKESILPKRNSDKLIARKKDWDPKKYGGFDSPTVAYSVLVVAKVEKGKSKKLKSVKELLGITIMERSSFEKNPIDFLEAKGYKEVKKDLIIKLPKYSLFELENGRKRMLASAGELQKGNELALPSKYVNFLYLASHYEKLKGSPEDNEQKQLFVEQHKHYLDEIIEQISEFSKRVILADANLDKVLSAYNKHRDKPIREQAENIIHLFTLTNLGAPAAFKYFDTTIDRKRYTSTKEVLDATLIHQSITGLYETRIDLSQLGGDGGGGGGSSPAPGGTLGDQGSRGSDPLPEPRVTLTVEGIPTEFLVNTGAEHSVLTKPMGKMGSKRTVVAGATGSKVYPWTTKRLLKIGQKQVTHSFLVIPECPAPLLGRDLLTKLKAQIQFSTEGPQVTWEDRPAMCLVLNLEEEYRLHEKPVPPSIDPSWLQLFPMVWAEKAGMGLANQVPPVVVELKSDASPVAVRQYPMSKEAREGIRPHIQRFLDLGILVPCQSPWNTPLLPVKKPGTNDYRPVQDLREVNKRVQDIHPTVPNPYNLLSSLPPSHTWYSVLDLKDAFFCLKLHPNSQPLFAFEWRDPEKGNTGQLTWTRLPQGFKNSPTLFNEALHRDLASFRALNPQVVMLQYVDDLLVAAPTYRDCKEGTRRLLQELSKLGYRVSAKKAQLCREEVTYLGYLLKGGKRWLTPARKATVMKIPTPTTPRQVREFLGKAGFCRLFIPGFASLAAPLYPLTRPKVPFTWTEAHQEAFGRIKEALLSAPALALPDLTKPFALYVDEKEGVARGVLTQTLGPWRRPVAYLSKKLDPVASGWPTCLKAIAAVALLLKDADKLTLGQNVLVIAPHNLESIVRQPPDRWMTNARMTHYQSLLLNERVSFAPPAILNPATLLPVESDDTPIHICSEILAEETGTRPDLRDQPLPGVPAWYTDGSSFIMDGRRQAGAAIVDNKRTVWASNLPEGTSAQKAELIALTQALRLAEGKSINIYTDSRYAFATAHVHGAIYKQRGWLTSAGKDIKNKEEILALLEAIHLPKRVAIIHCPGHQRGTDPVATGNRKADEAAKQAAQSTRILTETTKNAGKRTADGSEFEKRTADGSEFESPKKKAKVE

SEQ ID NO: 1819 - protein, 2216 aa, synthetic construct
MPAAKRVKLDGGDKKYSIGLDIGTNSVGWAVITDEYKVPSKKFKVLGNTDRHSIKKNLIGALLFDSGETAEATRLKRTARRRYTRRKNRICYLQEIFSNEMAKVDDSFFHRLEESFLVEEDKKHERHPIFGNIVDEVAYHEKYPTIYHLRKKLVDSTDKADLRLIYLALAHMIKFRGHFLIEGDLNPDNSDVDKLFIQLVQTYNQLFEENPINASGVDAKAILSARLSKSRRLENLIAQLPGEKKNGLFGNLIALSLGLTPNFKSNFDLAEDAKLQLSKDTYDDDLDNLLAQIGDQYADLFLAAKNLSDAILLSDILRVNTEITKAPLSASMIKRYDEHHQDLTLLKALVRQQLPEKYKEIFFDQSKNGYAGYIDGGASQEEFYKFIKPILEKMDGTEELLVKLNREDLLRKQRTFDNGSIPHQIHLGELHAILRRQEDFYPFLKDNREKIEKILTFRIPYYVGPLARGNSRFAWMTRKSEETITPWNFEEVVDKGASAQSFIERMTNFDKNLPNEKVLPKHSLLYEYFTVYNELTKVKYVTEGMRKPAFLSGEQKKAIVDLLFKTNRKVTVKQLKEDYFKKIECFDSVEISGVEDRFNASLGTYHDLLKIIKDKDFLDNEENEDILEDIVLTLTLFEDREMIEERLKTYAHLFDDKVMKQLKRRRYTGWGRLSRKLINGIRDKQSGKTILDFLKSDGFANRNFMQLIHDDSLTFKEDIQKAQVSGQGDSLHEHIANLAGSPAIKKGILQTVKVVDELVKVMGRHKPENIVIEMARENQTTQKGQKNSRERMKRIEEGIKELGSQILKEHPVENTQLQNEKLYLYYLQNGRDMYVDQELDINRLSDYDVDHIVPQSFLKDDSIDNKVLTRSDKARGKSDNVPSEEVVKKMKNYWRQLLNAKLITQRKFDNLTKAERGGLSELDKAGFIKRQLVETRQITKHVAQILDSRMNTKYDENDKLIREVKVITLKSKLVSDFRKDFQFYKVREINNYHHAHDAYLNAVVGTALIKKYPKLESEFVYGDYKVYDVRKMIAKSEQEIGKATAKYFFYSNIMNFFKTEITLANGEIRKRPLIETNGETGEIVWDKGRDFATVRKVLSMPQVNIVKKTEVQTGGFSKESILPKRNSDKLIARKKDWDPKKYGGFDSPTVAYSVLVVAKVEKGKSKKLKSVKELLGITIMERSSFEKNPIDFLEAKGYKEVKKDLIIKLPKYSLFELENGRKRMLASAGELQKGNELALPSKYVNFLYLASHYEKLKGSPEDNEQKQLFVEQHKHYLDEIIEQISEFSKRVILADANLDKVLSAYNKHRDKPIREQAENIIHLFTLTNLGAPAAFKYFDTTIDRKRYTSTKEVLDATLIHQSITGLYETRIDLSQLGGDGGGGSGGGGSSGGTLGDQGSRGSDPLPEPRVTLTVEGIPTEFLVNTGAEHSVLTKPMGKMGSKRTVVAGATGSKVYPWTTKRLLKIGQKQVTHSFLVIPECPAPLLGRDLLTKLKAQIQFSTEGPQVTWEDRPAMCLVLNLEEEYRLHEKPVPPSIDPSWLQLFPMVWAEKAGMGLANQVPPVVVELKSDASPVAVRQYPMSKEAREGIRPHIQRFLDLGILVPCQSPWNTPLLPVKKPGTNDYRPVQDLREVNKRVQDIHPTVPNPYNLLSSLPPSHTWYSVLDLKDAFFCLKLHPNSQPLFAFEWRDPEKGNTGQLTWTRLPQGFKNSPTLFNEALHRDLASFRALNPQVVMLQYVDDLLVAAPTYRDCKEGTRRLLQELSKLGYRVSAKKAQLCREEVTYLGYLLKGGKRWLTPARKATVMKIPTPTTPRQVREFLGKAGFCRLFIPGFASLAAPLYPLTRPKVPFTWTEAHQEAFGRIKEALLSAPALALPDLTKPFALYVDEKEGVARGVLTQTLGPWRRPVAYLSKKLDPVASGWPTCLKAIAAVALLLKDADKLTLGQNVLVIAPHNLESIVRQPPDRWMTNARMTHYQSLLLNERVSFAPPAILNPATLLPVESDDTPIHICSEILAEETGTRPDLRDQPLPGVPAWYTDGSSFIMDGRRQAGAAIVDNKRTVWASNLPEGTSAQKAELIALTQALRLAEGKSINIYTDSRYAFATAHVHGAIYKQRGWLTSAGKDIKNKEEILALLEAIHLPKRVAIIHCPGHQRGTDPVATGNRKADEAAKQAAQSTRILTETTKNAGKRTADGSEFEKRTADGSEFESPKKKAKVE

SEQ ID NO: 1820 - protein, 2215 aa, synthetic construct
MPAAKRVKLDGGDKKYSIGLDIGTNSVGWAVITDEYKVPSKKFKVLGNTDRHSIKKNLIGALLFDSGETAEATRLKRTARRRYTRRKNRICYLQEIFSNEMAKVDDSFFHRLEESFLVEEDKKHERHPIFGNIVDEVAYHEKYPTIYHLRKKLVDSTDKADLRLIYLALAHMIKFRGHFLIEGDLNPDNSDVDKLFIQLVQTYNQLFEENPINASGVDAKAILSARLSKSRRLENLIAQLPGEKKNGLFGNLIALSLGLTPNFKSNFDLAEDAKLQLSKDTYDDDLDNLLAQIGDQYADLFLAAKNLSDAILLSDILRVNTEITKAPLSASMIKRYDEHHQDLTLLKALVRQQLPEKYKEIFFDQSKNGYAGYIDGGASQEEFYKFIKPILEKMDGTEELLVKLNREDLLRKQRTFDNGSIPHQIHLGELHAILRRQEDFYPFLKDNREKIEKILTFRIPYYVGPLARGNSRFAWMTRKSEETITPWNFEEVVDKGASAQSFIERMTNFDKNLPNEKVLPKHSLLYEYFTVYNELTKVKYVTEGMRKPAFLSGEQKKAIVDLLFKTNRKVTVKQLKEDYFKKIECFDSVEISGVEDRFNASLGTYHDLLKIIKDKDFLDNEENEDILEDIVLTLTLFEDREMIEERLKTYAHLFDDKVMKQLKRRRYTGWGRLSRKLINGIRDKQSGKTILDFLKSDGFANRNFMQLIHDDSLTFKEDIQKAQVSGQGDSLHEHIANLAGSPAIKKGILQTVKVVDELVKVMGRHKPENIVIEMARENQTTQKGQKNSRERMKRIEEGIKELGSQILKEHPVENTQLQNEKLYLYYLQNGRDMYVDQELDINRLSDYDVDHIVPQSFLKDDSIDNKVLTRSDKARGKSDNVPSEEVVKKMKNYWRQLLNAKLITQRKFDNLTKAERGGLSELDKAGFIKRQLVETRQITKHVAQILDSRMNTKYDENDKLIREVKVITLKSKLVSDFRKDFQFYKVREINNYHHAHDAYLNAVVGTALIKKYPKLESEFVYGDYKVYDVRKMIAKSEQEIGKATAKYFFYSNIMNFFKTEITLANGEIRKRPLIETNGETGEIVWDKGRDFATVRKVLSMPQVNIVKKTEVQTGGFSKESILPKRNSDKLIARKKDWDPKKYGGFDSPTVAYSVLVVAKVEKGKSKKLKSVKELLGITIMERSSFEKNPIDFLEAKGYKEVKKDLIIKLPKYSLFELENGRKRMLASAGELQKGNELALPSKYVNFLYLASHYEKLKGSPEDNEQKQLFVEQHKHYLDEIIEQISEFSKRVILADANLDKVLSAYNKHRDKPIREQAENIIHLFTLTNLGAPAAFKYFDTTIDRKRYTSTKEVLDATLIHQSITGLYETRIDLSQLGGDGGEAAAKGGGGGTLGDQGSRGSDPLPEPRVTLTVEGIPTEFLVNTGAEHSVLTKPMGKMGSKRTVVAGATGSKVYPWTTKRLLKIGQKQVTHSFLVIPECPAPLLGRDLLTKLKAQIQFSTEGPQVTWEDRPAMCLVLNLEEEYRLHEKPVPPSIDPSWLQLFPMVWAEKAGMGLANQVPPVVVELKSDASPVAVRQYPMSKEAREGIRPHIQRFLDLGILVPCQSPWNTPLLPVKKPGTNDYRPVQDLREVNKRVQDIHPTVPNPYNLLSSLPPSHTWYSVLDLKDAFFCLKLHPNSQPLFAFEWRDPEKGNTGQLTWTRLPQGFKNSPTLFNEALHRDLASFRALNPQVVMLQYVDDLLVAAPTYRDCKEGTRRLLQELSKLGYRVSAKKAQLCREEVTYLGYLLKGGKRWLTPARKATVMKIPTPTTPRQVREFLGKAGFCRLFIPGFASLAAPLYPLTRPKVPFTWTEAHQEAFGRIKEALLSAPALALPDLTKPFALYVDEKEGVARGVLTQTLGPWRRPVAYLSKKLDPVASGWPTCLKAIAAVALLLKDADKLTLGQNVLVIAPHNLESIVRQPPDRWMTNARMTHYQSLLLNERVSFAPPAILNPATLLPVESDDTPIHICSEILAEETGTRPDLRDQPLPGVPAWYTDGSSFIMDGRRQAGAAIVDNKRTVWASNLPEGTSAQKAELIALTQALRLAEGKSINIYTDSRYAFATAHVHGAIYKQRGWLTSAGKDIKNKEEILALLEAIHLPKRVAIIHCPGHQRGTDPVATGNRKADEAAKQAAQSTRILTETTKNAGKRTADGSEFEKRTADGSEFESPKKKAKVE

SEQ ID NO: 1821 - protein, 2215 aa, synthetic construct
MPAAKRVKLDGGDKKYSIGLDIGTNSVGWAVITDEYKVPSKKFKVLGNTDRHSIKKNLIGALLFDSGETAEATRLKRTARRRYTRRKNRICYLQEIFSNEMAKVDDSFFHRLEESFLVEEDKKHERHPIFGNIVDEVAYHEKYPTIYHLRKKLVDSTDKADLRLIYLALAHMIKFRGHFLIEGDLNPDNSDVDKLFIQLVQTYNQLFEENPINASGVDAKAILSARLSKSRRLENLIAQLPGEKKNGLFGNLIALSLGLTPNFKSNFDLAEDAKLQLSKDTYDDDLDNLLAQIGDQYADLFLAAKNLSDAILLSDILRVNTEITKAPLSASMIKRYDEHHQDLTLLKALVRQQLPEKYKEIFFDQSKNGYAGYIDGGASQEEFYKFIKPILEKMDGTEELLVKLNREDLLRKQRTFDNGSIPHQIHLGELHAILRRQEDFYPFLKDNREKIEKILTFRIPYYVGPLARGNSRFAWMTRKSEETITPWNFEEVVDKGASAQSFIERMTNFDKNLPNEKVLPKHSLLYEYFTVYNELTKVKYVTEGMRKPAFLSGEQKKAIVDLLFKTNRKVTVKQLKEDYFKKIECFDSVEISGVEDRFNASLGTYHDLLKIIKDKDFLDNEENEDILEDIVLTLTLFEDREMIEERLKTYAHLFDDKVMKQLKRRRYTGWGRLSRKLINGIRDKQSGKTILDFLKSDGFANRNFMQLIHDDSLTFKEDIQKAQVSGQGDSLHEHIANLAGSPAIKKGILQTVKVVDELVKVMGRHKPENIVIEMARENQTTQKGQKNSRERMKRIEEGIKELGSQILKEHPVENTQLQNEKLYLYYLQNGRDMYVDQELDINRLSDYDVDHIVPQSFLKDDSIDNKVLTRSDKARGKSDNVPSEEVVKKMKNYWRQLLNAKLITQRKFDNLTKAERGGLSELDKAGFIKRQLVETRQITKHVAQILDSRMNTKYDENDKLIREVKVITLKSKLVSDFRKDFQFYKVREINNYHHAHDAYLNAVVGTALIKKYPKLESEFVYGDYKVYDVRKMIAKSEQEIGKATAKYFFYSNIMNFFKTEITLANGEIRKRPLIETNGETGEIVWDKGRDFATVRKVLSMPQVNIVKKTEVQTGGFSKESILPKRNSDKLIARKKDWDPKKYGGFDSPTVAYSVLVVAKVEKGKSKKLKSVKELLGITIMERSSFEKNPIDFLEAKGYKEVKKDLIIKLPKYSLFELENGRKRMLASAGELQKGNELALPSKYVNFLYLASHYEKLKGSPEDNEQKQLFVEQHKHYLDEIIEQISEFSKRVILADANLDKVLSAYNKHRDKPIREQAENIIHLFTLTNLGAPAAFKYFDTTIDRKRYTSTKEVLDATLIHQSITGLYETRIDLSQLGGDGGEAAAKGGSGGTLGDQGSRGSDPLPEPRVTLTVEGIPTEFLVNTGAEHSVLTKPMGKMGSKRTVVAGATGSKVYPWTTKRLLKIGQKQVTHSFLVIPECPAPLLGRDLLTKLKAQIQFSTEGPQVTWEDRPAMCLVLNLEEEYRLHEKPVPPSIDPSWLQLFPMVWAEKAGMGLANQVPPVVVELKSDASPVAVRQYPMSKEAREGIRPHIQRFLDLGILVPCQSPWNTPLLPVKKPGTNDYRPVQDLREVNKRVQDIHPTVPNPYNLLSSLPPSHTWYSVLDLKDAFFCLKLHPNSQPLFAFEWRDPEKGNTGQLTWTRLPQGFKNSPTLFNEALHRDLASFRALNPQVVMLQYVDDLLVAAPTYRDCKEGTRRLLQELSKLGYRVSAKKAQLCREEVTYLGYLLKGGKRWLTPARKATVMKIPTPTTPRQVREFLGKAGFCRLFIPGFASLAAPLYPLTRPKVPFTWTEAHQEAFGRIKEALLSAPALALPDLTKPFALYVDEKEGVARGVLTQTLGPWRRPVAYLSKKLDPVASGWPTCLKAIAAVALLLKDADKLTLGQNVLVIAPHNLESIVRQPPDRWMTNARMTHYQSLLLNERVSFAPPAILNPATLLPVESDDTPIHICSEILAEETGTRPDLRDQPLPGVPAWYTDGSSFIMDGRRQAGAAIVDNKRTVWASNLPEGTSAQKAELIALTQALRLAEGKSINIYTDSRYAFATAHVHGAIYKQRGWLTSAGKDIKNKEEILALLEAIHLPKRVAIIHCPGHQRGTDPVATGNRKADEAAKQAAQSTRILTETTKNAGKRTADGSEFEKRTADGSEFESPKKKAKVE

SEQ ID NO: 1822 - protein, 2218 aa, synthetic construct
MPAAKRVKLDGGDKKYSIGLDIGTNSVGWAVITDEYKVPSKKFKVLGNTDRHSIKKNLIGALLFDSGETAEATRLKRTARRRYTRRKNRICYLQEIFSNEMAKVDDSFFHRLEESFLVEEDKKHERHPIFGNIVDEVAYHEKYPTIYHLRKKLVDSTDKADLRLIYLALAHMIKFRGHFLIEGDLNPDNSDVDKLFIQLVQTYNQLFEENPINASGVDAKAILSARLSKSRRLENLIAQLPGEKKNGLFGNLIALSLGLTPNFKSNFDLAEDAKLQLSKDTYDDDLDNLLAQIGDQYADLFLAAKNLSDAILLSDILRVNTEITKAPLSASMIKRYDEHHQDLTLLKALVRQQLPEKYKEIFFDQSKNGYAGYIDGGASQEEFYKFIKPILEKMDGTEELLVKLNREDLLRKQRTFDNGSIPHQIHLGELHAILRRQEDFYPFLKDNREKIEKILTFRIPYYVGPLARGNSRFAWMTRKSEETITPWNFEEVVDKGASAQSFIERMTNFDKNLPNEKVLPKHSLLYEYFTVYNELTKVKYVTEGMRKPAFLSGEQKKAIVDLLFKTNRKVTVKQLKEDYFKKIECFDSVEISGVEDRFNASLGTYHDLLKIIKDKDFLDNEENEDILEDIVLTLTLFEDREMIEERLKTYAHLFDDKVMKQLKRRRYTGWGRLSRKLINGIRDKQSGKTILDFLKSDGFANRNFMQLIHDDSLTFKEDIQKAQVSGQGDSLHEHIANLAGSPAIKKGILQTVKVVDELVKVMGRHKPENIVIEMARENQTTQKGQKNSRERMKRIEEGIKELGSQILKEHPVENTQLQNEKLYLYYLQNGRDMYVDQELDINRLSDYDVDHIVPQSFLKDDSIDNKVLTRSDKARGKSDNVPSEEVVKKMKNYWRQLLNAKLITQRKFDNLTKAERGGLSELDKAGFIKRQLVETRQITKHVAQILDSRMNTKYDENDKLIREVKVITLKSKLVSDFRKDFQFYKVREINNYHHAHDAYLNAVVGTALIKKYPKLESEFVYGDYKVYDVRKMIAKSEQEIGKATAKYFFYSNIMNFFKTEITLANGEIRKRPLIETNGETGEIVWDKGRDFATVRKVLSMPQVNIVKKTEVQTGGFSKESILPKRNSDKLIARKKDWDPKKYGGFDSPTVAYSVLVVAKVEKGKSKKLKSVKELLGITIMERSSFEKNPIDFLEAKGYKEVKKDLIIKLPKYSLFELENGRKRMLASAGELQKGNELALPSKYVNFLYLASHYEKLKGSPEDNEQKQLFVEQHKHYLDEIIEQISEFSKRVILADANLDKVLSAYNKHRDKPIREQAENIIHLFTLTNLGAPAAFKYFDTTIDRKRYTSTKEVLDATLIHQSITGLYETRIDLSQLGGDGGEAAAKPAPGSSGGTLGDQGSRGSDPLPEPRVTLTVEGIPTEFLVNTGAEHSVLTKPMGKMGSKRTVVAGATGSKVYPWTTKRLLKIGQKQVTHSFLVIPECPAPLLGRDLLTKLKAQIQFSTEGPQVTWEDRPAMCLVLNLEEEYRLHEKPVPPSIDPSWLQLFPMVWAEKAGMGLANQVPPVVVELKSDASPVAVRQYPMSKEAREGIRPHIQRFLDLGILVPCQSPWNTPLLPVKKPGTNDYRPVQDLREVNKRVQDIHPTVPNPYNLLSSLPPSHTWYSVLDLKDAFFCLKLHPNSQPLFAFEWRDPEKGNTGQLTWTRLPQGFKNSPTLFNEALHRDLASFRALNPQVVMLQYVDDLLVAAPTYRDCKEGTRRLLQELSKLGYRVSAKKAQLCREEVTYLGYLLKGGKRWLTPARKATVMKIPTPTTPRQVREFLGKAGFCRLFIPGFASLAAPLYPLTRPKVPFTWTEAHQEAFGRIKEALLSAPALALPDLTKPFALYVDEKEGVARGVLTQTLGPWRRPVAYLSKKLDPVASGWPTCLKAIAAVALLLKDADKLTLGQNVLVIAPHNLESIVRQPPDRWMTNARMTHYQSLLLNERVSFAPPAILNPATLLPVESDDTPIHICSEILAEETGTRPDLRDQPLPGVPAWYTDGSSFIMDGRRQAGAAIVDNKRTVWASNLPEGTSAQKAELIALTQALRLAEGKSINIYTDSRYAFATAHVHGAIYKQRGWLTSAGKDIKNKEEILALLEAIHLPKRVAIIHCPGHQRGTDPVATGNRKADEAAKQAAQSTRILTETTKNAGKRTADGSEFEKRTADGSEFESPKKKAKVE

SEQ ID NO: 1823 - protein, 2218 aa, synthetic construct
MPAAKRVKLDGGDKKYSIGLDIGTNSVGWAVITDEYKVPSKKFKVLGNTDRHSIKKNLIGALLFDSGETAEATRLKRTARRRYTRRKNRICYLQEIFSNEMAKVDDSFFHRLEESFLVEEDKKHERHPIFGNIVDEVAYHEKYPTIYHLRKKLVDSTDKADLRLIYLALAHMIKFRGHFLIEGDLNPDNSDVDKLFIQLVQTYNQLFEENPINASGVDAKAILSARLSKSRRLENLIAQLPGEKKNGLFGNLIALSLGLTPNFKSNFDLAEDAKLQLSKDTYDDDLDNLLAQIGDQYADLFLAAKNLSDAILLSDILRVNTEITKAPLSASMIKRYDEHHQDLTLLKALVRQQLPEKYKEIFFDQSKNGYAGYIDGGASQEEFYKFIKPILEKMDGTEELLVKLNREDLLRKQRTFDNGSIPHQIHLGELHAILRRQEDFYPFLKDNREKIEKILTFRIPYYVGPLARGNSRFAWMTRKSEETITPWNFEEVVDKGASAQSFIERMTNFDKNLPNEKVLPKHSLLYEYFTVYNELTKVKYVTEGMRKPAFLSGEQKKAIVDLLFKTNRKVTVKQLKEDYFKKIECFDSVEISGVEDRFNASLGTYHDLLKIIKDKDFLDNEENEDILEDIVLTLTLFEDREMIEERLKTYAHLFDDKVMKQLKRRRYTGWGRLSRKLINGIRDKQSGKTILDFLKSDGFANRNFMQLIHDDSLTFKEDIQKAQVSGQGDSLHEHIANLAGSPAIKKGILQTVKVVDELVKVMGRHKPENIVIEMARENQTTQKGQKNSRERMKRIEEGIKELGSQILKEHPVENTQLQNEKLYLYYLQNGRDMYVDQELDINRLSDYDVDHIVPQSFLKDDSIDNKVLTRSDKARGKSDNVPSEEVVKKMKNYWRQLLNAKLITQRKFDNLTKAERGGLSELDKAGFIKRQLVETRQITKHVAQILDSRMNTKYDENDKLIREVKVITLKSKLVSDFRKDFQFYKVREINNYHHAHDAYLNAVVGTALIKKYPKLESEFVYGDYKVYDVRKMIAKSEQEIGKATAKYFFYSNIMNFFKTEITLANGEIRKRPLIETNGETGEIVWDKGRDFATVRKVLSMPQVNIVKKTEVQTGGFSKESILPKRNSDKLIARKKDWDPKKYGGFDSPTVAYSVLVVAKVEKGKSKKLKSVKELLGITIMERSSFEKNPIDFLEAKGYKEVKKDLIIKLPKYSLFELENGRKRMLASAGELQKGNELALPSKYVNFLYLASHYEKLKGSPEDNEQKQLFVEQHKHYLDEIIEQISEFSKRVILADANLDKVLSAYNKHRDKPIREQAENIIHLFTLTNLGAPAAFKYFDTTIDRKRYTSTKEVLDATLIHQSITGLYETRIDLSQLGGDGGGGGGSSEAAAKGGTLGDQGSRGSDPLPEPRVTLTVEGIPTEFLVNTGAEHSVLTKPMGKMGSKRTVVAGATGSKVYPWTTKRLLKIGQKQVTHSFLVIPECPAPLLGRDLLTKLKAQIQFSTEGPQVTWEDRPAMCLVLNLEEEYRLHEKPVPPSIDPSWLQLFPMVWAEKAGMGLANQVPPVVVELKSDASPVAVRQYPMSKEAREGIRPHIQRFLDLGILVPCQSPWNTPLLPVKKPGTNDYRPVQDLREVNKRVQDIHPTVPNPYNLLSSLPPSHTWYSVLDLKDAFFCLKLHPNSQPLFAFEWRDPEKGNTGQLTWTRLPQGFKNSPTLFNEALHRDLASFRALNPQVVMLQYVDDLLVAAPTYRDCKEGTRRLLQELSKLGYRVSAKKAQLCREEVTYLGYLLKGGKRWLTPARKATVMKIPTPTTPRQVREFLGKAGFCRLFIPGFASLAAPLYPLTRPKVPFTWTEAHQEAFGRIKEALLSAPALALPDLTKPFALYVDEKEGVARGVLTQTLGPWRRPVAYLSKKLDPVASGWPTCLKAIAAVALLLKDADKLTLGQNVLVIAPHNLESIVRQPPDRWMTNARMTHYQSLLLNERVSFAPPAILNPATLLPVESDDTPIHICSEILAEETGTRPDLRDQPLPGVPAWYTDGSSFIMDGRRQAGAAIVDNKRTVWASNLPEGTSAQKAELIALTQALRLAEGKSINIYTDSRYAFATAHVHGAIYKQRGWLTSAGKDIKNKEEILALLEAIHLPKRVAIIHCPGHQRGTDPVATGNRKADEAAKQAAQSTRILTETTKNAGKRTADGSEFEKRTADGSEFESPKKKAKVE

SEQ ID NO: 1824 - protein, 2216 aa, synthetic construct
MPAAKRVKLDGGDKKYSIGLDIGTNSVGWAVITDEYKVPSKKFKVLGNTDRHSIKKNLIGALLFDSGETAEATRLKRTARRRYTRRKNRICYLQEIFSNEMAKVDDSFFHRLEESFLVEEDKKHERHPIFGNIVDEVAYHEKYPTIYHLRKKLVDSTDKADLRLIYLALAHMIKFRGHFLIEGDLNPDNSDVDKLFIQLVQTYNQLFEENPINASGVDAKAILSARLSKSRRLENLIAQLPGEKKNGLFGNLIALSLGLTPNFKSNFDLAEDAKLQLSKDTYDDDLDNLLAQIGDQYADLFLAAKNLSDAILLSDILRVNTEITKAPLSASMIKRYDEHHQDLTLLKALVRQQLPEKYKEIFFDQSKNGYAGYIDGGASQEEFYKFIKPILEKMDGTEELLVKLNREDLLRKQRTFDNGSIPHQIHLGELHAILRRQEDFYPFLKDNREKIEKILTFRIPYYVGPLARGNSRFAWMTRKSEETITPWNFEEVVDKGASAQSFIERMTNFDKNLPNEKVLPKHSLLYEYFTVYNELTKVKYVTEGMRKPAFLSGEQKKAIVDLLFKTNRKVTVKQLKEDYFKKIECFDSVEISGVEDRFNASLGTYHDLLKIIKDKDFLDNEENEDILEDIVLTLTLFEDREMIEERLKTYAHLFDDKVMKQLKRRRYTGWGRLSRKLINGIRDKQSGKTILDFLKSDGFANRNFMQLIHDDSLTFKEDIQKAQVSGQGDSLHEHIANLAGSPAIKKGILQTVKVVDELVKVMGRHKPENIVIEMARENQTTQKGQKNSRERMKRIEEGIKELGSQILKEHPVENTQLQNEKLYLYYLQNGRDMYVDQELDINRLSDYDVDHIVPQSFLKDDSIDNKVLTRSDKARGKSDNVPSEEVVKKMKNYWRQLLNAKLITQRKFDNLTKAERGGLSELDKAGFIKRQLVETRQITKHVAQILDSRMNTKYDENDKLIREVKVITLKSKLVSDFRKDFQFYKVREINNYHHAHDAYLNAVVGTALIKKYPKLESEFVYGDYKVYDVRKMIAKSEQEIGKATAKYFFYSNIMNFFKTEITLANGEIRKRPLIETNGETGEIVWDKGRDFATVRKVLSMPQVNIVKKTEVQTGGFSKESILPKRNSDKLIARKKDWDPKKYGGFDSPTVAYSVLVVAKVEKGKSKKLKSVKELLGITIMERSSFEKNPIDFLEAKGYKEVKKDLIIKLPKYSLFELENGRKRMLASAGELQKGNELALPSKYVNFLYLASHYEKLKGSPEDNEQKQLFVEQHKHYLDEIIEQISEFSKRVILADANLDKVLSAYNKHRDKPIREQAENIIHLFTLTNLGAPAAFKYFDTTIDRKRYTSTKEVLDATLIHQSITGLYETRIDLSQLGGDGGPAPAPAPAPGGTLGDQGSRGSDPLPEPRVTLTVEGIPTEFLVNTGAEHSVLTKPMGKMGSKRTVVAGATGSKVYPWTTKRLLKIGQKQVTHSFLVIPECPAPLLGRDLLTKLKAQIQFSTEGPQVTWEDRPAMCLVLNLEEEYRLHEKPVPPSIDPSWLQLFPMVWAEKAGMGLANQVPPVVVELKSDASPVAVRQYPMSKEAREGIRPHIQRFLDLGILVPCQSPWNTPLLPVKKPGTNDYRPVQDLREVNKRVQDIHPTVPNPYNLLSSLPPSHTWYSVLDLKDAFFCLKLHPNSQPLFAFEWRDPEKGNTGQLTWTRLPQGFKNSPTLFNEALHRDLASFRALNPQVVMLQYVDDLLVAAPTYRDCKEGTRRLLQELSKLGYRVSAKKAQLCREEVTYLGYLLKGGKRWLTPARKATVMKIPTPTTPRQVREFLGKAGFCRLFIPGFASLAAPLYPLTRPKVPFTWTEAHQEAFGRIKEALLSAPALALPDLTKPFALYVDEKEGVARGVLTQTLGPWRRPVAYLSKKLDPVASGWPTCLKAIAAVALLLKDADKLTLGQNVLVIAPHNLESIVRQPPDRWMTNARMTHYQSLLLNERVSFAPPAILNPATLLPVESDDTPIHICSEILAEETGTRPDLRDQPLPGVPAWYTDGSSFIMDGRRQAGAAIVDNKRTVWASNLPEGTSAQKAELIALTQALRLAEGKSINIYTDSRYAFATAHVHGAIYKQRGWLTSAGKDIKNKEEILALLEAIHLPKRVAIIHCPGHQRGTDPVATGNRKADEAAKQAAQSTRILTETTKNAGKRTADGSEFEKRTADGSEFESPKKKAKVE

SEQ ID NO: 1825 - protein, 2215 aa, synthetic construct
MPAAKRVKLDGGDKKYSIGLDIGTNSVGWAVITDEYKVPSKKFKVLGNTDRHSIKKNLIGALLFDSGETAEATRLKRTARRRYTRRKNRICYLQEIFSNEMAKVDDSFFHRLEESFLVEEDKKHERHPIFGNIVDEVAYHEKYPTIYHLRKKLVDSTDKADLRLIYLALAHMIKFRGHFLIEGDLNPDNSDVDKLFIQLVQTYNQLFEENPINASGVDAKAILSARLSKSRRLENLIAQLPGEKKNGLFGNLIALSLGLTPNFKSNFDLAEDAKLQLSKDTYDDDLDNLLAQIGDQYADLFLAAKNLSDAILLSDILRVNTEITKAPLSASMIKRYDEHHQDLTLLKALVRQQLPEKYKEIFFDQSKNGYAGYIDGGASQEEFYKFIKPILEKMDGTEELLVKLNREDLLRKQRTFDNGSIPHQIHLGELHAILRRQEDFYPFLKDNREKIEKILTFRIPYYVGPLARGNSRFAWMTRKSEETITPWNFEEVVDKGASAQSFIERMTNFDKNLPNEKVLPKHSLLYEYFTVYNELTKVKYVTEGMRKPAFLSGEQKKAIVDLLFKTNRKVTVKQLKEDYFKKIECFDSVEISGVEDRFNASLGTYHDLLKIIKDKDFLDNEENEDILEDIVLTLTLFEDREMIEERLKTYAHLFDDKVMKQLKRRRYTGWGRLSRKLINGIRDKQSGKTILDFLKSDGFANRNFMQLIHDDSLTFKEDIQKAQVSGQGDSLHEHIANLAGSPAIKKGILQTVKVVDELVKVMGRHKPENIVIEMARENQTTQKGQKNSRERMKRIEEGIKELGSQILKEHPVENTQLQNEKLYLYYLQNGRDMYVDQELDINRLSDYDVDHIVPQSFLKDDSIDNKVLTRSDKARGKSDNVPSEEVVKKMKNYWRQLLNAKLITQRKFDNLTKAERGGLSELDKAGFIKRQLVETRQITKHVAQILDSRMNTKYDENDKLIREVKVITLKSKLVSDFRKDFQFYKVREINNYHHAHDAYLNAVVGTALIKKYPKLESEFVYGDYKVYDVRKMIAKSEQEIGKATAKYFFYSNIMNFFKTEITLANGEIRKRPLIETNGETGEIVWDKGRDFATVRKVLSMPQVNIVKKTEVQTGGFSKESILPKRNSDKLIARKKDWDPKKYGGFDSPTVAYSVLVVAKVEKGKSKKLKSVKELLGITIMERSSFEKNPIDFLEAKGYKEVKKDLIIKLPKYSLFELENGRKRMLASAGELQKGNELALPSKYVNFLYLASHYEKLKGSPEDNEQKQLFVEQHKHYLDEIIEQISEFSKRVILADANLDKVLSAYNKHRDKPIREQAENIIHLFTLTNLGAPAAFKYFDTTIDRKRYTSTKEVLDATLIHQSITGLYETRIDLSQLGGDGGGGSEAAAKGGTLGDQGSRGSDPLPEPRVTLTVEGIPTEFLVNTGAEHSVLTKPMGKMGSKRTVVAGATGSKVYPWTTKRLLKIGQKQVTHSFLVIPECPAPLLGRDLLTKLKAQIQFSTEGPQVTWEDRPAMCLVLNLEEEYRLHEKPVPPSIDPSWLQLFPMVWAEKAGMGLANQVPPVVVELKSDASPVAVRQYPMSKEAREGIRPHIQRFLDLGILVPCQSPWNTPLLPVKKPGTNDYRPVQDLREVNKRVQDIHPTVPNPYNLLSSLPPSHTWYSVLDLKDAFFCLKLHPNSQPLFAFEWRDPEKGNTGQLTWTRLPQGFKNSPTLFNEALHRDLASFRALNPQVVMLQYVDDLLVAAPTYRDCKEGTRRLLQELSKLGYRVSAKKAQLCREEVTYLGYLLKGGKRWLTPARKATVMKIPTPTTPRQVREFLGKAGFCRLFIPGFASLAAPLYPLTRPKVPFTWTEAHQEAFGRIKEALLSAPALALPDLTKPFALYVDEKEGVARGVLTQTLGPWRRPVAYLSKKLDPVASGWPTCLKAIAAVALLLKDADKLTLGQNVLVIAPHNLESIVRQPPDRWMTNARMTHYQSLLLNERVSFAPPAILNPATLLPVESDDTPIHICSEILAEETGTRPDLRDQPLPGVPAWYTDGSSFIMDGRRQAGAAIVDNKRTVWASNLPEGTSAQKAELIALTQALRLAEGKSINIYTDSRYAFATAHVHGAIYKQRGWLTSAGKDIKNKEEILALLEAIHLPKRVAIIHCPGHQRGTDPVATGNRKADEAAKQAAQSTRILTETTKNAGKRTADGSEFEKRTADGSEFESPKKKAKVE

SEQ ID NO: 1826 - protein, 2216 aa, synthetic construct
MPAAKRVKLDGGDKKYSIGLDIGTNSVGWAVITDEYKVPSKKFKVLGNTDRHSIKKNLIGALLFDSGETAEATRLKRTARRRYTRRKNRICYLQEIFSNEMAKVDDSFFHRLEESFLVEEDKKHERHPIFGNIVDEVAYHEKYPTIYHLRKKLVDSTDKADLRLIYLALAHMIKFRGHFLIEGDLNPDNSDVDKLFIQLVQTYNQLFEENPINASGVDAKAILSARLSKSRRLENLIAQLPGEKKNGLFGNLIALSLGLTPNFKSNFDLAEDAKLQLSKDTYDDDLDNLLAQIGDQYADLFLAAKNLSDAILLSDILRVNTEITKAPLSASMIKRYDEHHQDLTLLKALVRQQLPEKYKEIFFDQSKNGYAGYIDGGASQEEFYKFIKPILEKMDGTEELLVKLNREDLLRKQRTFDNGSIPHQIHLGELHAILRRQEDFYPFLKDNREKIEKILTFRIPYYVGPLARGNSRFAWMTRKSEETITPWNFEEVVDKGASAQSFIERMTNFDKNLPNEKVLPKHSLLYEYFTVYNELTKVKYVTEGMRKPAFLSGEQKKAIVDLLFKTNRKVTVKQLKEDYFKKIECFDSVEISGVEDRFNASLGTYHDLLKIIKDKDFLDNEENEDILEDIVLTLTLFEDREMIEERLKTYAHLFDDKVMKQLKRRRYTGWGRLSRKLINGIRDKQSGKTILDFLKSDGFANRNFMQLIHDDSLTFKEDIQKAQVSGQGDSLHEHIANLAGSPAIKKGILQTVKVVDELVKVMGRHKPENIVIEMARENQTTQKGQKNSRERMKRIEEGIKELGSQILKEHPVENTQLQNEKLYLYYLQNGRDMYVDQELDINRLSDYDVDHIVPQSFLKDDSIDNKVLTRSDKARGKSDNVPSEEVVKKMKNYWRQLLNAKLITQRKFDNLTKAERGGLSELDKAGFIKRQLVETRQITKHVAQILDSRMNTKYDENDKLIREVKVITLKSKLVSDFRKDFQFYKVREINNYHHAHDAYLNAVVGTALIKKYPKLESEFVYGDYKVYDVRKMIAKSEQEIGKATAKYFFYSNIMNFFKTEITLANGEIRKRPLIETNGETGEIVWDKGRDFATVRKVLSMPQVNIVKKTEVQTGGFSKESILPKRNSDKLIARKKDWDPKKYGGFDSPTVAYSVLVVAKVEKGKSKKLKSVKELLGITIMERSSFEKNPIDFLEAKGYKEVKKDLIIKLPKYSLFELENGRKRMLASAGELQKGNELALPSKYVNFLYLASHYEKLKGSPEDNEQKQLFVEQHKHYLDEIIEQISEFSKRVILADANLDKVLSAYNKHRDKPIREQAENIIHLFTLTNLGAPAAFKYFDTTIDRKRYTSTKEVLDATLIHQSITGLYETRIDLSQLGGDGGGGGPAPGGSGGTLGDQGSRGSDPLPEPRVTLTVEGIPTEFLVNTGAEHSVLTKPMGKMGSKRTVVAGATGSKVYPWTTKRLLKIGQKQVTHSFLVIPECPAPLLGRDLLTKLKAQIQFSTEGPQVTWEDRPAMCLVLNLEEEYRLHEKPVPPSIDPSWLQLFPMVWAEKAGMGLANQVPPVVVELKSDASPVAVRQYPMSKEAREGIRPHIQRFLDLGILVPCQSPWNTPLLPVKKPGTNDYRPVQDLREVNKRVQDIHPTVPNPYNLLSSLPPSHTWYSVLDLKDAFFCLKLHPNSQPLFAFEWRDPEKGNTGQLTWTRLPQGFKNSPTLFNEALHRDLASFRALNPQVVMLQYVDDLLVAAPTYRDCKEGTRRLLQELSKLGYRVSAKKAQLCREEVTYLGYLLKGGKRWLTPARKATVMKIPTPTTPRQVREFLGKAGFCRLFIPGFASLAAPLYPLTRPKVPFTWTEAHQEAFGRIKEALLSAPALALPDLTKPFALYVDEKEGVARGVLTQTLGPWRRPVAYLSKKLDPVASGWPTCLKAIAAVALLLKDADKLTLGQNVLVIAPHNLESIVRQPPDRWMTNARMTHYQSLLLNERVSFAPPAILNPATLLPVESDDTPIHICSEILAEETGTRPDLRDQPLPGVPAWYTDGSSFIMDGRRQAGAAIVDNKRTVWASNLPEGTSAQKAELIALTQALRLAEGKSINIYTDSRYAFATAHVHGAIYKQRGWLTSAGKDIKNKEEILALLEAIHLPKRVAIIHCPGHQRGTDPVATGNRKADEAAKQAAQSTRILTETTKNAGKRTADGSEFEKRTADGSEFESPKKKAKVE

SEQ ID NO: 1827 - protein, 2216 aa, synthetic construct
MPAAKRVKLDGGDKKYSIGLDIGTNSVGWAVITDEYKVPSKKFKVLGNTDRHSIKKNLIGALLFDSGETAEATRLKRTARRRYTRRKNRICYLQEIFSNEMAKVDDSFFHRLEESFLVEEDKKHERHPIFGNIVDEVAYHEKYPTIYHLRKKLVDSTDKADLRLIYLALAHMIKFRGHFLIEGDLNPDNSDVDKLFIQLVQTYNQLFEENPINASGVDAKAILSARLSKSRRLENLIAQLPGEKKNGLFGNLIALSLGLTPNFKSNFDLAEDAKLQLSKDTYDDDLDNLLAQIGDQYADLFLAAKNLSDAILLSDILRVNTEITKAPLSASMIKRYDEHHQDLTLLKALVRQQLPEKYKEIFFDQSKNGYAGYIDGGASQEEFYKFIKPILEKMDGTEELLVKLNREDLLRKQRTFDNGSIPHQIHLGELHAILRRQEDFYPFLKDNREKIEKILTFRIPYYVGPLARGNSRFAWMTRKSEETITPWNFEEVVDKGASAQSFIERMTNFDKNLPNEKVLPKHSLLYEYFTVYNELTKVKYVTEGMRKPAFLSGEQKKAIVDLLFKTNRKVTVKQLKEDYFKKIECFDSVEISGVEDRFNASLGTYHDLLKIIKDKDFLDNEENEDILEDIVLTLTLFEDREMIEERLKTYAHLFDDKVMKQLKRRRYTGWGRLSRKLINGIRDKQSGKTILDFLKSDGFANRNFMQLIHDDSLTFKEDIQKAQVSGQGDSLHEHIANLAGSPAIKKGILQTVKVVDELVKVMGRHKPENIVIEMARENQTTQKGQKNSRERMKRIEEGIKELGSQILKEHPVENTQLQNEKLYLYYLQNGRDMYVDQELDINRLSDYDVDHIVPQSFLKDDSIDNKVLTRSDKARGKSDNVPSEEVVKKMKNYWRQLLNAKLITQRKFDNLTKAERGGLSELDKAGFIKRQLVETRQITKHVAQILDSRMNTKYDENDKLIREVKVITLKSKLVSDFRKDFQFYKVREINNYHHAHDAYLNAVVGTALIKKYPKLESEFVYGDYKVYDVRKMIAKSEQEIGKATAKYFFYSNIMNFFKTEITLANGEIRKRPLIETNGETGEIVWDKGRDFATVRKVLSMPQVNIVKKTEVQTGGFSKESILPKRNSDKLIARKKDWDPKKYGGFDSPTVAYSVLVVAKVEKGKSKKLKSVKELLGITIMERSSFEKNPIDFLEAKGYKEVKKDLIIKLPKYSLFELENGRKRMLASAGELQKGNELALPSKYVNFLYLASHYEKLKGSPEDNEQKQLFVEQHKHYLDEIIEQISEFSKRVILADANLDKVLSAYNKHRDKPIREQAENIIHLFTLTNLGAPAAFKYFDTTIDRKRYTSTKEVLDATLIHQSITGLYETRIDLSQLGGDGGPAPGGSGSSGGTLGDQGSRGSDPLPEPRVTLTVEGIPTEFLVNTGAEHSVLTKPMGKMGSKRTVVAGATGSKVYPWTTKRLLKIGQKQVTHSFLVIPECPAPLLGRDLLTKLKAQIQFSTEGPQVTWEDRPAMCLVLNLEEEYRLHEKPVPPSIDPSWLQLFPMVWAEKAGMGLANQVPPVVVELKSDASPVAVRQYPMSKEAREGIRPHIQRFLDLGILVPCQSPWNTPLLPVKKPGTNDYRPVQDLREVNKRVQDIHPTVPNPYNLLSSLPPSHTWYSVLDLKDAFFCLKLHPNSQPLFAFEWRDPEKGNTGQLTWTRLPQGFKNSPTLFNEALHRDLASFRALNPQVVMLQYVDDLLVAAPTYRDCKEGTRRLLQELSKLGYRVSAKKAQLCREEVTYLGYLLKGGKRWLTPARKATVMKIPTPTTPRQVREFLGKAGFCRLFIPGFASLAAPLYPLTRPKVPFTWTEAHQEAFGRIKEALLSAPALALPDLTKPFALYVDEKEGVARGVLTQTLGPWRRPVAYLSKKLDPVASGWPTCLKAIAAVALLLKDADKLTLGQNVLVIAPHNLESIVRQPPDRWMTNARMTHYQSLLLNERVSFAPPAILNPATLLPVESDDTPIHICSEILAEETGTRPDLRDQPLPGVPAWYTDGSSFIMDGRRQAGAAIVDNKRTVWASNLPEGTSAQKAELIALTQALRLAEGKSINIYTDSRYAFATAHVHGAIYKQRGWLTSAGKDIKNKEEILALLEAIHLPKRVAIIHCPGHQRGTDPVATGNRKADEAAKQAAQSTRILTETTKNAGKRTADGSEFEKRTADGSEFESPKKKAKVE

SEQ ID NO: 1828 - protein, 2212 aa, synthetic construct
MPAAKRVKLDGGDKKYSIGLDIGTNSVGWAVITDEYKVPSKKFKVLGNTDRHSIKKNLIGALLFDSGETAEATRLKRTARRRYTRRKNRICYLQEIFSNEMAKVDDSFFHRLEESFLVEEDKKHERHPIFGNIVDEVAYHEKYPTIYHLRKKLVDSTDKADLRLIYLALAHMIKFRGHFLIEGDLNPDNSDVDKLFIQLVQTYNQLFEENPINASGVDAKAILSARLSKSRRLENLIAQLPGEKKNGLFGNLIALSLGLTPNFKSNFDLAEDAKLQLSKDTYDDDLDNLLAQIGDQYADLFLAAKNLSDAILLSDILRVNTEITKAPLSASMIKRYDEHHQDLTLLKALVRQQLPEKYKEIFFDQSKNGYAGYIDGGASQEEFYKFIKPILEKMDGTEELLVKLNREDLLRKQRTFDNGSIPHQIHLGELHAILRRQEDFYPFLKDNREKIEKILTFRIPYYVGPLARGNSRFAWMTRKSEETITPWNFEEVVDKGASAQSFIERMTNFDKNLPNEKVLPKHSLLYEYFTVYNELTKVKYVTEGMRKPAFLSGEQKKAIVDLLFKTNRKVTVKQLKEDYFKKIECFDSVEISGVEDRFNASLGTYHDLLKIIKDKDFLDNEENEDILEDIVLTLTLFEDREMIEERLKTYAHLFDDKVMKQLKRRRYTGWGRLSRKLINGIRDKQSGKTILDFLKSDGFANRNFMQLIHDDSLTFKEDIQKAQVSGQGDSLHEHIANLAGSPAIKKGILQTVKVVDELVKVMGRHKPENIVIEMARENQTTQKGQKNSRERMKRIEEGIKELGSQILKEHPVENTQLQNEKLYLYYLQNGRDMYVDQELDINRLSDYDVDHIVPQSFLKDDSIDNKVLTRSDKARGKSDNVPSEEVVKKMKNYWRQLLNAKLITQRKFDNLTKAERGGLSELDKAGFIKRQLVETRQITKHVAQILDSRMNTKYDENDKLIREVKVITLKSKLVSDFRKDFQFYKVREINNYHHAHDAYLNAVVGTALIKKYPKLESEFVYGDYKVYDVRKMIAKSEQEIGKATAKYFFYSNIMNFFKTEITLANGEIRKRPLIETNGETGEIVWDKGRDFATVRKVLSMPQVNIVKKTEVQTGGFSKESILPKRNSDKLIARKKDWDPKKYGGFDSPTVAYSVLVVAKVEKGKSKKLKSVKELLGITIMERSSFEKNPIDFLEAKGYKEVKKDLIIKLPKYSLFELENGRKRMLASAGELQKGNELALPSKYVNFLYLASHYEKLKGSPEDNEQKQLFVEQHKHYLDEIIEQISEFSKRVILADANLDKVLSAYNKHRDKPIREQAENIIHLFTLTNLGAPAAFKYFDTTIDRKRYTSTKEVLDATLIHQSITGLYETRIDLSQLGGDGGGGGGGGGTLGDQGSRGSDPLPEPRVTLTVEGIPTEFLVNTGAEHSVLTKPMGKMGSKRTVVAGATGSKVYPWTTKRLLKIGQKQVTHSFLVIPECPAPLLGRDLLTKLKAQIQFSTEGPQVTWEDRPAMCLVLNLEEEYRLHEKPVPPSIDPSWLQLFPMVWAEKAGMGLANQVPPVVVELKSDASPVAVRQYPMSKEAREGIRPHIQRFLDLGILVPCQSPWNTPLLPVKKPGTNDYRPVQDLREVNKRVQDIHPTVPNPYNLLSSLPPSHTWYSVLDLKDAFFCLKLHPNSQPLFAFEWRDPEKGNTGQLTWTRLPQGFKNSPTLFNEALHRDLASFRALNPQVVMLQYVDDLLVAAPTYRDCKEGTRRLLQELSKLGYRVSAKKAQLCREEVTYLGYLLKGGKRWLTPARKATVMKIPTPTTPRQVREFLGKAGFCRLFIPGFASLAAPLYPLTRPKVPFTWTEAHQEAFGRIKEALLSAPALALPDLTKPFALYVDEKEGVARGVLTQTLGPWRRPVAYLSKKLDPVASGWPTCLKAIAAVALLLKDADKLTLGQNVLVIAPHNLESIVRQPPDRWMTNARMTHYQSLLLNERVSFAPPAILNPATLLPVESDDTPIHICSEILAEETGTRPDLRDQPLPGVPAWYTDGSSFIMDGRRQAGAAIVDNKRTVWASNLPEGTSAQKAELIALTQALRLAEGKSINIYTDSRYAFATAHVHGAIYKQRGWLTSAGKDIKNKEEILALLEAIHLPKRVAIIHCPGHQRGTDPVATGNRKADEAAKQAAQSTRILTETTKNAGKRTADGSEFEKRTADGSEFESPKKKAKVE

SEQ ID NO: 1829 - protein, 2218 aa, synthetic construct
MPAAKRVKLDGGDKKYSIGLDIGTNSVGWAVITDEYKVPSKKFKVLGNTDRHSIKKNLIGALLFDSGETAEATRLKRTARRRYTRRKNRICYLQEIFSNEMAKVDDSFFHRLEESFLVEEDKKHERHPIFGNIVDEVAYHEKYPTIYHLRKKLVDSTDKADLRLIYLALAHMIKFRGHFLIEGDLNPDNSDVDKLFIQLVQTYNQLFEENPINASGVDAKAILSARLSKSRRLENLIAQLPGEKKNGLFGNLIALSLGLTPNFKSNFDLAEDAKLQLSKDTYDDDLDNLLAQIGDQYADLFLAAKNLSDAILLSDILRVNTEITKAPLSASMIKRYDEHHQDLTLLKALVRQQLPEKYKEIFFDQSKNGYAGYIDGGASQEEFYKFIKPILEKMDGTEELLVKLNREDLLRKQRTFDNGSIPHQIHLGELHAILRRQEDFYPFLKDNREKIEKILTFRIPYYVGPLARGNSRFAWMTRKSEETITPWNFEEVVDKGASAQSFIERMTNFDKNLPNEKVLPKHSLLYEYFTVYNELTKVKYVTEGMRKPAFLSGEQKKAIVDLLFKTNRKVTVKQLKEDYFKKIECFDSVEISGVEDRFNASLGTYHDLLKIIKDKDFLDNEENEDILEDIVLTLTLFEDREMIEERLKTYAHLFDDKVMKQLKRRRYTGWGRLSRKLINGIRDKQSGKTILDFLKSDGFANRNFMQLIHDDSLTFKEDIQKAQVSGQGDSLHEHIANLAGSPAIKKGILQTVKVVDELVKVMGRHKPENIVIEMARENQTTQKGQKNSRERMKRIEEGIKELGSQILKEHPVENTQLQNEKLYLYYLQNGRDMYVDQELDINRLSDYDVDHIVPQSFLKDDSIDNKVLTRSDKARGKSDNVPSEEVVKKMKNYWRQLLNAKLITQRKFDNLTKAERGGLSELDKAGFIKRQLVETRQITKHVAQILDSRMNTKYDENDKLIREVKVITLKSKLVSDFRKDFQFYKVREINNYHHAHDAYLNAVVGTALIKKYPKLESEFVYGDYKVYDVRKMIAKSEQEIGKATAKYFFYSNIMNFFKTEITLANGEIRKRPLIETNGETGEIVWDKGRDFATVRKVLSMPQVNIVKKTEVQTGGFSKESILPKRNSDKLIARKKDWDPKKYGGFDSPTVAYSVLVVAKVEKGKSKKLKSVKELLGITIMERSSFEKNPIDFLEAKGYKEVKKDLIIKLPKYSLFELENGRKRMLASAGELQKGNELALPSKYVNFLYLASHYEKLKGSPEDNEQKQLFVEQHKHYLDEIIEQISEFSKRVILADANLDKVLSAYNKHRDKPIREQAENIIHLFTLTNLGAPAAFKYFDTTIDRKRYTSTKEVLDATLIHQSITGLYETRIDLSQLGGDGGGGSEAAAKGGGGGTLGDQGSRGSDPLPEPRVTLTVEGIPTEFLVNTGAEHSVLTKPMGKMGSKRTVVAGATGSKVYPWTTKRLLKIGQKQVTHSFLVIPECPAPLLGRDLLTKLKAQIQFSTEGPQVTWEDRPAMCLVLNLEEEYRLHEKPVPPSIDPSWLQLFPMVWAEKAGMGLANQVPPVVVELKSDASPVAVRQYPMSKEAREGIRPHIQRFLDLGILVPCQSPWNTPLLPVKKPGTNDYRPVQDLREVNKRVQDIHPTVPNPYNLLSSLPPSHTWYSVLDLKDAFFCLKLHPNSQPLFAFEWRDPEKGNTGQLTWTRLPQGFKNSPTLFNEALHRDLASFRALNPQVVMLQYVDDLLVAAPTYRDCKEGTRRLLQELSKLGYRVSAKKAQLCREEVTYLGYLLKGGKRWLTPARKATVMKIPTPTTPRQVREFLGKAGFCRLFIPGFASLAAPLYPLTRPKVPFTWTEAHQEAFGRIKEALLSAPALALPDLTKPFALYVDEKEGVARGVLTQTLGPWRRPVAYLSKKLDPVASGWPTCLKAIAAVALLLKDADKLTLGQNVLVIAPHNLESIVRQPPDRWMTNARMTHYQSLLLNERVSFAPPAILNPATLLPVESDDTPIHICSEILAEETGTRPDLRDQPLPGVPAWYTDGSSFIMDGRRQAGAAIVDNKRTVWASNLPEGTSAQKAELIALTQALRLAEGKSINIYTDSRYAFATAHVHGAIYKQRGWLTSAGKDIKNKEEILALLEAIHLPKRVAIIHCPGHQRGTDPVATGNRKADEAAKQAAQSTRILTETTKNAGKRTADGSEFEKRTADGSEFESPKKKAKVE

SEQ ID NO: 1830 - protein, 2216 aa, synthetic construct
MPAAKRVKLDGGDKKYSIGLDIGTNSVGWAVITDEYKVPSKKFKVLGNTDRHSIKKNLIGALLFDSGETAEATRLKRTARRRYTRRKNRICYLQEIFSNEMAKVDDSFFHRLEESFLVEEDKKHERHPIFGNIVDEVAYHEKYPTIYHLRKKLVDSTDKADLRLIYLALAHMIKFRGHFLIEGDLNPDNSDVDKLFIQLVQTYNQLFEENPINASGVDAKAILSARLSKSRRLENLIAQLPGEKKNGLFGNLIALSLGLTPNFKSNFDLAEDAKLQLSKDTYDDDLDNLLAQIGDQYADLFLAAKNLSDAILLSDILRVNTEITKAPLSASMIKRYDEHHQDLTLLKALVRQQLPEKYKEIFFDQSKNGYAGYIDGGASQEEFYKFIKPILEKMDGTEELLVKLNREDLLRKQRTFDNGSIPHQIHLGELHAILRRQEDFYPFLKDNREKIEKILTFRIPYYVGPLARGNSRFAWMTRKSEETITPWNFEEVVDKGASAQSFIERMTNFDKNLPNEKVLPKHSLLYEYFTVYNELTKVKYVTEGMRKPAFLSGEQKKAIVDLLFKTNRKVTVKQLKEDYFKKIECFDSVEISGVEDRFNASLGTYHDLLKIIKDKDFLDNEENEDILEDIVLTLTLFEDREMIEERLKTYAHLFDDKVMKQLKRRRYTGWGRLSRKLINGIRDKQSGKTILDFLKSDGFANRNFMQLIHDDSLTFKEDIQKAQVSGQGDSLHEHIANLAGSPAIKKGILQTVKVVDELVKVMGRHKPENIVIEMARENQTTQKGQKNSRERMKRIEEGIKELGSQILKEHPVENTQLQNEKLYLYYLQNGRDMYVDQELDINRLSDYDVDHIVPQSFLKDDSIDNKVLTRSDKARGKSDNVPSEEVVKKMKNYWRQLLNAKLITQRKFDNLTKAERGGLSELDKAGFIKRQLVETRQITKHVAQILDSRMNTKYDENDKLIREVKVITLKSKLVSDFRKDFQFYKVREINNYHHAHDAYLNAVVGTALIKKYPKLESEFVYGDYKVYDVRKMIAKSEQEIGKATAKYFFYSNIMNFFKTEITLANGEIRKRPLIETNGETGEIVWDKGRDFATVRKVLSMPQVNIVKKTEVQTGGFSKESILPKRNSDKLIARKKDWDPKKYGGFDSPTVAYSVLVVAKVEKGKSKKLKSVKELLGITIMERSSFEKNPIDFLEAKGYKEVKKDLIIKLPKYSLFELENGRKRMLASAGELQKGNELALPSKYVNFLYLASHYEKLKGSPEDNEQKQLFVEQHKHYLDEIIEQISEFSKRVILADANLDKVLSAYNKHRDKPIREQAENIIHLFTLTNLGAPAAFKYFDTTIDRKRYTSTKEVLDATLIHQSITGLYETRIDLSQLGGDGGGSSGGSPAPGGTLGDQGSRGSDPLPEPRVTLTVEGIPTEFLVNTGAEHSVLTKPMGKMGSKRTVVAGATGSKVYPWTTKRLLKIGQKQVTHSFLVIPECPAPLLGRDLLTKLKAQIQFSTEGPQVTWEDRPAMCLVLNLEEEYRLHEKPVPPSIDPSWLQLFPMVWAEKAGMGLANQVPPVVVELKSDASPVAVRQYPMSKEAREGIRPHIQRFLDLGILVPCQSPWNTPLLPVKKPGTNDYRPVQDLREVNKRVQDIHPTVPNPYNLLSSLPPSHTWYSVLDLKDAFFCLKLHPNSQPLFAFEWRDPEKGNTGQLTWTRLPQGFKNSPTLFNEALHRDLASFRALNPQVVMLQYVDDLLVAAPTYRDCKEGTRRLLQELSKLGYRVSAKKAQLCREEVTYLGYLLKGGKRWLTPARKATVMKIPTPTTPRQVREFLGKAGFCRLFIPGFASLAAPLYPLTRPKVPFTWTEAHQEAFGRIKEALLSAPALALPDLTKPFALYVDEKEGVARGVLTQTLGPWRRPVAYLSKKLDPVASGWPTCLKAIAAVALLLKDADKLTLGQNVLVIAPHNLESIVRQPPDRWMTNARMTHYQSLLLNERVSFAPPAILNPATLLPVESDDTPIHICSEILAEETGTRPDLRDQPLPGVPAWYTDGSSFIMDGRRQAGAAIVDNKRTVWASNLPEGTSAQKAELIALTQALRLAEGKSINIYTDSRYAFATAHVHGAIYKQRGWLTSAGKDIKNKEEILALLEAIHLPKRVAIIHCPGHQRGTDPVATGNRKADEAAKQAAQSTRILTETTKNAGKRTADGSEFEKRTADGSEFESPKKKAKVE

SEQ ID NO: 1831 - protein, 2213 aa, synthetic construct
MPAAKRVKLDGGDKKYSIGLDIGTNSVGWAVITDEYKVPSKKFKVLGNTDRHSIKKNLIGALLFDSGETAEATRLKRTARRRYTRRKNRICYLQEIFSNEMAKVDDSFFHRLEESFLVEEDKKHERHPIFGNIVDEVAYHEKYPTIYHLRKKLVDSTDKADLRLIYLALAHMIKFRGHFLIEGDLNPDNSDVDKLFIQLVQTYNQLFEENPINASGVDAKAILSARLSKSRRLENLIAQLPGEKKNGLFGNLIALSLGLTPNFKSNFDLAEDAKLQLSKDTYDDDLDNLLAQIGDQYADLFLAAKNLSDAILLSDILRVNTEITKAPLSASMIKRYDEHHQDLTLLKALVRQQLPEKYKEIFFDQSKNGYAGYIDGGASQEEFYKFIKPILEKMDGTEELLVKLNREDLLRKQRTFDNGSIPHQIHLGELHAILRRQEDFYPFLKDNREKIEKILTFRIPYYVGPLARGNSRFAWMTRKSEETITPWNFEEVVDKGASAQSFIERMTNFDKNLPNEKVLPKHSLLYEYFTVYNELTKVKYVTEGMRKPAFLSGEQKKAIVDLLFKTNRKVTVKQLKEDYFKKIECFDSVEISGVEDRFNASLGTYHDLLKIIKDKDFLDNEENEDILEDIVLTLTLFEDREMIEERLKTYAHLFDDKVMKQLKRRRYTGWGRLSRKLINGIRDKQSGKTILDFLKSDGFANRNFMQLIHDDSLTFKEDIQKAQVSGQGDSLHEHIANLAGSPAIKKGILQTVKVVDELVKVMGRHKPENIVIEMARENQTTQKGQKNSRERMKRIEEGIKELGSQILKEHPVENTQLQNEKLYLYYLQNGRDMYVDQELDINRLSDYDVDHIVPQSFLKDDSIDNKVLTRSDKARGKSDNVPSEEVVKKMKNYWRQLLNAKLITQRKFDNLTKAERGGLSELDKAGFIKRQLVETRQITKHVAQILDSRMNTKYDENDKLIREVKVITLKSKLVSDFRKDFQFYKVREINNYHHAHDAYLNAVVGTALIKKYPKLESEFVYGDYKVYDVRKMIAKSEQEIGKATAKYFFYSNIMNFFKTEITLANGEIRKRPLIETNGETGEIVWDKGRDFATVRKVLSMPQVNIVKKTEVQTGGFSKESILPKRNSDKLIARKKDWDPKKYGGFDSPTVAYSVLVVAKVEKGKSKKLKSVKELLGITIMERSSFEKNPIDFLEAKGYKEVKKDLIIKLPKYSLFELENGRKRMLASAGELQKGNELALPSKYVNFLYLASHYEKLKGSPEDNEQKQLFVEQHKHYLDEIIEQISEFSKRVILADANLDKVLSAYNKHRDKPIREQAENIIHLFTLTNLGAPAAFKYFDTTIDRKRYTSTKEVLDATLIHQSITGLYETRIDLSQLGGDGGGSSGSSGGTLGDQGSRGSDPLPEPRVTLTVEGIPTEFLVNTGAEHSVLTKPMGKMGSKRTVVAGATGSKVYPWTTKRLLKIGQKQVTHSFLVIPECPAPLLGRDLLTKLKAQIQFSTEGPQVTWEDRPAMCLVLNLEEEYRLHEKPVPPSIDPSWLQLFPMVWAEKAGMGLANQVPPVVVELKSDASPVAVRQYPMSKEAREGIRPHIQRFLDLGILVPCQSPWNTPLLPVKKPGTNDYRPVQDLREVNKRVQDIHPTVPNPYNLLSSLPPSHTWYSVLDLKDAFFCLKLHPNSQPLFAFEWRDPEKGNTGQLTWTRLPQGFKNSPTLFNEALHRDLASFRALNPQVVMLQYVDDLLVAAPTYRDCKEGTRRLLQELSKLGYRVSAKKAQLCREEVTYLGYLLKGGKRWLTPARKATVMKIPTPTTPRQVREFLGKAGFCRLFIPGFASLAAPLYPLTRPKVPFTWTEAHQEAFGRIKEALLSAPALALPDLTKPFALYVDEKEGVARGVLTQTLGPWRRPVAYLSKKLDPVASGWPTCLKAIAAVALLLKDADKLTLGQNVLVIAPHNLESIVRQPPDRWMTNARMTHYQSLLLNERVSFAPPAILNPATLLPVESDDTPIHICSEILAEETGTRPDLRDQPLPGVPAWYTDGSSFIMDGRRQAGAAIVDNKRTVWASNLPEGTSAQKAELIALTQALRLAEGKSINIYTDSRYAFATAHVHGAIYKQRGWLTSAGKDIKNKEEILALLEAIHLPKRVAIIHCPGHQRGTDPVATGNRKADEAAKQAAQSTRILTETTKNAGKRTADGSEFEKRTADGSEFESPKKKAKVE

SEQ ID NO: 1832 - protein, 2216 aa, synthetic construct
MPAAKRVKLDGGDKKYSIGLDIGTNSVGWAVITDEYKVPSKKFKVLGNTDRHSIKKNLIGALLFDSGETAEATRLKRTARRRYTRRKNRICYLQEIFSNEMAKVDDSFFHRLEESFLVEEDKKHERHPIFGNIVDEVAYHEKYPTIYHLRKKLVDSTDKADLRLIYLALAHMIKFRGHFLIEGDLNPDNSDVDKLFIQLVQTYNQLFEENPINASGVDAKAILSARLSKSRRLENLIAQLPGEKKNGLFGNLIALSLGLTPNFKSNFDLAEDAKLQLSKDTYDDDLDNLLAQIGDQYADLFLAAKNLSDAILLSDILRVNTEITKAPLSASMIKRYDEHHQDLTLLKALVRQQLPEKYKEIFFDQSKNGYAGYIDGGASQEEFYKFIKPILEKMDGTEELLVKLNREDLLRKQRTFDNGSIPHQIHLGELHAILRRQEDFYPFLKDNREKIEKILTFRIPYYVGPLARGNSRFAWMTRKSEETITPWNFEEVVDKGASAQSFIERMTNFDKNLPNEKVLPKHSLLYEYFTVYNELTKVKYVTEGMRKPAFLSGEQKKAIVDLLFKTNRKVTVKQLKEDYFKKIECFDSVEISGVEDRFNASLGTYHDLLKIIKDKDFLDNEENEDILEDIVLTLTLFEDREMIEERLKTYAHLFDDKVMKQLKRRRYTGWGRLSRKLINGIRDKQSGKTILDFLKSDGFANRNFMQLIHDDSLTFKEDIQKAQVSGQGDSLHEHIANLAGSPAIKKGILQTVKVVDELVKVMGRHKPENIVIEMARENQTTQKGQKNSRERMKRIEEGIKELGSQILKEHPVENTQLQNEKLYLYYLQNGRDMYVDQELDINRLSDYDVDHIVPQSFLKDDSIDNKVLTRSDKARGKSDNVPSEEVVKKMKNYWRQLLNAKLITQRKFDNLTKAERGGLSELDKAGFIKRQLVETRQITKHVAQILDSRMNTKYDENDKLIREVKVITLKSKLVSDFRKDFQFYKVREINNYHHAHDAYLNAVVGTALIKKYPKLESEFVYGDYKVYDVRKMIAKSEQEIGKATAKYFFYSNIMNFFKTEITLANGEIRKRPLIETNGETGEIVWDKGRDFATVRKVLSMPQVNIVKKTEVQTGGFSKESILPKRNSDKLIARKKDWDPKKYGGFDSPTVAYSVLVVAKVEKGKSKKLKSVKELLGITIMERSSFEKNPIDFLEAKGYKEVKKDLIIKLPKYSLFELENGRKRMLASAGELQKGNELALPSKYVNFLYLASHYEKLKGSPEDNEQKQLFVEQHKHYLDEIIEQISEFSKRVILADANLDKVLSAYNKHRDKPIREQAENIIHLFTLTNLGAPAAFKYFDTTIDRKRYTSTKEVLDATLIHQSITGLYETRIDLSQLGGDGGGGSGGGPAPGGTLGDQGSRGSDPLPEPRVTLTVEGIPTEFLVNTGAEHSVLTKPMGKMGSKRTVVAGATGSKVYPWTTKRLLKIGQKQVTHSFLVIPECPAPLLGRDLLTKLKAQIQFSTEGPQVTWEDRPAMCLVLNLEEEYRLHEKPVPPSIDPSWLQLFPMVWAEKAGMGLANQVPPVVVELKSDASPVAVRQYPMSKEAREGIRPHIQRFLDLGILVPCQSPWNTPLLPVKKPGTNDYRPVQDLREVNKRVQDIHPTVPNPYNLLSSLPPSHTWYSVLDLKDAFFCLKLHPNSQPLFAFEWRDPEKGNTGQLTWTRLPQGFKNSPTLFNEALHRDLASFRALNPQVVMLQYVDDLLVAAPTYRDCKEGTRRLLQELSKLGYRVSAKKAQLCREEVTYLGYLLKGGKRWLTPARKATVMKIPTPTTPRQVREFLGKAGFCRLFIPGFASLAAPLYPLTRPKVPFTWTEAHQEAFGRIKEALLSAPALALPDLTKPFALYVDEKEGVARGVLTQTLGPWRRPVAYLSKKLDPVASGWPTCLKAIAAVALLLKDADKLTLGQNVLVIAPHNLESIVRQPPDRWMTNARMTHYQSLLLNERVSFAPPAILNPATLLPVESDDTPIHICSEILAEETGTRPDLRDQPLPGVPAWYTDGSSFIMDGRRQAGAAIVDNKRTVWASNLPEGTSAQKAELIALTQALRLAEGKSINIYTDSRYAFATAHVHGAIYKQRGWLTSAGKDIKNKEEILALLEAIHLPKRVAIIHCPGHQRGTDPVATGNRKADEAAKQAAQSTRILTETTKNAGKRTADGSEFEKRTADGSEFESPKKKAKVE

SEQ ID NO: 1833 - protein, 2218 aa, synthetic construct
MPAAKRVKLDGGDKKYSIGLDIGTNSVGWAVITDEYKVPSKKFKVLGNTDRHSIKKNLIGALLFDSGETAEATRLKRTARRRYTRRKNRICYLQEIFSNEMAKVDDSFFHRLEESFLVEEDKKHERHPIFGNIVDEVAYHEKYPTIYHLRKKLVDSTDKADLRLIYLALAHMIKFRGHFLIEGDLNPDNSDVDKLFIQLVQTYNQLFEENPINASGVDAKAILSARLSKSRRLENLIAQLPGEKKNGLFGNLIALSLGLTPNFKSNFDLAEDAKLQLSKDTYDDDLDNLLAQIGDQYADLFLAAKNLSDAILLSDILRVNTEITKAPLSASMIKRYDEHHQDLTLLKALVRQQLPEKYKEIFFDQSKNGYAGYIDGGASQEEFYKFIKPILEKMDGTEELLVKLNREDLLRKQRTFDNGSIPHQIHLGELHAILRRQEDFYPFLKDNREKIEKILTFRIPYYVGPLARGNSRFAWMTRKSEETITPWNFEEVVDKGASAQSFIERMTNFDKNLPNEKVLPKHSLLYEYFTVYNELTKVKYVTEGMRKPAFLSGEQKKAIVDLLFKTNRKVTVKQLKEDYFKKIECFDSVEISGVEDRFNASLGTYHDLLKIIKDKDFLDNEENEDILEDIVLTLTLFEDREMIEERLKTYAHLFDDKVMKQLKRRRYTGWGRLSRKLINGIRDKQSGKTILDFLKSDGFANRNFMQLIHDDSLTFKEDIQKAQVSGQGDSLHEHIANLAGSPAIKKGILQTVKVVDELVKVMGRHKPENIVIEMARENQTTQKGQKNSRERMKRIEEGIKELGSQILKEHPVENTQLQNEKLYLYYLQNGRDMYVDQELDINRLSDYDVDHIVPQSFLKDDSIDNKVLTRSDKARGKSDNVPSEEVVKKMKNYWRQLLNAKLITQRKFDNLTKAERGGLSELDKAGFIKRQLVETRQITKHVAQILDSRMNTKYDENDKLIREVKVITLKSKLVSDFRKDFQFYKVREINNYHHAHDAYLNAVVGTALIKKYPKLESEFVYGDYKVYDVRKMIAKSEQEIGKATAKYFFYSNIMNFFKTEITLANGEIRKRPLIETNGETGEIVWDKGRDFATVRKVLSMPQVNIVKKTEVQTGGFSKESILPKRNSDKLIARKKDWDPKKYGGFDSPTVAYSVLVVAKVEKGKSKKLKSVKELLGITIMERSSFEKNPIDFLEAKGYKEVKKDLIIKLPKYSLFELENGRKRMLASAGELQKGNELALPSKYVNFLYLASHYEKLKGSPEDNEQKQLFVEQHKHYLDEIIEQISEFSKRVILADANLDKVLSAYNKHRDKPIREQAENIIHLFTLTNLGAPAAFKYFDTTIDRKRYTSTKEVLDATLIHQSITGLYETRIDLSQLGGDGGEAAAKGGSPAPGGTLGDQGSRGSDPLPEPRVTLTVEGIPTEFLVNTGAEHSVLTKPMGKMGSKRTVVAGATGSKVYPWTTKRLLKIGQKQVTHSFLVIPECPAPLLGRDLLTKLKAQIQFSTEGPQVTWEDRPAMCLVLNLEEEYRLHEKPVPPSIDPSWLQLFPMVWAEKAGMGLANQVPPVVVELKSDASPVAVRQYPMSKEAREGIRPHIQRFLDLGILVPCQSPWNTPLLPVKKPGTNDYRPVQDLREVNKRVQDIHPTVPNPYNLLSSLPPSHTWYSVLDLKDAFFCLKLHPNSQPLFAFEWRDPEKGNTGQLTWTRLPQGFKNSPTLFNEALHRDLASFRALNPQVVMLQYVDDLLVAAPTYRDCKEGTRRLLQELSKLGYRVSAKKAQLCREEVTYLGYLLKGGKRWLTPARKATVMKIPTPTTPRQVREFLGKAGFCRLFIPGFASLAAPLYPLTRPKVPFTWTEAHQEAFGRIKEALLSAPALALPDLTKPFALYVDEKEGVARGVLTQTLGPWRRPVAYLSKKLDPVASGWPTCLKAIAAVALLLKDADKLTLGQNVLVIAPHNLESIVRQPPDRWMTNARMTHYQSLLLNERVSFAPPAILNPATLLPVESDDTPIHICSEILAEETGTRPDLRDQPLPGVPAWYTDGSSFIMDGRRQAGAAIVDNKRTVWASNLPEGTSAQKAELIALTQALRLAEGKSINIYTDSRYAFATAHVHGAIYKQRGWLTSAGKDIKNKEEILALLEAIHLPKRVAIIHCPGHQRGTDPVATGNRKADEAAKQAAQSTRILTETTKNAGKRTADGSEFEKRTADGSEFESPKKKAKVE

SEQ ID NO: 1834 - protein, 2216 aa, synthetic construct
MPAAKRVKLDGGDKKYSIGLDIGTNSVGWAVITDEYKVPSKKFKVLGNTDRHSIKKNLIGALLFDSGETAEATRLKRTARRRYTRRKNRICYLQEIFSNEMAKVDDSFFHRLEESFLVEEDKKHERHPIFGNIVDEVAYHEKYPTIYHLRKKLVDSTDKADLRLIYLALAHMIKFRGHFLIEGDLNPDNSDVDKLFIQLVQTYNQLFEENPINASGVDAKAILSARLSKSRRLENLIAQLPGEKKNGLFGNLIALSLGLTPNFKSNFDLAEDAKLQLSKDTYDDDLDNLLAQIGDQYADLFLAAKNLSDAILLSDILRVNTEITKAPLSASMIKRYDEHHQDLTLLKALVRQQLPEKYKEIFFDQSKNGYAGYIDGGASQEEFYKFIKPILEKMDGTEELLVKLNREDLLRKQRTFDNGSIPHQIHLGELHAILRRQEDFYPFLKDNREKIEKILTFRIPYYVGPLARGNSRFAWMTRKSEETITPWNFEEVVDKGASAQSFIERMTNFDKNLPNEKVLPKHSLLYEYFTVYNELTKVKYVTEGMRKPAFLSGEQKKAIVDLLFKTNRKVTVKQLKEDYFKKIECFDSVEISGVEDRFNASLGTYHDLLKIIKDKDFLDNEENEDILEDIVLTLTLFEDREMIEERLKTYAHLFDDKVMKQLKRRRYTGWGRLSRKLINGIRDKQSGKTILDFLKSDGFANRNFMQLIHDDSLTFKEDIQKAQVSGQGDSLHEHIANLAGSPAIKKGILQTVKVVDELVKVMGRHKPENIVIEMARENQTTQKGQKNSRERMKRIEEGIKELGSQILKEHPVENTQLQNEKLYLYYLQNGRDMYVDQELDINRLSDYDVDHIVPQSFLKDDSIDNKVLTRSDKARGKSDNVPSEEVVKKMKNYWRQLLNAKLITQRKFDNLTKAERGGLSELDKAGFIKRQLVETRQITKHVAQILDSRMNTKYDENDKLIREVKVITLKSKLVSDFRKDFQFYKVREINNYHHAHDAYLNAVVGTALIKKYPKLESEFVYGDYKVYDVRKMIAKSEQEIGKATAKYFFYSNIMNFFKTEITLANGEIRKRPLIETNGETGEIVWDKGRDFATVRKVLSMPQVNIVKKTEVQTGGFSKESILPKRNSDKLIARKKDWDPKKYGGFDSPTVAYSVLVVAKVEKGKSKKLKSVKELLGITIMERSSFEKNPIDFLEAKGYKEVKKDLIIKLPKYSLFELENGRKRMLASAGELQKGNELALPSKYVNFLYLASHYEKLKGSPEDNEQKQLFVEQHKHYLDEIIEQISEFSKRVILADANLDKVLSAYNKHRDKPIREQAENIIHLFTLTNLGAPAAFKYFDTTIDRKRYTSTKEVLDATLIHQSITGLYETRIDLSQLGGDGGGGGGGSPAPGGTLGDQGSRGSDPLPEPRVTLTVEGIPTEFLVNTGAEHSVLTKPMGKMGSKRTVVAGATGSKVYPWTTKRLLKIGQKQVTHSFLVIPECPAPLLGRDLLTKLKAQIQFSTEGPQVTWEDRPAMCLVLNLEEEYRLHEKPVPPSIDPSWLQLFPMVWAEKAGMGLANQVPPVVVELKSDASPVAVRQYPMSKEAREGIRPHIQRFLDLGILVPCQSPWNTPLLPVKKPGTNDYRPVQDLREVNKRVQDIHPTVPNPYNLLSSLPPSHTWYSVLDLKDAFFCLKLHPNSQPLFAFEWRDPEKGNTGQLTWTRLPQGFKNSPTLFNEALHRDLASFRALNPQVVMLQYVDDLLVAAPTYRDCKEGTRRLLQELSKLGYRVSAKKAQLCREEVTYLGYLLKGGKRWLTPARKATVMKIPTPTTPRQVREFLGKAGFCRLFIPGFASLAAPLYPLTRPKVPFTWTEAHQEAFGRIKEALLSAPALALPDLTKPFALYVDEKEGVARGVLTQTLGPWRRPVAYLSKKLDPVASGWPTCLKAIAAVALLLKDADKLTLGQNVLVIAPHNLESIVRQPPDRWMTNARMTHYQSLLLNERVSFAPPAILNPATLLPVESDDTPIHICSEILAEETGTRPDLRDQPLPGVPAWYTDGSSFIMDGRRQAGAAIVDNKRTVWASNLPEGTSAQKAELIALTQALRLAEGKSINIYTDSRYAFATAHVHGAIYKQRGWLTSAGKDIKNKEEILALLEAIHLPKRVAIIHCPGHQRGTDPVATGNRKADEAAKQAAQSTRILTETTKNAGKRTADGSEFEKRTADGSEFESPKKKAKVE

SEQ ID NO: 1835 - protein, 2216 aa, synthetic construct
MPAAKRVKLDGGDKKYSIGLDIGTNSVGWAVITDEYKVPSKKFKVLGNTDRHSIKKNLIGALLFDSGETAEATRLKRTARRRYTRRKNRICYLQEIFSNEMAKVDDSFFHRLEESFLVEEDKKHERHPIFGNIVDEVAYHEKYPTIYHLRKKLVDSTDKADLRLIYLALAHMIKFRGHFLIEGDLNPDNSDVDKLFIQLVQTYNQLFEENPINASGVDAKAILSARLSKSRRLENLIAQLPGEKKNGLFGNLIALSLGLTPNFKSNFDLAEDAKLQLSKDTYDDDLDNLLAQIGDQYADLFLAAKNLSDAILLSDILRVNTEITKAPLSASMIKRYDEHHQDLTLLKALVRQQLPEKYKEIFFDQSKNGYAGYIDGGASQEEFYKFIKPILEKMDGTEELLVKLNREDLLRKQRTFDNGSIPHQIHLGELHAILRRQEDFYPFLKDNREKIEKILTFRIPYYVGPLARGNSRFAWMTRKSEETITPWNFEEVVDKGASAQSFIERMTNFDKNLPNEKVLPKHSLLYEYFTVYNELTKVKYVTEGMRKPAFLSGEQKKAIVDLLFKTNRKVTVKQLKEDYFKKIECFDSVEISGVEDRFNASLGTYHDLLKIIKDKDFLDNEENEDILEDIVLTLTLFEDREMIEERLKTYAHLFDDKVMKQLKRRRYTGWGRLSRKLINGIRDKQSGKTILDFLKSDGFANRNFMQLIHDDSLTFKEDIQKAQVSGQGDSLHEHIANLAGSPAIKKGILQTVKVVDELVKVMGRHKPENIVIEMARENQTTQKGQKNSRERMKRIEEGIKELGSQILKEHPVENTQLQNEKLYLYYLQNGRDMYVDQELDINRLSDYDVDHIVPQSFLKDDSIDNKVLTRSDKARGKSDNVPSEEVVKKMKNYWRQLLNAKLITQRKFDNLTKAERGGLSELDKAGFIKRQLVETRQITKHVAQILDSRMNTKYDENDKLIREVKVITLKSKLVSDFRKDFQFYKVREINNYHHAHDAYLNAVVGTALIKKYPKLESEFVYGDYKVYDVRKMIAKSEQEIGKATAKYFFYSNIMNFFKTEITLANGEIRKRPLIETNGETGEIVWDKGRDFATVRKVLSMPQVNIVKKTEVQTGGFSKESILPKRNSDKLIARKKDWDPKKYGGFDSPTVAYSVLVVAKVEKGKSKKLKSVKELLGITIMERSSFEKNPIDFLEAKGYKEVKKDLIIKLPKYSLFELENGRKRMLASAGELQKGNELALPSKYVNFLYLASHYEKLKGSPEDNEQKQLFVEQHKHYLDEIIEQISEFSKRVILADANLDKVLSAYNKHRDKPIREQAENIIHLFTLTNLGAPAAFKYFDTTIDRKRYTSTKEVLDATLIHQSITGLYETRIDLSQLGGDGGPAPGGGGGSGGTLGDQGSRGSDPLPEPRVTLTVEGIPTEFLVNTGAEHSVLTKPMGKMGSKRTVVAGATGSKVYPWTTKRLLKIGQKQVTHSFLVIPECPAPLLGRDLLTKLKAQIQFSTEGPQVTWEDRPAMCLVLNLEEEYRLHEKPVPPSIDPSWLQLFPMVWAEKAGMGLANQVPPVVVELKSDASPVAVRQYPMSKEAREGIRPHIQRFLDLGILVPCQSPWNTPLLPVKKPGTNDYRPVQDLREVNKRVQDIHPTVPNPYNLLSSLPPSHTWYSVLDLKDAFFCLKLHPNSQPLFAFEWRDPEKGNTGQLTWTRLPQGFKNSPTLFNEALHRDLASFRALNPQVVMLQYVDDLLVAAPTYRDCKEGTRRLLQELSKLGYRVSAKKAQLCREEVTYLGYLLKGGKRWLTPARKATVMKIPTPTTPRQVREFLGKAGFCRLFIPGFASLAAPLYPLTRPKVPFTWTEAHQEAFGRIKEALLSAPALALPDLTKPFALYVDEKEGVARGVLTQTLGPWRRPVAYLSKKLDPVASGWPTCLKAIAAVALLLKDADKLTLGQNVLVIAPHNLESIVRQPPDRWMTNARMTHYQSLLLNERVSFAPPAILNPATLLPVESDDTPIHICSEILAEETGTRPDLRDQPLPGVPAWYTDGSSFIMDGRRQAGAAIVDNKRTVWASNLPEGTSAQKAELIALTQALRLAEGKSINIYTDSRYAFATAHVHGAIYKQRGWLTSAGKDIKNKEEILALLEAIHLPKRVAIIHCPGHQRGTDPVATGNRKADEAAKQAAQSTRILTETTKNAGKRTADGSEFEKRTADGSEFESPKKKAKVE

SEQ ID NO: 1836 - protein, 2118 aa, synthetic construct
MPAAKRVKLDGGDKKYSIGLDIGTNSVGWAVITDEYKVPSKKFKVLGNTDRHSIKKNLIGALLFDSGETAEATRLKRTARRRYTRRKNRICYLQEIFSNEMAKVDDSFFHRLEESFLVEEDKKHERHPIFGNIVDEVAYHEKYPTIYHLRKKLVDSTDKADLRLIYLALAHMIKFRGHFLIEGDLNPDNSDVDKLFIQLVQTYNQLFEENPINASGVDAKAILSARLSKSRRLENLIAQLPGEKKNGLFGNLIALSLGLTPNFKSNFDLAEDAKLQLSKDTYDDDLDNLLAQIGDQYADLFLAAKNLSDAILLSDILRVNTEITKAPLSASMIKRYDEHHQDLTLLKALVRQQLPEKYKEIFFDQSKNGYAGYIDGGASQEEFYKFIKPILEKMDGTEELLVKLNREDLLRKQRTFDNGSIPHQIHLGELHAILRRQEDFYPFLKDNREKIEKILTFRIPYYVGPLARGNSRFAWMTRKSEETITPWNFEEVVDKGASAQSFIERMTNFDKNLPNEKVLPKHSLLYEYFTVYNELTKVKYVTEGMRKPAFLSGEQKKAIVDLLFKTNRKVTVKQLKEDYFKKIECFDSVEISGVEDRFNASLGTYHDLLKIIKDKDFLDNEENEDILEDIVLTLTLFEDREMIEERLKTYAHLFDDKVMKQLKRRRYTGWGRLSRKLINGIRDKQSGKTILDFLKSDGFANRNFMQLIHDDSLTFKEDIQKAQVSGQGDSLHEHIANLAGSPAIKKGILQTVKVVDELVKVMGRHKPENIVIEMARENQTTQKGQKNSRERMKRIEEGIKELGSQILKEHPVENTQLQNEKLYLYYLQNGRDMYVDQELDINRLSDYDVDHIVPQSFLKDDSIDNKVLTRSDKARGKSDNVPSEEVVKKMKNYWRQLLNAKLITQRKFDNLTKAERGGLSELDKAGFIKRQLVETRQITKHVAQILDSRMNTKYDENDKLIREVKVITLKSKLVSDFRKDFQFYKVREINNYHHAHDAYLNAVVGTALIKKYPKLESEFVYGDYKVYDVRKMIAKSEQEIGKATAKYFFYSNIMNFFKTEITLANGEIRKRPLIETNGETGEIVWDKGRDFATVRKVLSMPQVNIVKKTEVQTGGFSKESILPKRNSDKLIARKKDWDPKKYGGFDSPTVAYSVLVVAKVEKGKSKKLKSVKELLGITIMERSSFEKNPIDFLEAKGYKEVKKDLIIKLPKYSLFELENGRKRMLASAGELQKGNELALPSKYVNFLYLASHYEKLKGSPEDNEQKQLFVEQHKHYLDEIIEQISEFSKRVILADANLDKVLSAYNKHRDKPIREQAENIIHLFTLTNLGAPAAFKYFDTTIDRKRYTSTKEVLDATLIHQSITGLYETRIDLSQLGGDGGSGGSSGGSSGSETPGTSESATPESSGGSSGGSSGGTLNLEDEYRLYETSAEPEVSPGSTWLSDFPQAWAETGGMGLAVRQAPLIIPLKATSTPVSIKQYPMSQEAKLGIKPHIQRLLDQGILVPCQSPWNTPLLPVKKPGTNDYRPVQDLREVNKRVEDIHPTVPNPYNLLSGLPPSHRWYTVLDLKDAFFCLRLHPTSQPLFAFEWRDPGMGISGQLTWTRLPQGFKNSPTLFDEALHRDLADFRIQHPDLILLQYVDDILLAATSELDCQQGTRALLLTLGNLGYRASAKKAQLCQKQVKYLGYLLKEGQRWLTEARKETVMGQPTPKTPRQLREFLGTAGFCRLWIPGFAEMAAPLYPLTKTGTLFNWGPDQQKAYQEIKQALLTAPALGLPDLTKPFELFVDEKQGYAKGVLTQKLGPWRRPVAYLSKKLDPVAAGWPPCLRMVAAIAVLRKDAGKLTMGQPLVILAPHAVEALVKQPPDRWLSNARMTHYQAMLLDTDRVQFGPVVALNPATLLPLPEEGAPHDCLEILAETHGTRPDLTDQPIPDADHTWYTDGSSFLQEGQRKAGAAVTTETEVIWARALPAGTSAQRAELIALTQALKMAEGKRLNVYTDSRYAFATAHIHGEIYRRRGLLTSEGREIKNKSEILALLKALFLPKRLSIIHCLGHQKGDSAEARGNRLADQAAREAAIKTPPDTSTLLAGKRTADGSEFEKRTADGSEFESPKKKAKVE

SEQ ID NO: 1837 - protein, 2105 aa, synthetic construct
MPAAKRVKLDGGDKKYSIGLDIGTNSVGWAVITDEYKVPSKKFKVLGNTDRHSIKKNLIGALLFDSGETAEATRLKRTARRRYTRRKNRICYLQEIFSNEMAKVDDSFFHRLEESFLVEEDKKHERHPIFGNIVDEVAYHEKYPTIYHLRKKLVDSTDKADLRLIYLALAHMIKFRGHFLIEGDLNPDNSDVDKLFIQLVQTYNQLFEENPINASGVDAKAILSARLSKSRRLENLIAQLPGEKKNGLFGNLIALSLGLTPNFKSNFDLAEDAKLQLSKDTYDDDLDNLLAQIGDQYADLFLAAKNLSDAILLSDILRVNTEITKAPLSASMIKRYDEHHQDLTLLKALVRQQLPEKYKEIFFDQSKNGYAGYIDGGASQEEFYKFIKPILEKMDGTEELLVKLNREDLLRKQRTFDNGSIPHQIHLGELHAILRRQEDFYPFLKDNREKIEKILTFRIPYYVGPLARGNSRFAWMTRKSEETITPWNFEEVVDKGASAQSFIERMTNFDKNLPNEKVLPKHSLLYEYFTVYNELTKVKYVTEGMRKPAFLSGEQKKAIVDLLFKTNRKVTVKQLKEDYFKKIECFDSVEISGVEDRFNASLGTYHDLLKIIKDKDFLDNEENEDILEDIVLTLTLFEDREMIEERLKTYAHLFDDKVMKQLKRRRYTGWGRLSRKLINGIRDKQSGKTILDFLKSDGFANRNFMQLIHDDSLTFKEDIQKAQVSGQGDSLHEHIANLAGSPAIKKGILQTVKVVDELVKVMGRHKPENIVIEMARENQTTQKGQKNSRERMKRIEEGIKELGSQILKEHPVENTQLQNEKLYLYYLQNGRDMYVDQELDINRLSDYDVDHIVPQSFLKDDSIDNKVLTRSDKARGKSDNVPSEEVVKKMKNYWRQLLNAKLITQRKFDNLTKAERGGLSELDKAGFIKRQLVETRQITKHVAQILDSRMNTKYDENDKLIREVKVITLKSKLVSDFRKDFQFYKVREINNYHHAHDAYLNAVVGTALIKKYPKLESEFVYGDYKVYDVRKMIAKSEQEIGKATAKYFFYSNIMNFFKTEITLANGEIRKRPLIETNGETGEIVWDKGRDFATVRKVLSMPQVNIVKKTEVQTGGFSKESILPKRNSDKLIARKKDWDPKKYGGFDSPTVAYSVLVVAKVEKGKSKKLKSVKELLGITIMERSSFEKNPIDFLEAKGYKEVKKDLIIKLPKYSLFELENGRKRMLASAGELQKGNELALPSKYVNFLYLASHYEKLKGSPEDNEQKQLFVEQHKHYLDEIIEQISEFSKRVILADANLDKVLSAYNKHRDKPIREQAENIIHLFTLTNLGAPAAFKYFDTTIDRKRYTSTKEVLDATLIHQSITGLYETRIDLSQLGGDGGEAAAKEAAAKEAAAKEAAAKGGTLNLEDEYRLYETSAEPEVSPGSTWLSDFPQAWAETGGMGLAVRQAPLIIPLKATSTPVSIKQYPMSQEAKLGIKPHIQRLLDQGILVPCQSPWNTPLLPVKKPGTNDYRPVQDLREVNKRVEDIHPTVPNPYNLLSGLPPSHRWYTVLDLKDAFFCLRLHPTSQPLFAFEWRDPGMGISGQLTWTRLPQGFKNSPTLFDEALHRDLADFRIQHPDLILLQYVDDILLAATSELDCQQGTRALLLTLGNLGYRASAKKAQLCQKQVKYLGYLLKEGQRWLTEARKETVMGQPTPKTPRQLREFLGTAGFCRLWIPGFAEMAAPLYPLTKTGTLFNWGPDQQKAYQEIKQALLTAPALGLPDLTKPFELFVDEKQGYAKGVLTQKLGPWRRPVAYLSKKLDPVAAGWPPCLRMVAAIAVLRKDAGKLTMGQPLVILAPHAVEALVKQPPDRWLSNARMTHYQAMLLDTDRVQFGPVVALNPATLLPLPEEGAPHDCLEILAETHGTRPDLTDQPIPDADHTWYTDGSSFLQEGQRKAGAAVTTETEVIWARALPAGTSAQRAELIALTQALKMAEGKRLNVYTDSRYAFATAHIHGEIYRRRGLLTSEGREIKNKSEILALLKALFLPKRLSIIHCLGHQKGDSAEARGNRLADQAAREAAIKTPPDTSTLLAGKRTADGSEFEKRTADGSEFESPKKKAKVE

SEQ ID NO: 1838 - protein, 2094 aa, synthetic construct
MPAAKRVKLDGGDKKYSIGLDIGTNSVGWAVITDEYKVPSKKFKVLGNTDRHSIKKNLIGALLFDSGETAEATRLKRTARRRYTRRKNRICYLQEIFSNEMAKVDDSFFHRLEESFLVEEDKKHERHPIFGNIVDEVAYHEKYPTIYHLRKKLVDSTDKADLRLIYLALAHMIKFRGHFLIEGDLNPDNSDVDKLFIQLVQTYNQLFEENPINASGVDAKAILSARLSKSRRLENLIAQLPGEKKNGLFGNLIALSLGLTPNFKSNFDLAEDAKLQLSKDTYDDDLDNLLAQIGDQYADLFLAAKNLSDAILLSDILRVNTEITKAPLSASMIKRYDEHHQDLTLLKALVRQQLPEKYKEIFFDQSKNGYAGYIDGGASQEEFYKFIKPILEKMDGTEELLVKLNREDLLRKQRTFDNGSIPHQIHLGELHAILRRQEDFYPFLKDNREKIEKILTFRIPYYVGPLARGNSRFAWMTRKSEETITPWNFEEVVDKGASAQSFIERMTNFDKNLPNEKVLPKHSLLYEYFTVYNELTKVKYVTEGMRKPAFLSGEQKKAIVDLLFKTNRKVTVKQLKEDYFKKIECFDSVEISGVEDRFNASLGTYHDLLKIIKDKDFLDNEENEDILEDIVLTLTLFEDREMIEERLKTYAHLFDDKVMKQLKRRRYTGWGRLSRKLINGIRDKQSGKTILDFLKSDGFANRNFMQLIHDDSLTFKEDIQKAQVSGQGDSLHEHIANLAGSPAIKKGILQTVKVVDELVKVMGRHKPENIVIEMARENQTTQKGQKNSRERMKRIEEGIKELGSQILKEHPVENTQLQNEKLYLYYLQNGRDMYVDQELDINRLSDYDVDHIVPQSFLKDDSIDNKVLTRSDKARGKSDNVPSEEVVKKMKNYWRQLLNAKLITQRKFDNLTKAERGGLSELDKAGFIKRQLVETRQITKHVAQILDSRMNTKYDENDKLIREVKVITLKSKLVSDFRKDFQFYKVREINNYHHAHDAYLNAVVGTALIKKYPKLESEFVYGDYKVYDVRKMIAKSEQEIGKATAKYFFYSNIMNFFKTEITLANGEIRKRPLIETNGETGEIVWDKGRDFATVRKVLSMPQVNIVKKTEVQTGGFSKESILPKRNSDKLIARKKDWDPKKYGGFDSPTVAYSVLVVAKVEKGKSKKLKSVKELLGITIMERSSFEKNPIDFLEAKGYKEVKKDLIIKLPKYSLFELENGRKRMLASAGELQKGNELALPSKYVNFLYLASHYEKLKGSPEDNEQKQLFVEQHKHYLDEIIEQISEFSKRVILADANLDKVLSAYNKHRDKPIREQAENIIHLFTLTNLGAPAAFKYFDTTIDRKRYTSTKEVLDATLIHQSITGLYETRIDLSQLGGDGGGSSGGGPAPGGTLNLEDEYRLYETSAEPEVSPGSTWLSDFPQAWAETGGMGLAVRQAPLIIPLKATSTPVSIKQYPMSQEAKLGIKPHIQRLLDQGILVPCQSPWNTPLLPVKKPGTNDYRPVQDLREVNKRVEDIHPTVPNPYNLLSGLPPSHRWYTVLDLKDAFFCLRLHPTSQPLFAFEWRDPGMGISGQLTWTRLPQGFKNSPTLFDEALHRDLADFRIQHPDLILLQYVDDILLAATSELDCQQGTRALLLTLGNLGYRASAKKAQLCQKQVKYLGYLLKEGQRWLTEARKETVMGQPTPKTPRQLREFLGTAGFCRLWIPGFAEMAAPLYPLTKTGTLFNWGPDQQKAYQEIKQALLTAPALGLPDLTKPFELFVDEKQGYAKGVLTQKLGPWRRPVAYLSKKLDPVAAGWPPCLRMVAAIAVLRKDAGKLTMGQPLVILAPHAVEALVKQPPDRWLSNARMTHYQAMLLDTDRVQFGPVVALNPATLLPLPEEGAPHDCLEILAETHGTRPDLTDQPIPDADHTWYTDGSSFLQEGQRKAGAAVTTETEVIWARALPAGTSAQRAELIALTQALKMAEGKRLNVYTDSRYAFATAHIHGEIYRRRGLLTSEGREIKNKSEILALLKALFLPKRLSIIHCLGHQKGDSAEARGNRLADQAAREAAIKTPPDTSTLLAGKRTADGSEFEKRTADGSEFESPKKKAKVE

SEQ ID NO: 1839 - protein, 2096 aa, synthetic construct
MPAAKRVKLDGGDKKYSIGLDIGTNSVGWAVITDEYKVPSKKFKVLGNTDRHSIKKNLIGALLFDSGETAEATRLKRTARRRYTRRKNRICYLQEIFSNEMAKVDDSFFHRLEESFLVEEDKKHERHPIFGNIVDEVAYHEKYPTIYHLRKKLVDSTDKADLRLIYLALAHMIKFRGHFLIEGDLNPDNSDVDKLFIQLVQTYNQLFEENPINASGVDAKAILSARLSKSRRLENLIAQLPGEKKNGLFGNLIALSLGLTPNFKSNFDLAEDAKLQLSKDTYDDDLDNLLAQIGDQYADLFLAAKNLSDAILLSDILRVNTEITKAPLSASMIKRYDEHHQDLTLLKALVRQQLPEKYKEIFFDQSKNGYAGYIDGGASQEEFYKFIKPILEKMDGTEELLVKLNREDLLRKQRTFDNGSIPHQIHLGELHAILRRQEDFYPFLKDNREKIEKILTFRIPYYVGPLARGNSRFAWMTRKSEETITPWNFEEVVDKGASAQSFIERMTNFDKNLPNEKVLPKHSLLYEYFTVYNELTKVKYVTEGMRKPAFLSGEQKKAIVDLLFKTNRKVTVKQLKEDYFKKIECFDSVEISGVEDRFNASLGTYHDLLKIIKDKDFLDNEENEDILEDIVLTLTLFEDREMIEERLKTYAHLFDDKVMKQLKRRRYTGWGRLSRKLINGIRDKQSGKTILDFLKSDGFANRNFMQLIHDDSLTFKEDIQKAQVSGQGDSLHEHIANLAGSPAIKKGILQTVKVVDELVKVMGRHKPENIVIEMARENQTTQKGQKNSRERMKRIEEGIKELGSQILKEHPVENTQLQNEKLYLYYLQNGRDMYVDQELDINRLSDYDVDHIVPQSFLKDDSIDNKVLTRSDKARGKSDNVPSEEVVKKMKNYWRQLLNAKLITQRKFDNLTKAERGGLSELDKAGFIKRQLVETRQITKHVAQILDSRMNTKYDENDKLIREVKVITLKSKLVSDFRKDFQFYKVREINNYHHAHDAYLNAVVGTALIKKYPKLESEFVYGDYKVYDVRKMIAKSEQEIGKATAKYFFYSNIMNFFKTEITLANGEIRKRPLIETNGETGEIVWDKGRDFATVRKVLSMPQVNIVKKTEVQTGGFSKESILPKRNSDKLIARKKDWDPKKYGGFDSPTVAYSVLVVAKVEKGKSKKLKSVKELLGITIMERSSFEKNPIDFLEAKGYKEVKKDLIIKLPKYSLFELENGRKRMLASAGELQKGNELALPSKYVNFLYLASHYEKLKGSPEDNEQKQLFVEQHKHYLDEIIEQISEFSKRVILADANLDKVLSAYNKHRDKPIREQAENIIHLFTLTNLGAPAAFKYFDTTIDRKRYTSTKEVLDATLIHQSITGLYETRIDLSQLGGDGGEAAAKGGGPAPGGTLNLEDEYRLYETSAEPEVSPGSTWLSDFPQAWAETGGMGLAVRQAPLIIPLKATSTPVSIKQYPMSQEAKLGIKPHIQRLLDQGILVPCQSPWNTPLLPVKKPGTNDYRPVQDLREVNKRVEDIHPTVPNPYNLLSGLPPSHRWYTVLDLKDAFFCLRLHPTSQPLFAFEWRDPGMGISGQLTWTRLPQGFKNSPTLFDEALHRDLADFRIQHPDLILLQYVDDILLAATSELDCQQGTRALLLTLGNLGYRASAKKAQLCQKQVKYLGYLLKEGQRWLTEARKETVMGQPTPKTPRQLREFLGTAGFCRLWIPGFAEMAAPLYPLTKTGTLFNWGPDQQKAYQEIKQALLTAPALGLPDLTKPFELFVDEKQGYAKGVLTQKLGPWRRPVAYLSKKLDPVAAGWPPCLRMVAAIAVLRKDAGKLTMGQPLVILAPHAVEALVKQPPDRWLSNARMTHYQAMLLDTDRVQFGPVVALNPATLLPLPEEGAPHDCLEILAETHGTRPDLTDQPIPDADHTWYTDGSSFLQEGQRKAGAAVTTETEVIWARALPAGTSAQRAELIALTQALKMAEGKRLNVYTDSRYAFATAHIHGEIYRRRGLLTSEGREIKNKSEILALLKALFLPKRLSIIHCLGHQKGDSAEARGNRLADQAAREAAIKTPPDTSTLLAGKRTADGSEFEKRTADGSEFESPKKKAKVE

SEQ ID NO: 1840 - protein, 2096 aa, synthetic construct
MPAAKRVKLDGGDKKYSIGLDIGTNSVGWAVITDEYKVPSKKFKVLGNTDRHSIKKNLIGALLFDSGETAEATRLKRTARRRYTRRKNRICYLQEIFSNEMAKVDDSFFHRLEESFLVEEDKKHERHPIFGNIVDEVAYHEKYPTIYHLRKKLVDSTDKADLRLIYLALAHMIKFRGHFLIEGDLNPDNSDVDKLFIQLVQTYNQLFEENPINASGVDAKAILSARLSKSRRLENLIAQLPGEKKNGLFGNLIALSLGLTPNFKSNFDLAEDAKLQLSKDTYDDDLDNLLAQIGDQYADLFLAAKNLSDAILLSDILRVNTEITKAPLSASMIKRYDEHHQDLTLLKALVRQQLPEKYKEIFFDQSKNGYAGYIDGGASQEEFYKFIKPILEKMDGTEELLVKLNREDLLRKQRTFDNGSIPHQIHLGELHAILRRQEDFYPFLKDNREKIEKILTFRIPYYVGPLARGNSRFAWMTRKSEETITPWNFEEVVDKGASAQSFIERMTNFDKNLPNEKVLPKHSLLYEYFTVYNELTKVKYVTEGMRKPAFLSGEQKKAIVDLLFKTNRKVTVKQLKEDYFKKIECFDSVEISGVEDRFNASLGTYHDLLKIIKDKDFLDNEENEDILEDIVLTLTLFEDREMIEERLKTYAHLFDDKVMKQLKRRRYTGWGRLSRKLINGIRDKQSGKTILDFLKSDGFANRNFMQLIHDDSLTFKEDIQKAQVSGQGDSLHEHIANLAGSPAIKKGILQTVKVVDELVKVMGRHKPENIVIEMARENQTTQKGQKNSRERMKRIEEGIKELGSQILKEHPVENTQLQNEKLYLYYLQNGRDMYVDQELDINRLSDYDVDHIVPQSFLKDDSIDNKVLTRSDKARGKSDNVPSEEVVKKMKNYWRQLLNAKLITQRKFDNLTKAERGGLSELDKAGFIKRQLVETRQITKHVAQILDSRMNTKYDENDKLIREVKVITLKSKLVSDFRKDFQFYKVREINNYHHAHDAYLNAVVGTALIKKYPKLESEFVYGDYKVYDVRKMIAKSEQEIGKATAKYFFYSNIMNFFKTEITLANGEIRKRPLIETNGETGEIVWDKGRDFATVRKVLSMPQVNIVKKTEVQTGGFSKESILPKRNSDKLIARKKDWDPKKYGGFDSPTVAYSVLVVAKVEKGKSKKLKSVKELLGITIMERSSFEKNPIDFLEAKGYKEVKKDLIIKLPKYSLFELENGRKRMLASAGELQKGNELALPSKYVNFLYLASHYEKLKGSPEDNEQKQLFVEQHKHYLDEIIEQISEFSKRVILADANLDKVLSAYNKHRDKPIREQAENIIHLFTLTNLGAPAAFKYFDTTIDRKRYTSTKEVLDATLIHQSITGLYETRIDLSQLGGDGGGGGPAPEAAAKGGTLNLEDEYRLYETSAEPEVSPGSTWLSDFPQAWAETGGMGLAVRQAPLIIPLKATSTPVSIKQYPMSQEAKLGIKPHIQRLLDQGILVPCQSPWNTPLLPVKKPGTNDYRPVQDLREVNKRVEDIHPTVPNPYNLLSGLPPSHRWYTVLDLKDAFFCLRLHPTSQPLFAFEWRDPGMGISGQLTWTRLPQGFKNSPTLFDEALHRDLADFRIQHPDLILLQYVDDILLAATSELDCQQGTRALLLTLGNLGYRASAKKAQLCQKQVKYLGYLLKEGQRWLTEARKETVMGQPTPKTPRQLREFLGTAGFCRLWIPGFAEMAAPLYPLTKTGTLFNWGPDQQKAYQEIKQALLTAPALGLPDLTKPFELFVDEKQGYAKGVLTQKLGPWRRPVAYLSKKLDPVAAGWPPCLRMVAAIAVLRKDAGKLTMGQPLVILAPHAVEALVKQPPDRWLSNARMTHYQAMLLDTDRVQFGPVVALNPATLLPLPEEGAPHDCLEILAETHGTRPDLTDQPIPDADHTWYTDGSSFLQEGQRKAGAAVTTETEVIWARALPAGTSAQRAELIALTQALKMAEGKRLNVYTDSRYAFATAHIHGEIYRRRGLLTSEGREIKNKSEILALLKALFLPKRLSIIHCLGHQKGDSAEARGNRLADQAAREAAIKTPPDTSTLLAGKRTADGSEFEKRTADGSEFESPKKKAKVE

SEQ ID NO: 1841 - protein, 2096 aa, synthetic construct
MPAAKRVKLDGGDKKYSIGLDIGTNSVGWAVITDEYKVPSKKFKVLGNTDRHSIKKNLIGALLFDSGETAEATRLKRTARRRYTRRKNRICYLQEIFSNEMAKVDDSFFHRLEESFLVEEDKKHERHPIFGNIVDEVAYHEKYPTIYHLRKKLVDSTDKADLRLIYLALAHMIKFRGHFLIEGDLNPDNSDVDKLFIQLVQTYNQLFEENPINASGVDAKAILSARLSKSRRLENLIAQLPGEKKNGLFGNLIALSLGLTPNFKSNFDLAEDAKLQLSKDTYDDDLDNLLAQIGDQYADLFLAAKNLSDAILLSDILRVNTEITKAPLSASMIKRYDEHHQDLTLLKALVRQQLPEKYKEIFFDQSKNGYAGYIDGGASQEEFYKFIKPILEKMDGTEELLVKLNREDLLRKQRTFDNGSIPHQIHLGELHAILRRQEDFYPFLKDNREKIEKILTFRIPYYVGPLARGNSRFAWMTRKSEETITPWNFEEVVDKGASAQSFIERMTNFDKNLPNEKVLPKHSLLYEYFTVYNELTKVKYVTEGMRKPAFLSGEQKKAIVDLLFKTNRKVTVKQLKEDYFKKIECFDSVEISGVEDRFNASLGTYHDLLKIIKDKDFLDNEENEDILEDIVLTLTLFEDREMIEERLKTYAHLFDDKVMKQLKRRRYTGWGRLSRKLINGIRDKQSGKTILDFLKSDGFANRNFMQLIHDDSLTFKEDIQKAQVSGQGDSLHEHIANLAGSPAIKKGILQTVKVVDELVKVMGRHKPENIVIEMARENQTTQKGQKNSRERMKRIEEGIKELGSQILKEHPVENTQLQNEKLYLYYLQNGRDMYVDQELDINRLSDYDVDHIVPQSFLKDDSIDNKVLTRSDKARGKSDNVPSEEVVKKMKNYWRQLLNAKLITQRKFDNLTKAERGGLSELDKAGFIKRQLVETRQITKHVAQILDSRMNTKYDENDKLIREVKVITLKSKLVSDFRKDFQFYKVREINNYHHAHDAYLNAVVGTALIKKYPKLESEFVYGDYKVYDVRKMIAKSEQEIGKATAKYFFYSNIMNFFKTEITLANGEIRKRPLIETNGETGEIVWDKGRDFATVRKVLSMPQVNIVKKTEVQTGGFSKESILPKRNSDKLIARKKDWDPKKYGGFDSPTVAYSVLVVAKVEKGKSKKLKSVKELLGITIMERSSFEKNPIDFLEAKGYKEVKKDLIIKLPKYSLFELENGRKRMLASAGELQKGNELALPSKYVNFLYLASHYEKLKGSPEDNEQKQLFVEQHKHYLDEIIEQISEFSKRVILADANLDKVLSAYNKHRDKPIREQAENIIHLFTLTNLGAPAAFKYFDTTIDRKRYTSTKEVLDATLIHQSITGLYETRIDLSQLGGDGGEAAAKGGGGGSGGTLNLEDEYRLYETSAEPEVSPGSTWLSDFPQAWAETGGMGLAVRQAPLIIPLKATSTPVSIKQYPMSQEAKLGIKPHIQRLLDQGILVPCQSPWNTPLLPVKKPGTNDYRPVQDLREVNKRVEDIHPTVPNPYNLLSGLPPSHRWYTVLDLKDAFFCLRLHPTSQPLFAFEWRDPGMGISGQLTWTRLPQGFKNSPTLFDEALHRDLADFRIQHPDLILLQYVDDILLAATSELDCQQGTRALLLTLGNLGYRASAKKAQLCQKQVKYLGYLLKEGQRWLTEARKETVMGQPTPKTPRQLREFLGTAGFCRLWIPGFAEMAAPLYPLTKTGTLFNWGPDQQKAYQEIKQALLTAPALGLPDLTKPFELFVDEKQGYAKGVLTQKLGPWRRPVAYLSKKLDPVAAGWPPCLRMVAAIAVLRKDAGKLTMGQPLVILAPHAVEALVKQPPDRWLSNARMTHYQAMLLDTDRVQFGPVVALNPATLLPLPEEGAPHDCLEILAETHGTRPDLTDQPIPDADHTWYTDGSSFLQEGQRKAGAAVTTETEVIWARALPAGTSAQRAELIALTQALKMAEGKRLNVYTDSRYAFATAHIHGEIYRRRGLLTSEGREIKNKSEILALLKALFLPKRLSIIHCLGHQKGDSAEARGNRLADQAAREAAIKTPPDTSTLLAGKRTADGSEFEKRTADGSEFESPKKKAKVE

SEQ ID NO: 1842 - protein, 2096 aa, synthetic construct
MPAAKRVKLDGGDKKYSIGLDIGTNSVGWAVITDEYKVPSKKFKVLGNTDRHSIKKNLIGALLFDSGETAEATRLKRTARRRYTRRKNRICYLQEIFSNEMAKVDDSFFHRLEESFLVEEDKKHERHPIFGNIVDEVAYHEKYPTIYHLRKKLVDSTDKADLRLIYLALAHMIKFRGHFLIEGDLNPDNSDVDKLFIQLVQTYNQLFEENPINASGVDAKAILSARLSKSRRLENLIAQLPGEKKNGLFGNLIALSLGLTPNFKSNFDLAEDAKLQLSKDTYDDDLDNLLAQIGDQYADLFLAAKNLSDAILLSDILRVNTEITKAPLSASMIKRYDEHHQDLTLLKALVRQQLPEKYKEIFFDQSKNGYAGYIDGGASQEEFYKFIKPILEKMDGTEELLVKLNREDLLRKQRTFDNGSIPHQIHLGELHAILRRQEDFYPFLKDNREKIEKILTFRIPYYVGPLARGNSRFAWMTRKSEETITPWNFEEVVDKGASAQSFIERMTNFDKNLPNEKVLPKHSLLYEYFTVYNELTKVKYVTEGMRKPAFLSGEQKKAIVDLLFKTNRKVTVKQLKEDYFKKIECFDSVEISGVEDRFNASLGTYHDLLKIIKDKDFLDNEENEDILEDIVLTLTLFEDREMIEERLKTYAHLFDDKVMKQLKRRRYTGWGRLSRKLINGIRDKQSGKTILDFLKSDGFANRNFMQLIHDDSLTFKEDIQKAQVSGQGDSLHEHIANLAGSPAIKKGILQTVKVVDELVKVMGRHKPENIVIEMARENQTTQKGQKNSRERMKRIEEGIKELGSQILKEHPVENTQLQNEKLYLYYLQNGRDMYVDQELDINRLSDYDVDHIVPQSFLKDDSIDNKVLTRSDKARGKSDNVPSEEVVKKMKNYWRQLLNAKLITQRKFDNLTKAERGGLSELDKAGFIKRQLVETRQITKHVAQILDSRMNTKYDENDKLIREVKVITLKSKLVSDFRKDFQFYKVREINNYHHAHDAYLNAVVGTALIKKYPKLESEFVYGDYKVYDVRKMIAKSEQEIGKATAKYFFYSNIMNFFKTEITLANGEIRKRPLIETNGETGEIVWDKGRDFATVRKVLSMPQVNIVKKTEVQTGGFSKESILPKRNSDKLIARKKDWDPKKYGGFDSPTVAYSVLVVAKVEKGKSKKLKSVKELLGITIMERSSFEKNPIDFLEAKGYKEVKKDLIIKLPKYSLFELENGRKRMLASAGELQKGNELALPSKYVNFLYLASHYEKLKGSPEDNEQKQLFVEQHKHYLDEIIEQISEFSKRVILADANLDKVLSAYNKHRDKPIREQAENIIHLFTLTNLGAPAAFKYFDTTIDRKRYTSTKEVLDATLIHQSITGLYETRIDLSQLGGDGGPAPEAAAKGSSGGTLNLEDEYRLYETSAEPEVSPGSTWLSDFPQAWAETGGMGLAVRQAPLIIPLKATSTPVSIKQYPMSQEAKLGIKPHIQRLLDQGILVPCQSPWNTPLLPVKKPGTNDYRPVQDLREVNKRVEDIHPTVPNPYNLLSGLPPSHRWYTVLDLKDAFFCLRLHPTSQPLFAFEWRDPGMGISGQLTWTRLPQGFKNSPTLFNEALHRDLADFRIQHPDLILLQYVDDILLAATSELDCQQGTRALLLTLGNLGYRASAKKAQLCQKQVKYLGYLLKEGQRWLTEARKETVMGQPTPKTPRQLREFLGTAGFCRLWIPGFAEMAAPLYPLTKPGTLFNWGPDQQKAYQEIKQALLTAPALGLPDLTKPFELFVDEKQGYAKGVLTQKLGPWRRPVAYLSKKLDPVAAGWPPCLRMVAAIAVLRKDAGKLTMGQPLVILAPHAVEALVKQPPDRWLSNARMTHYQAMLLDTDRVQFGPVVALNPATLLPLPEEGAPHDCLEILAETHGTRPDLTDQPIPDADHTWYTDGSSFLQEGQRKAGAAVTTETEVIWARALPAGTSAQRAELIALTQALKMAEGKRLNVYTDSRYAFATAHIHGEIYRRRGWLTSEGREIKNKSEILALLKALFLPKRLSIIHCLGHQKGDSAEARGNRLADQAAREAAIKTPPDTSTLLAGKRTADGSEFEKRTADGSEFESPKKKAKVE

SEQ ID NO: 1843 - protein, 2093 aa, synthetic construct
MPAAKRVKLDGGDKKYSIGLDIGTNSVGWAVITDEYKVPSKKFKVLGNTDRHSIKKNLIGALLFDSGETAEATRLKRTARRRYTRRKNRICYLQEIFSNEMAKVDDSFFHRLEESFLVEEDKKHERHPIFGNIVDEVAYHEKYPTIYHLRKKLVDSTDKADLRLIYLALAHMIKFRGHFLIEGDLNPDNSDVDKLFIQLVQTYNQLFEENPINASGVDAKAILSARLSKSRRLENLIAQLPGEKKNGLFGNLIALSLGLTPNFKSNFDLAEDAKLQLSKDTYDDDLDNLLAQIGDQYADLFLAAKNLSDAILLSDILRVNTEITKAPLSASMIKRYDEHHQDLTLLKALVRQQLPEKYKEIFFDQSKNGYAGYIDGGASQEEFYKFIKPILEKMDGTEELLVKLNREDLLRKQRTFDNGSIPHQIHLGELHAILRRQEDFYPFLKDNREKIEKILTFRIPYYVGPLARGNSRFAWMTRKSEETITPWNFEEVVDKGASAQSFIERMTNFDKNLPNEKVLPKHSLLYEYFTVYNELTKVKYVTEGMRKPAFLSGEQKKAIVDLLFKTNRKVTVKQLKEDYFKKIECFDSVEISGVEDRFNASLGTYHDLLKIIKDKDFLDNEENEDILEDIVLTLTLFEDREMIEERLKTYAHLFDDKVMKQLKRRRYTGWGRLSRKLINGIRDKQSGKTILDFLKSDGFANRNFMQLIHDDSLTFKEDIQKAQVSGQGDSLHEHIANLAGSPAIKKGILQTVKVVDELVKVMGRHKPENIVIEMARENQTTQKGQKNSRERMKRIEEGIKELGSQILKEHPVENTQLQNEKLYLYYLQNGRDMYVDQELDINRLSDYDVDHIVPQSFLKDDSIDNKVLTRSDKARGKSDNVPSEEVVKKMKNYWRQLLNAKLITQRKFDNLTKAERGGLSELDKAGFIKRQLVETRQITKHVAQILDSRMNTKYDENDKLIREVKVITLKSKLVSDFRKDFQFYKVREINNYHHAHDAYLNAVVGTALIKKYPKLESEFVYGDYKVYDVRKMIAKSEQEIGKATAKYFFYSNIMNFFKTEITLANGEIRKRPLIETNGETGEIVWDKGRDFATVRKVLSMPQVNIVKKTEVQTGGFSKESILPKRNSDKLIARKKDWDPKKYGGFDSPTVAYSVLVVAKVEKGKSKKLKSVKELLGITIMERSSFEKNPIDFLEAKGYKEVKKDLIIKLPKYSLFELENGRKRMLASAGELQKGNELALPSKYVNFLYLASHYEKLKGSPEDNEQKQLFVEQHKHYLDEIIEQISEFSKRVILADANLDKVLSAYNKHRDKPIREQAENIIHLFTLTNLGAPAAFKYFDTTIDRKRYTSTKEVLDATLIHQSITGLYETRIDLSQLGGDGGPAPEAAAKGGTLNLEDEYRLYETSAEPEVSPGSTWLSDFPQAWAETGGMGLAVRQAPLIIPLKATSTPVSIKQYPMSQEAKLGIKPHIQRLLDQGILVPCQSPWNTPLLPVKKPGTNDYRPVQDLREVNKRVEDIHPTVPNPYNLLSGLPPSHRWYTVLDLKDAFFCLRLHPTSQPLFAFEWRDPGMGISGQLTWTRLPQGFKNSPTLFNEALHRDLADFRIQHPDLILLQYVDDILLAATSELDCQQGTRALLLTLGNLGYRASAKKAQLCQKQVKYLGYLLKEGQRWLTEARKETVMGQPTPKTPRQLREFLGTAGFCRLWIPGFAEMAAPLYPLTKPGTLFNWGPDQQKAYQEIKQALLTAPALGLPDLTKPFELFVDEKQGYAKGVLTQKLGPWRRPVAYLSKKLDPVAAGWPPCLRMVAAIAVLRKDAGKLTMGQPLVILAPHAVEALVKQPPDRWLSNARMTHYQAMLLDTDRVQFGPVVALNPATLLPLPEEGAPHDCLEILAETHGTRPDLTDQPIPDADHTWYTDGSSFLQEGQRKAGAAVTTETEVIWARALPAGTSAQRAELIALTQALKMAEGKRLNVYTDSRYAFATAHIHGEIYRRRGWLTSEGREIKNKSEILALLKALFLPKRLSIIHCLGHQKGDSAEARGNRLADQAAREAAIKTPPDTSTLLAGKRTADGSEFEKRTADGSEFESPKKKAKVE

SEQ ID NO: 1844 - protein, 2098 aa, synthetic construct
MPAAKRVKLDGGDKKYSIGLDIGTNSVGWAVITDEYKVPSKKFKVLGNTDRHSIKKNLIGALLFDSGETAEATRLKRTARRRYTRRKNRICYLQEIFSNEMAKVDDSFFHRLEESFLVEEDKKHERHPIFGNIVDEVAYHEKYPTIYHLRKKLVDSTDKADLRLIYLALAHMIKFRGHFLIEGDLNPDNSDVDKLFIQLVQTYNQLFEENPINASGVDAKAILSARLSKSRRLENLIAQLPGEKKNGLFGNLIALSLGLTPNFKSNFDLAEDAKLQLSKDTYDDDLDNLLAQIGDQYADLFLAAKNLSDAILLSDILRVNTEITKAPLSASMIKRYDEHHQDLTLLKALVRQQLPEKYKEIFFDQSKNGYAGYIDGGASQEEFYKFIKPILEKMDGTEELLVKLNREDLLRKQRTFDNGSIPHQIHLGELHAILRRQEDFYPFLKDNREKIEKILTFRIPYYVGPLARGNSRFAWMTRKSEETITPWNFEEVVDKGASAQSFIERMTNFDKNLPNEKVLPKHSLLYEYFTVYNELTKVKYVTEGMRKPAFLSGEQKKAIVDLLFKTNRKVTVKQLKEDYFKKIECFDSVEISGVEDRFNASLGTYHDLLKIIKDKDFLDNEENEDILEDIVLTLTLFEDREMIEERLKTYAHLFDDKVMKQLKRRRYTGWGRLSRKLINGIRDKQSGKTILDFLKSDGFANRNFMQLIHDDSLTFKEDIQKAQVSGQGDSLHEHIANLAGSPAIKKGILQTVKVVDELVKVMGRHKPENIVIEMARENQTTQKGQKNSRERMKRIEEGIKELGSQILKEHPVENTQLQNEKLYLYYLQNGRDMYVDQELDINRLSDYDVDHIVPQSFLKDDSIDNKVLTRSDKARGKSDNVPSEEVVKKMKNYWRQLLNAKLITQRKFDNLTKAERGGLSELDKAGFIKRQLVETRQITKHVAQILDSRMNTKYDENDKLIREVKVITLKSKLVSDFRKDFQFYKVREINNYHHAHDAYLNAVVGTALIKKYPKLESEFVYGDYKVYDVRKMIAKSEQEIGKATAKYFFYSNIMNFFKTEITLANGEIRKRPLIETNGETGEIVWDKGRDFATVRKVLSMPQVNIVKKTEVQTGGFSKESILPKRNSDKLIARKKDWDPKKYGGFDSPTVAYSVLVVAKVEKGKSKKLKSVKELLGITIMERSSFEKNPIDFLEAKGYKEVKKDLIIKLPKYSLFELENGRKRMLASAGELQKGNELALPSKYVNFLYLASHYEKLKGSPEDNEQKQLFVEQHKHYLDEIIEQISEFSKRVILADANLDKVLSAYNKHRDKPIREQAENIIHLFTLTNLGAPAAFKYFDTTIDRKRYTSTKEVLDATLIHQSITGLYETRIDLSQLGGDGGPAPAPAPAPAPAPGGTLNLEDEYRLYETSAEPEVSPGSTWLSDFPQAWAETGGMGLAVRQAPLIIPLKATSTPVSIKQYPMSQEAKLGIKPHIQRLLDQGILVPCQSPWNTPLLPVKKPGTNDYRPVQDLREVNKRVEDIHPTVPNPYNLLSGLPPSHRWYTVLDLKDAFFCLRLHPTSQPLFAFEWRDPGMGISGQLTWTRLPQGFKNSPTLFNEALHRDLADFRIQHPDLILLQYVDDILLAATSELDCQQGTRALLLTLGNLGYRASAKKAQLCQKQVKYLGYLLKEGQRWLTEARKETVMGQPTPKTPRQLREFLGTAGFCRLWIPGFAEMAAPLYPLTKPGTLFNWGPDQQKAYQEIKQALLTAPALGLPDLTKPFELFVDEKQGYAKGVLTQKLGPWRRPVAYLSKKLDPVAAGWPPCLRMVAAIAVLRKDAGKLTMGQPLVILAPHAVEALVKQPPDRWLSNARMTHYQAMLLDTDRVQFGPVVALNPATLLPLPEEGAPHDCLEILAETHGTRPDLTDQPIPDADHTWYTDGSSFLQEGQRKAGAAVTTETEVIWARALPAGTSAQRAELIALTQALKMAEGKRLNVYTDSRYAFATAHIHGEIYRRRGWLTSEGREIKNKSEILALLKALFLPKRLSIIHCLGHQKGDSAEARGNRLADQAAREAAIKTPPDTSTLLAGKRTADGSEFEKRTADGSEFESPKKKAKVE

SEQ ID NO: 1845 - protein, 2096 aa, synthetic construct
MPAAKRVKLDGGDKKYSIGLDIGTNSVGWAVITDEYKVPSKKFKVLGNTDRHSIKKNLIGALLFDSGETAEATRLKRTARRRYTRRKNRICYLQEIFSNEMAKVDDSFFHRLEESFLVEEDKKHERHPIFGNIVDEVAYHEKYPTIYHLRKKLVDSTDKADLRLIYLALAHMIKFRGHFLIEGDLNPDNSDVDKLFIQLVQTYNQLFEENPINASGVDAKAILSARLSKSRRLENLIAQLPGEKKNGLFGNLIALSLGLTPNFKSNFDLAEDAKLQLSKDTYDDDLDNLLAQIGDQYADLFLAAKNLSDAILLSDILRVNTEITKAPLSASMIKRYDEHHQDLTLLKALVRQQLPEKYKEIFFDQSKNGYAGYIDGGASQEEFYKFIKPILEKMDGTEELLVKLNREDLLRKQRTFDNGSIPHQIHLGELHAILRRQEDFYPFLKDNREKIEKILTFRIPYYVGPLARGNSRFAWMTRKSEETITPWNFEEVVDKGASAQSFIERMTNFDKNLPNEKVLPKHSLLYEYFTVYNELTKVKYVTEGMRKPAFLSGEQKKAIVDLLFKTNRKVTVKQLKEDYFKKIECFDSVEISGVEDRFNASLGTYHDLLKIIKDKDFLDNEENEDILEDIVLTLTLFEDREMIEERLKTYAHLFDDKVMKQLKRRRYTGWGRLSRKLINGIRDKQSGKTILDFLKSDGFANRNFMQLIHDDSLTFKEDIQKAQVSGQGDSLHEHIANLAGSPAIKKGILQTVKVVDELVKVMGRHKPENIVIEMARENQTTQKGQKNSRERMKRIEEGIKELGSQILKEHPVENTQLQNEKLYLYYLQNGRDMYVDQELDINRLSDYDVDHIVPQSFLKDDSIDNKVLTRSDKARGKSDNVPSEEVVKKMKNYWRQLLNAKLITQRKFDNLTKAERGGLSELDKAGFIKRQLVETRQITKHVAQILDSRMNTKYDENDKLIREVKVITLKSKLVSDFRKDFQFYKVREINNYHHAHDAYLNAVVGTALIKKYPKLESEFVYGDYKVYDVRKMIAKSEQEIGKATAKYFFYSNIMNFFKTEITLANGEIRKRPLIETNGETGEIVWDKGRDFATVRKVLSMPQVNIVKKTEVQTGGFSKESILPKRNSDKLIARKKDWDPKKYGGFDSPTVAYSVLVVAKVEKGKSKKLKSVKELLGITIMERSSFEKNPIDFLEAKGYKEVKKDLIIKLPKYSLFELENGRKRMLASAGELQKGNELALPSKYVNFLYLASHYEKLKGSPEDNEQKQLFVEQHKHYLDEIIEQISEFSKRVILADANLDKVLSAYNKHRDKPIREQAENIIHLFTLTNLGAPAAFKYFDTTIDRKRYTSTKEVLDATLIHQSITGLYETRIDLSQLGGDGGGSSGGGEAAAKGGTLNLEDEYRLYETSAEPEVSPGSTWLSDFPQAWAETGGMGLAVRQAPLIIPLKATSTPVSIKQYPMSQEAKLGIKPHIQRLLDQGILVPCQSPWNTPLLPVKKPGTNDYRPVQDLREVNKRVEDIHPTVPNPYNLLSGLPPSHRWYTVLDLKDAFFCLRLHPTSQPLFAFEWRDPGMGISGQLTWTRLPQGFKNSPTLFNEALHRDLADFRIQHPDLILLQYVDDILLAATSELDCQQGTRALLLTLGNLGYRASAKKAQLCQKQVKYLGYLLKEGQRWLTEARKETVMGQPTPKTPRQLREFLGTAGFCRLWIPGFAEMAAPLYPLTKPGTLFNWGPDQQKAYQEIKQALLTAPALGLPDLTKPFELFVDEKQGYAKGVLTQKLGPWRRPVAYLSKKLDPVAAGWPPCLRMVAAIAVLRKDAGKLTMGQPLVILAPHAVEALVKQPPDRWLSNARMTHYQAMLLDTDRVQFGPVVALNPATLLPLPEEGAPHDCLEILAETHGTRPDLTDQPIPDADHTWYTDGSSFLQEGQRKAGAAVTTETEVIWARALPAGTSAQRAELIALTQALKMAEGKRLNVYTDSRYAFATAHIHGEIYRRRGWLTSEGREIKNKSEILALLKALFLPKRLSIIHCLGHQKGDSAEARGNRLADQAAREAAIKTPPDTSTLLAGKRTADGSEFEKRTADGSEFESPKKKAKVE

SEQ ID NO: 1846 - protein, 2096 aa, synthetic construct
MPAAKRVKLDGGDKKYSIGLDIGTNSVGWAVITDEYKVPSKKFKVLGNTDRHSIKKNLIGALLFDSGETAEATRLKRTARRRYTRRKNRICYLQEIFSNEMAKVDDSFFHRLEESFLVEEDKKHERHPIFGNIVDEVAYHEKYPTIYHLRKKLVDSTDKADLRLIYLALAHMIKFRGHFLIEGDLNPDNSDVDKLFIQLVQTYNQLFEENPINASGVDAKAILSARLSKSRRLENLIAQLPGEKKNGLFGNLIALSLGLTPNFKSNFDLAEDAKLQLSKDTYDDDLDNLLAQIGDQYADLFLAAKNLSDAILLSDILRVNTEITKAPLSASMIKRYDEHHQDLTLLKALVRQQLPEKYKEIFFDQSKNGYAGYIDGGASQEEFYKFIKPILEKMDGTEELLVKLNREDLLRKQRTFDNGSIPHQIHLGELHAILRRQEDFYPFLKDNREKIEKILTFRIPYYVGPLARGNSRFAWMTRKSEETITPWNFEEVVDKGASAQSFIERMTNFDKNLPNEKVLPKHSLLYEYFTVYNELTKVKYVTEGMRKPAFLSGEQKKAIVDLLFKTNRKVTVKQLKEDYFKKIECFDSVEISGVEDRFNASLGTYHDLLKIIKDKDFLDNEENEDILEDIVLTLTLFEDREMIEERLKTYAHLFDDKVMKQLKRRRYTGWGRLSRKLINGIRDKQSGKTILDFLKSDGFANRNFMQLIHDDSLTFKEDIQKAQVSGQGDSLHEHIANLAGSPAIKKGILQTVKVVDELVKVMGRHKPENIVIEMARENQTTQKGQKNSRERMKRIEEGIKELGSQILKEHPVENTQLQNEKLYLYYLQNGRDMYVDQELDINRLSDYDVDHIVPQSFLKDDSIDNKVLTRSDKARGKSDNVPSEEVVKKMKNYWRQLLNAKLITQRKFDNLTKAERGGLSELDKAGFIKRQLVETRQITKHVAQILDSRMNTKYDENDKLIREVKVITLKSKLVSDFRKDFQFYKVREINNYHHAHDAYLNAVVGTALIKKYPKLESEFVYGDYKVYDVRKMIAKSEQEIGKATAKYFFYSNIMNFFKTEITLANGEIRKRPLIETNGETGEIVWDKGRDFATVRKVLSMPQVNIVKKTEVQTGGFSKESILPKRNSDKLIARKKDWDPKKYGGFDSPTVAYSVLVVAKVEKGKSKKLKSVKELLGITIMERSSFEKNPIDFLEAKGYKEVKKDLIIKLPKYSLFELENGRKRMLASAGELQKGNELALPSKYVNFLYLASHYEKLKGSPEDNEQKQLFVEQHKHYLDEIIEQISEFSKRVILADANLDKVLSAYNKHRDKPIREQAENIIHLFTLTNLGAPAAFKYFDTTIDRKRYTSTKEVLDATLIHQSITGLYETRIDLSQLGGDGGEAAAKGGGGSSGGTLNLEDEYRLYETSAEPEVSPGSTWLSDFPQAWAETGGMGLAVRQAPLIIPLKATSTPVSIKQYPMSQEAKLGIKPHIQRLLDQGILVPCQSPWNTPLLPVKKPGTNDYRPVQDLREVNKRVEDIHPTVPNPYNLLSGLPPSHRWYTVLDLKDAFFCLRLHPTSQPLFAFEWRDPGMGISGQLTWTRLPQGFKNSPTLFNEALHRDLADFRIQHPDLILLQYVDDILLAATSELDCQQGTRALLLTLGNLGYRASAKKAQLCQKQVKYLGYLLKEGQRWLTEARKETVMGQPTPKTPRQLREFLGTAGFCRLWIPGFAEMAAPLYPLTKPGTLFNWGPDQQKAYQEIKQALLTAPALGLPDLTKPFELFVDEKQGYAKGVLTQKLGPWRRPVAYLSKKLDPVAAGWPPCLRMVAAIAVLRKDAGKLTMGQPLVILAPHAVEALVKQPPDRWLSNARMTHYQAMLLDTDRVQFGPVVALNPATLLPLPEEGAPHDCLEILAETHGTRPDLTDQPIPDADHTWYTDGSSFLQEGQRKAGAAVTTETEVIWARALPAGTSAQRAELIALTQALKMAEGKRLNVYTDSRYAFATAHIHGEIYRRRGWLTSEGREIKNKSEILALLKALFLPKRLSIIHCLGHQKGDSAEARGNRLADQAAREAAIKTPPDTSTLLAGKRTADGSEFEKRTADGSEFESPKKKAKVE

SEQ ID NO: 1847 - protein, 2095 aa, synthetic construct
MPAAKRVKLDGGDKKYSIGLDIGTNSVGWAVITDEYKVPSKKFKVLGNTDRHSIKKNLIGALLFDSGETAEATRLKRTARRRYTRRKNRICYLQEIFSNEMAKVDDSFFHRLEESFLVEEDKKHERHPIFGNIVDEVAYHEKYPTIYHLRKKLVDSTDKADLRLIYLALAHMIKFRGHFLIEGDLNPDNSDVDKLFIQLVQTYNQLFEENPINASGVDAKAILSARLSKSRRLENLIAQLPGEKKNGLFGNLIALSLGLTPNFKSNFDLAEDAKLQLSKDTYDDDLDNLLAQIGDQYADLFLAAKNLSDAILLSDILRVNTEITKAPLSASMIKRYDEHHQDLTLLKALVRQQLPEKYKEIFFDQSKNGYAGYIDGGASQEEFYKFIKPILEKMDGTEELLVKLNREDLLRKQRTFDNGSIPHQIHLGELHAILRRQEDFYPFLKDNREKIEKILTFRIPYYVGPLARGNSRFAWMTRKSEETITPWNFEEVVDKGASAQSFIERMTNFDKNLPNEKVLPKHSLLYEYFTVYNELTKVKYVTEGMRKPAFLSGEQKKAIVDLLFKTNRKVTVKQLKEDYFKKIECFDSVEISGVEDRFNASLGTYHDLLKIIKDKDFLDNEENEDILEDIVLTLTLFEDREMIEERLKTYAHLFDDKVMKQLKRRRYTGWGRLSRKLINGIRDKQSGKTILDFLKSDGFANRNFMQLIHDDSLTFKEDIQKAQVSGQGDSLHEHIANLAGSPAIKKGILQTVKVVDELVKVMGRHKPENIVIEMARENQTTQKGQKNSRERMKRIEEGIKELGSQILKEHPVENTQLQNEKLYLYYLQNGRDMYVDQELDINRLSDYDVDHIVPQSFLKDDSIDNKVLTRSDKARGKSDNVPSEEVVKKMKNYWRQLLNAKLITQRKFDNLTKAERGGLSELDKAGFIKRQLVETRQITKHVAQILDSRMNTKYDENDKLIREVKVITLKSKLVSDFRKDFQFYKVREINNYHHAHDAYLNAVVGTALIKKYPKLESEFVYGDYKVYDVRKMIAKSEQEIGKATAKYFFYSNIMNFFKTEITLANGEIRKRPLIETNGETGEIVWDKGRDFATVRKVLSMPQVNIVKKTEVQTGGFSKESILPKRNSDKLIARKKDWDPKKYGGFDSPTVAYSVLVVAKVEKGKSKKLKSVKELLGITIMERSSFEKNPIDFLEAKGYKEVKKDLIIKLPKYSLFELENGRKRMLASAGELQKGNELALPSKYVNFLYLASHYEKLKGSPEDNEQKQLFVEQHKHYLDEIIEQISEFSKRVILADANLDKVLSAYNKHRDKPIREQAENIIHLFTLTNLGAPAAFKYFDTTIDRKRYTSTKEVLDATLIHQSITGLYETRIDLSQLGGDGGEAAAKEAAAKGGTLNLEDEYRLYETSAEPEVSPGSTWLSDFPQAWAETGGMGLAVRQAPLIIPLKATSTPVSIKQYPMSQEAKLGIKPHIQRLLDQGILVPCQSPWNTPLLPVKKPGTNDYRPVQDLREVNKRVEDIHPTVPNPYNLLSGLPPSHRWYTVLDLKDAFFCLRLHPTSQPLFAFEWRDPGMGISGQLTWTRLPQGFKNSPTLFNEALHRDLADFRIQHPDLILLQYVDDILLAATSELDCQQGTRALLLTLGNLGYRASAKKAQLCQKQVKYLGYLLKEGQRWLTEARKETVMGQPTPKTPRQLREFLGTAGFCRLWIPGFAEMAAPLYPLTKPGTLFNWGPDQQKAYQEIKQALLTAPALGLPDLTKPFELFVDEKQGYAKGVLTQKLGPWRRPVAYLSKKLDPVAAGWPPCLRMVAAIAVLRKDAGKLTMGQPLVILAPHAVEALVKQPPDRWLSNARMTHYQAMLLDTDRVQFGPVVALNPATLLPLPEEGAPHDCLEILAETHGTRPDLTDQPIPDADHTWYTDGSSFLQEGQRKAGAAVTTETEVIWARALPAGTSAQRAELIALTQALKMAEGKRLNVYTDSRYAFATAHIHGEIYRRRGWLTSEGREIKNKSEILALLKALFLPKRLSIIHCLGHQKGDSAEARGNRLADQAAREAAIKTPPDTSTLLAGKRTADGSEFEKRTADGSEFESPKKKAKVE

SEQ ID NO: 1848 - protein, 2091 aa, synthetic construct
MPAAKRVKLDGGDKKYSIGLDIGTNSVGWAVITDEYKVPSKKFKVLGNTDRHSIKKNLIGALLFDSGETAEATRLKRTARRRYTRRKNRICYLQEIFSNEMAKVDDSFFHRLEESFLVEEDKKHERHPIFGNIVDEVAYHEKYPTIYHLRKKLVDSTDKADLRLIYLALAHMIKFRGHFLIEGDLNPDNSDVDKLFIQLVQTYNQLFEENPINASGVDAKAILSARLSKSRRLENLIAQLPGEKKNGLFGNLIALSLGLTPNFKSNFDLAEDAKLQLSKDTYDDDLDNLLAQIGDQYADLFLAAKNLSDAILLSDILRVNTEITKAPLSASMIKRYDEHHQDLTLLKALVRQQLPEKYKEIFFDQSKNGYAGYIDGGASQEEFYKFIKPILEKMDGTEELLVKLNREDLLRKQRTFDNGSIPHQIHLGELHAILRRQEDFYPFLKDNREKIEKILTFRIPYYVGPLARGNSRFAWMTRKSEETITPWNFEEVVDKGASAQSFIERMTNFDKNLPNEKVLPKHSLLYEYFTVYNELTKVKYVTEGMRKPAFLSGEQKKAIVDLLFKTNRKVTVKQLKEDYFKKIECFDSVEISGVEDRFNASLGTYHDLLKIIKDKDFLDNEENEDILEDIVLTLTLFEDREMIEERLKTYAHLFDDKVMKQLKRRRYTGWGRLSRKLINGIRDKQSGKTILDFLKSDGFANRNFMQLIHDDSLTFKEDIQKAQVSGQGDSLHEHIANLAGSPAIKKGILQTVKVVDELVKVMGRHKPENIVIEMARENQTTQKGQKNSRERMKRIEEGIKELGSQILKEHPVENTQLQNEKLYLYYLQNGRDMYVDQELDINRLSDYDVDHIVPQSFLKDDSIDNKVLTRSDKARGKSDNVPSEEVVKKMKNYWRQLLNAKLITQRKFDNLTKAERGGLSELDKAGFIKRQLVETRQITKHVAQILDSRMNTKYDENDKLIREVKVITLKSKLVSDFRKDFQFYKVREINNYHHAHDAYLNAVVGTALIKKYPKLESEFVYGDYKVYDVRKMIAKSEQEIGKATAKYFFYSNIMNFFKTEITLANGEIRKRPLIETNGETGEIVWDKGRDFATVRKVLSMPQVNIVKKTEVQTGGFSKESILPKRNSDKLIARKKDWDPKKYGGFDSPTVAYSVLVVAKVEKGKSKKLKSVKELLGITIMERSSFEKNPIDFLEAKGYKEVKKDLIIKLPKYSLFELENGRKRMLASAGELQKGNELALPSKYVNFLYLASHYEKLKGSPEDNEQKQLFVEQHKHYLDEIIEQISEFSKRVILADANLDKVLSAYNKHRDKPIREQAENIIHLFTLTNLGAPAAFKYFDTTIDRKRYTSTKEVLDATLIHQSITGLYETRIDLSQLGGDGGPAPGGGGGTLNLEDEYRLYETSAEPEVSPGSTWLSDFPQAWAETGGMGLAVRQAPLIIPLKATSTPVSIKQYPMSQEAKLGIKPHIQRLLDQGILVPCQSPWNTPLLPVKKPGTNDYRPVQDLREVNKRVEDIHPTVPNPYNLLSGLPPSHRWYTVLDLKDAFFCLRLHPTSQPLFAFEWRDPGMGISGQLTWTRLPQGFKNSPTLFNEALHRDLADFRIQHPDLILLQYVDDILLAATSELDCQQGTRALLLTLGNLGYRASAKKAQLCQKQVKYLGYLLKEGQRWLTEARKETVMGQPTPKTPRQLREFLGTAGFCRLWIPGFAEMAAPLYPLTKPGTLFNWGPDQQKAYQEIKQALLTAPALGLPDLTKPFELFVDEKQGYAKGVLTQKLGPWRRPVAYLSKKLDPVAAGWPPCLRMVAAIAVLRKDAGKLTMGQPLVILAPHAVEALVKQPPDRWLSNARMTHYQAMLLDTDRVQFGPVVALNPATLLPLPEEGAPHDCLEILAETHGTRPDLTDQPIPDADHTWYTDGSSFLQEGQRKAGAAVTTETEVIWARALPAGTSAQRAELIALTQALKMAEGKRLNVYTDSRYAFATAHIHGEIYRRRGWLTSEGREIKNKSEILALLKALFLPKRLSIIHCLGHQKGDSAEARGNRLADQAAREAAIKTPPDTSTLLAGKRTADGSEFEKRTADGSEFESPKKKAKVE

SEQ ID NO: 1849 - protein, 2097 aa, synthetic construct
MPAAKRVKLDGGDKKYSIGLDIGTNSVGWAVITDEYKVPSKKFKVLGNTDRHSIKKNLIGALLFDSGETAEATRLKRTARRRYTRRKNRICYLQEIFSNEMAKVDDSFFHRLEESFLVEEDKKHERHPIFGNIVDEVAYHEKYPTIYHLRKKLVDSTDKADLRLIYLALAHMIKFRGHFLIEGDLNPDNSDVDKLFIQLVQTYNQLFEENPINASGVDAKAILSARLSKSRRLENLIAQLPGEKKNGLFGNLIALSLGLTPNFKSNFDLAEDAKLQLSKDTYDDDLDNLLAQIGDQYADLFLAAKNLSDAILLSDILRVNTEITKAPLSASMIKRYDEHHQDLTLLKALVRQQLPEKYKEIFFDQSKNGYAGYIDGGASQEEFYKFIKPILEKMDGTEELLVKLNREDLLRKQRTFDNGSIPHQIHLGELHAILRRQEDFYPFLKDNREKIEKILTFRIPYYVGPLARGNSRFAWMTRKSEETITPWNFEEVVDKGASAQSFIERMTNFDKNLPNEKVLPKHSLLYEYFTVYNELTKVKYVTEGMRKPAFLSGEQKKAIVDLLFKTNRKVTVKQLKEDYFKKIECFDSVEISGVEDRFNASLGTYHDLLKIIKDKDFLDNEENEDILEDIVLTLTLFEDREMIEERLKTYAHLFDDKVMKQLKRRRYTGWGRLSRKLINGIRDKQSGKTILDFLKSDGFANRNFMQLIHDDSLTFKEDIQKAQVSGQGDSLHEHIANLAGSPAIKKGILQTVKVVDELVKVMGRHKPENIVIEMARENQTTQKGQKNSRERMKRIEEGIKELGSQILKEHPVENTQLQNEKLYLYYLQNGRDMYVDQELDINRLSDYDVDHIVPQSFLKDDSIDNKVLTRSDKARGKSDNVPSEEVVKKMKNYWRQLLNAKLITQRKFDNLTKAERGGLSELDKAGFIKRQLVETRQITKHVAQILDSRMNTKYDENDKLIREVKVITLKSKLVSDFRKDFQFYKVREINNYHHAHDAYLNAVVGTALIKKYPKLESEFVYGDYKVYDVRKMIAKSEQEIGKATAKYFFYSNIMNFFKTEITLANGEIRKRPLIETNGETGEIVWDKGRDFATVRKVLSMPQVNIVKKTEVQTGGFSKESILPKRNSDKLIARKKDWDPKKYGGFDSPTVAYSVLVVAKVEKGKSKKLKSVKELLGITIMERSSFEKNPIDFLEAKGYKEVKKDLIIKLPKYSLFELENGRKRMLASAGELQKGNELALPSKYVNFLYLASHYEKLKGSPEDNEQKQLFVEQHKHYLDEIIEQISEFSKRVILADANLDKVLSAYNKHRDKPIREQAENIIHLFTLTNLGAPAAFKYFDTTIDRKRYTSTKEVLDATLIHQSITGLYETRIDLSQLGGDGGGGSGGSGGSGGSGGTLNLEDEYRLYETSAEPEVSPGSTWLSDFPQAWAETGGMGLAVRQAPLIIPLKATSTPVSIKQYPMSQEAKLGIKPHIQRLLDQGILVPCQSPWNTPLLPVKKPGTNDYRPVQDLREVNKRVEDIHPTVPNPYNLLSGLPPSHRWYTVLDLKDAFFCLRLHPTSQPLFAFEWRDPGMGISGQLTWTRLPQGFKNSPTLFNEALHRDLADFRIQHPDLILLQYVDDILLAATSELDCQQGTRALLLTLGNLGYRASAKKAQLCQKQVKYLGYLLKEGQRWLTEARKETVMGQPTPKTPRQLREFLGTAGFCRLWIPGFAEMAAPLYPLTKPGTLFNWGPDQQKAYQEIKQALLTAPALGLPDLTKPFELFVDEKQGYAKGVLTQKLGPWRRPVAYLSKKLDPVAAGWPPCLRMVAAIAVLRKDAGKLTMGQPLVILAPHAVEALVKQPPDRWLSNARMTHYQAMLLDTDRVQFGPVVALNPATLLPLPEEGAPHDCLEILAETHGTRPDLTDQPIPDADHTWYTDGSSFLQEGQRKAGAAVTTETEVIWARALPAGTSAQRAELIALTQALKMAEGKRLNVYTDSRYAFATAHIHGEIYRRRGWLTSEGREIKNKSEILALLKALFLPKRLSIIHCLGHQKGDSAEARGNRLADQAAREAAIKTPPDTSTLLAGKRTADGSEFEKRTADGSEFESPKKKAKVE

SEQ ID NO: 1850 - protein, 2096 aa, synthetic construct
MPAAKRVKLDGGDKKYSIGLDIGTNSVGWAVITDEYKVPSKKFKVLGNTDRHSIKKNLIGALLFDSGETAEATRLKRTARRRYTRRKNRICYLQEIFSNEMAKVDDSFFHRLEESFLVEEDKKHERHPIFGNIVDEVAYHEKYPTIYHLRKKLVDSTDKADLRLIYLALAHMIKFRGHFLIEGDLNPDNSDVDKLFIQLVQTYNQLFEENPINASGVDAKAILSARLSKSRRLENLIAQLPGEKKNGLFGNLIALSLGLTPNFKSNFDLAEDAKLQLSKDTYDDDLDNLLAQIGDQYADLFLAAKNLSDAILLSDILRVNTEITKAPLSASMIKRYDEHHQDLTLLKALVRQQLPEKYKEIFFDQSKNGYAGYIDGGASQEEFYKFIKPILEKMDGTEELLVKLNREDLLRKQRTFDNGSIPHQIHLGELHAILRRQEDFYPFLKDNREKIEKILTFRIPYYVGPLARGNSRFAWMTRKSEETITPWNFEEVVDKGASAQSFIERMTNFDKNLPNEKVLPKHSLLYEYFTVYNELTKVKYVTEGMRKPAFLSGEQKKAIVDLLFKTNRKVTVKQLKEDYFKKIECFDSVEISGVEDRFNASLGTYHDLLKIIKDKDFLDNEENEDILEDIVLTLTLFEDREMIEERLKTYAHLFDDKVMKQLKRRRYTGWGRLSRKLINGIRDKQSGKTILDFLKSDGFANRNFMQLIHDDSLTFKEDIQKAQVSGQGDSLHEHIANLAGSPAIKKGILQTVKVVDELVKVMGRHKPENIVIEMARENQTTQKGQKNSRERMKRIEEGIKELGSQILKEHPVENTQLQNEKLYLYYLQNGRDMYVDQELDINRLSDYDVDHIVPQSFLKDDSIDNKVLTRSDKARGKSDNVPSEEVVKKMKNYWRQLLNAKLITQRKFDNLTKAERGGLSELDKAGFIKRQLVETRQITKHVAQILDSRMNTKYDENDKLIREVKVITLKSKLVSDFRKDFQFYKVREINNYHHAHDAYLNAVVGTALIKKYPKLESEFVYGDYKVYDVRKMIAKSEQEIGKATAKYFFYSNIMNFFKTEITLANGEIRKRPLIETNGETGEIVWDKGRDFATVRKVLSMPQVNIVKKTEVQTGGFSKESILPKRNSDKLIARKKDWDPKKYGGFDSPTVAYSVLVVAKVEKGKSKKLKSVKELLGITIMERSSFEKNPIDFLEAKGYKEVKKDLIIKLPKYSLFELENGRKRMLASAGELQKGNELALPSKYVNFLYLASHYEKLKGSPEDNEQKQLFVEQHKHYLDEIIEQISEFSKRVILADANLDKVLSAYNKHRDKPIREQAENIIHLFTLTNLGAPAAFKYFDTTIDRKRYTSTKEVLDATLIHQSITGLYETRIDLSQLGGDGGGSSEAAAKGGGGGTLNLEDEYRLYETSAEPEVSPGSTWLSDFPQAWAETGGMGLAVRQAPLIIPLKATSTPVSIKQYPMSQEAKLGIKPHIQRLLDQGILVPCQSPWNTPLLPVKKPGTNDYRPVQDLREVNKRVEDIHPTVPNPYNLLSGLPPSHRWYTVLDLKDAFFCLRLHPTSQPLFAFEWRDPGMGISGQLTWTRLPQGFKNSPTLFNEALHRDLADFRIQHPDLILLQYVDDILLAATSELDCQQGTRALLLTLGNLGYRASAKKAQLCQKQVKYLGYLLKEGQRWLTEARKETVMGQPTPKTPRQLREFLGTAGFCRLWIPGFAEMAAPLYPLTKPGTLFNWGPDQQKAYQEIKQALLTAPALGLPDLTKPFELFVDEKQGYAKGVLTQKLGPWRRPVAYLSKKLDPVAAGWPPCLRMVAAIAVLRKDAGKLTMGQPLVILAPHAVEALVKQPPDRWLSNARMTHYQAMLLDTDRVQFGPVVALNPATLLPLPEEGAPHDCLEILAETHGTRPDLTDQPIPDADHTWYTDGSSFLQEGQRKAGAAVTTETEVIWARALPAGTSAQRAELIALTQALKMAEGKRLNVYTDSRYAFATAHIHGEIYRRRGWLTSEGREIKNKSEILALLKALFLPKRLSIIHCLGHQKGDSAEARGNRLADQAAREAAIKTPPDTSTLLAGKRTADGSEFEKRTADGSEFESPKKKAKVE

SEQ ID NO: 1851 - protein, 2096 aa, synthetic construct
MPAAKRVKLDGGDKKYSIGLDIGTNSVGWAVITDEYKVPSKKFKVLGNTDRHSIKKNLIGALLFDSGETAEATRLKRTARRRYTRRKNRICYLQEIFSNEMAKVDDSFFHRLEESFLVEEDKKHERHPIFGNIVDEVAYHEKYPTIYHLRKKLVDSTDKADLRLIYLALAHMIKFRGHFLIEGDLNPDNSDVDKLFIQLVQTYNQLFEENPINASGVDAKAILSARLSKSRRLENLIAQLPGEKKNGLFGNLIALSLGLTPNFKSNFDLAEDAKLQLSKDTYDDDLDNLLAQIGDQYADLFLAAKNLSDAILLSDILRVNTEITKAPLSASMIKRYDEHHQDLTLLKALVRQQLPEKYKEIFFDQSKNGYAGYIDGGASQEEFYKFIKPILEKMDGTEELLVKLNREDLLRKQRTFDNGSIPHQIHLGELHAILRRQEDFYPFLKDNREKIEKILTFRIPYYVGPLARGNSRFAWMTRKSEETITPWNFEEVVDKGASAQSFIERMTNFDKNLPNEKVLPKHSLLYEYFTVYNELTKVKYVTEGMRKPAFLSGEQKKAIVDLLFKTNRKVTVKQLKEDYFKKIECFDSVEISGVEDRFNASLGTYHDLLKIIKDKDFLDNEENEDILEDIVLTLTLFEDREMIEERLKTYAHLFDDKVMKQLKRRRYTGWGRLSRKLINGIRDKQSGKTILDFLKSDGFANRNFMQLIHDDSLTFKEDIQKAQVSGQGDSLHEHIANLAGSPAIKKGILQTVKVVDELVKVMGRHKPENIVIEMARENQTTQKGQKNSRERMKRIEEGIKELGSQILKEHPVENTQLQNEKLYLYYLQNGRDMYVDQELDINRLSDYDVDHIVPQSFLKDDSIDNKVLTRSDKARGKSDNVPSEEVVKKMKNYWRQLLNAKLITQRKFDNLTKAERGGLSELDKAGFIKRQLVETRQITKHVAQILDSRMNTKYDENDKLIREVKVITLKSKLVSDFRKDFQFYKVREINNYHHAHDAYLNAVVGTALIKKYPKLESEFVYGDYKVYDVRKMIAKSEQEIGKATAKYFFYSNIMNFFKTEITLANGEIRKRPLIETNGETGEIVWDKGRDFATVRKVLSMPQVNIVKKTEVQTGGFSKESILPKRNSDKLIARKKDWDPKKYGGFDSPTVAYSVLVVAKVEKGKSKKLKSVKELLGITIMERSSFEKNPIDFLEAKGYKEVKKDLIIKLPKYSLFELENGRKRMLASAGELQKGNELALPSKYVNFLYLASHYEKLKGSPEDNEQKQLFVEQHKHYLDEIIEQISEFSKRVILADANLDKVLSAYNKHRDKPIREQAENIIHLFTLTNLGAPAAFKYFDTTIDRKRYTSTKEVLDATLIHQSITGLYETRIDLSQLGGDGGEAAAKPAPGGSGGTLNLEDEYRLYETSAEPEVSPGSTWLSDFPQAWAETGGMGLAVRQAPLIIPLKATSTPVSIKQYPMSQEAKLGIKPHIQRLLDQGILVPCQSPWNTPLLPVKKPGTNDYRPVQDLREVNKRVEDIHPTVPNPYNLLSGLPPSHRWYTVLDLKDAFFCLRLHPTSQPLFAFEWRDPGMGISGQLTWTRLPQGFKNSPTLFNEALHRDLADFRIQHPDLILLQYVDDILLAATSELDCQQGTRALLLTLGNLGYRASAKKAQLCQKQVKYLGYLLKEGQRWLTEARKETVMGQPTPKTPRQLREFLGTAGFCRLWIPGFAEMAAPLYPLTKPGTLFNWGPDQQKAYQEIKQALLTAPALGLPDLTKPFELFVDEKQGYAKGVLTQKLGPWRRPVAYLSKKLDPVAAGWPPCLRMVAAIAVLRKDAGKLTMGQPLVILAPHAVEALVKQPPDRWLSNARMTHYQAMLLDTDRVQFGPVVALNPATLLPLPEEGAPHDCLEILAETHGTRPDLTDQPIPDADHTWYTDGSSFLQEGQRKAGAAVTTETEVIWARALPAGTSAQRAELIALTQALKMAEGKRLNVYTDSRYAFATAHIHGEIYRRRGWLTSEGREIKNKSEILALLKALFLPKRLSIIHCLGHQKGDSAEARGNRLADQAAREAAIKTPPDTSTLLAGKRTADGSEFEKRTADGSEFESPKKKAKVE

SEQ ID NO: 1852 - protein, 2094 aa, synthetic construct
MPAAKRVKLDGGDKKYSIGLDIGTNSVGWAVITDEYKVPSKKFKVLGNTDRHSIKKNLIGALLFDSGETAEATRLKRTARRRYTRRKNRICYLQEIFSNEMAKVDDSFFHRLEESFLVEEDKKHERHPIFGNIVDEVAYHEKYPTIYHLRKKLVDSTDKADLRLIYLALAHMIKFRGHFLIEGDLNPDNSDVDKLFIQLVQTYNQLFEENPINASGVDAKAILSARLSKSRRLENLIAQLPGEKKNGLFGNLIALSLGLTPNFKSNFDLAEDAKLQLSKDTYDDDLDNLLAQIGDQYADLFLAAKNLSDAILLSDILRVNTEITKAPLSASMIKRYDEHHQDLTLLKALVRQQLPEKYKEIFFDQSKNGYAGYIDGGASQEEFYKFIKPILEKMDGTEELLVKLNREDLLRKQRTFDNGSIPHQIHLGELHAILRRQEDFYPFLKDNREKIEKILTFRIPYYVGPLARGNSRFAWMTRKSEETITPWNFEEVVDKGASAQSFIERMTNFDKNLPNEKVLPKHSLLYEYFTVYNELTKVKYVTEGMRKPAFLSGEQKKAIVDLLFKTNRKVTVKQLKEDYFKKIECFDSVEISGVEDRFNASLGTYHDLLKIIKDKDFLDNEENEDILEDIVLTLTLFEDREMIEERLKTYAHLFDDKVMKQLKRRRYTGWGRLSRKLINGIRDKQSGKTILDFLKSDGFANRNFMQLIHDDSLTFKEDIQKAQVSGQGDSLHEHIANLAGSPAIKKGILQTVKVVDELVKVMGRHKPENIVIEMARENQTTQKGQKNSRERMKRIEEGIKELGSQILKEHPVENTQLQNEKLYLYYLQNGRDMYVDQELDINRLSDYDVDHIVPQSFLKDDSIDNKVLTRSDKARGKSDNVPSEEVVKKMKNYWRQLLNAKLITQRKFDNLTKAERGGLSELDKAGFIKRQLVETRQITKHVAQILDSRMNTKYDENDKLIREVKVITLKSKLVSDFRKDFQFYKVREINNYHHAHDAYLNAVVGTALIKKYPKLESEFVYGDYKVYDVRKMIAKSEQEIGKATAKYFFYSNIMNFFKTEITLANGEIRKRPLIETNGETGEIVWDKGRDFATVRKVLSMPQVNIVKKTEVQTGGFSKESILPKRNSDKLIARKKDWDPKKYGGFDSPTVAYSVLVVAKVEKGKSKKLKSVKELLGITIMERSSFEKNPIDFLEAKGYKEVKKDLIIKLPKYSLFELENGRKRMLASAGELQKGNELALPSKYVNFLYLASHYEKLKGSPEDNEQKQLFVEQHKHYLDEIIEQISEFSKRVILADANLDKVLSAYNKHRDKPIREQAENIIHLFTLTNLGAPAAFKYFDTTIDRKRYTSTKEVLDATLIHQSITGLYETRIDLSQLGGDGGPAPAPAPAPGGTLNLEDEYRLYETSAEPEVSPGSTWLSDFPQAWAETGGMGLAVRQAPLIIPLKATSTPVSIKQYPMSQEAKLGIKPHIQRLLDQGILVPCQSPWNTPLLPVKKPGTNDYRPVQDLREVNKRVEDIHPTVPNPYNLLSGLPPSHRWYTVLDLKDAFFCLRLHPTSQPLFAFEWRDPGMGISGQLTWTRLPQGFKNSPTLFNEALHRDLADFRIQHPDLILLQYVDDILLAATSELDCQQGTRALLLTLGNLGYRASAKKAQLCQKQVKYLGYLLKEGQRWLTEARKETVMGQPTPKTPRQLREFLGTAGFCRLWIPGFAEMAAPLYPLTKPGTLFNWGPDQQKAYQEIKQALLTAPALGLPDLTKPFELFVDEKQGYAKGVLTQKLGPWRRPVAYLSKKLDPVAAGWPPCLRMVAAIAVLRKDAGKLTMGQPLVILAPHAVEALVKQPPDRWLSNARMTHYQAMLLDTDRVQFGPVVALNPATLLPLPEEGAPHDCLEILAETHGTRPDLTDQPIPDADHTWYTDGSSFLQEGQRKAGAAVTTETEVIWARALPAGTSAQRAELIALTQALKMAEGKRLNVYTDSRYAFATAHIHGEIYRRRGWLTSEGREIKNKSEILALLKALFLPKRLSIIHCLGHQKGDSAEARGNRLADQAAREAAIKTPPDTSTLLAGKRTADGSEFEKRTADGSEFESPKKKAKVE

SEQ ID NO: 1853 - protein, 2091 aa, synthetic construct
MPAAKRVKLDGGDKKYSIGLDIGTNSVGWAVITDEYKVPSKKFKVLGNTDRHSIKKNLIGALLFDSGETAEATRLKRTARRRYTRRKNRICYLQEIFSNEMAKVDDSFFHRLEESFLVEEDKKHERHPIFGNIVDEVAYHEKYPTIYHLRKKLVDSTDKADLRLIYLALAHMIKFRGHFLIEGDLNPDNSDVDKLFIQLVQTYNQLFEENPINASGVDAKAILSARLSKSRRLENLIAQLPGEKKNGLFGNLIALSLGLTPNFKSNFDLAEDAKLQLSKDTYDDDLDNLLAQIGDQYADLFLAAKNLSDAILLSDILRVNTEITKAPLSASMIKRYDEHHQDLTLLKALVRQQLPEKYKEIFFDQSKNGYAGYIDGGASQEEFYKFIKPILEKMDGTEELLVKLNREDLLRKQRTFDNGSIPHQIHLGELHAILRRQEDFYPFLKDNREKIEKILTFRIPYYVGPLARGNSRFAWMTRKSEETITPWNFEEVVDKGASAQSFIERMTNFDKNLPNEKVLPKHSLLYEYFTVYNELTKVKYVTEGMRKPAFLSGEQKKAIVDLLFKTNRKVTVKQLKEDYFKKIECFDSVEISGVEDRFNASLGTYHDLLKIIKDKDFLDNEENEDILEDIVLTLTLFEDREMIEERLKTYAHLFDDKVMKQLKRRRYTGWGRLSRKLINGIRDKQSGKTILDFLKSDGFANRNFMQLIHDDSLTFKEDIQKAQVSGQGDSLHEHIANLAGSPAIKKGILQTVKVVDELVKVMGRHKPENIVIEMARENQTTQKGQKNSRERMKRIEEGIKELGSQILKEHPVENTQLQNEKLYLYYLQNGRDMYVDQELDINRLSDYDVDHIVPQSFLKDDSIDNKVLTRSDKARGKSDNVPSEEVVKKMKNYWRQLLNAKLITQRKFDNLTKAERGGLSELDKAGFIKRQLVETRQITKHVAQILDSRMNTKYDENDKLIREVKVITLKSKLVSDFRKDFQFYKVREINNYHHAHDAYLNAVVGTALIKKYPKLESEFVYGDYKVYDVRKMIAKSEQEIGKATAKYFFYSNIMNFFKTEITLANGEIRKRPLIETNGETGEIVWDKGRDFATVRKVLSMPQVNIVKKTEVQTGGFSKESILPKRNSDKLIARKKDWDPKKYGGFDSPTVAYSVLVVAKVEKGKSKKLKSVKELLGITIMERSSFEKNPIDFLEAKGYKEVKKDLIIKLPKYSLFELENGRKRMLASAGELQKGNELALPSKYVNFLYLASHYEKLKGSPEDNEQKQLFVEQHKHYLDEIIEQISEFSKRVILADANLDKVLSAYNKHRDKPIREQAENIIHLFTLTNLGAPAAFKYFDTTIDRKRYTSTKEVLDATLIHQSITGLYETRIDLSQLGGDGGGGGGSSGGTLNLEDEYRLYETSAEPEVSPGSTWLSDFPQAWAETGGMGLAVRQAPLIIPLKATSTPVSIKQYPMSQEAKLGIKPHIQRLLDQGILVPCQSPWNTPLLPVKKPGTNDYRPVQDLREVNKRVEDIHPTVPNPYNLLSGLPPSHRWYTVLDLKDAFFCLRLHPTSQPLFAFEWRDPGMGISGQLTWTRLPQGFKNSPTLFNEALHRDLADFRIQHPDLILLQYVDDILLAATSELDCQQGTRALLLTLGNLGYRASAKKAQLCQKQVKYLGYLLKEGQRWLTEARKETVMGQPTPKTPRQLREFLGTAGFCRLWIPGFAEMAAPLYPLTKPGTLFNWGPDQQKAYQEIKQALLTAPALGLPDLTKPFELFVDEKQGYAKGVLTQKLGPWRRPVAYLSKKLDPVAAGWPPCLRMVAAIAVLRKDAGKLTMGQPLVILAPHAVEALVKQPPDRWLSNARMTHYQAMLLDTDRVQFGPVVALNPATLLPLPEEGAPHDCLEILAETHGTRPDLTDQPIPDADHTWYTDGSSFLQEGQRKAGAAVTTETEVIWARALPAGTSAQRAELIALTQALKMAEGKRLNVYTDSRYAFATAHIHGEIYRRRGWLTSEGREIKNKSEILALLKALFLPKRLSIIHCLGHQKGDSAEARGNRLADQAAREAAIKTPPDTSTLLAGKRTADGSEFEKRTADGSEFESPKKKAKVE

SEQ ID NO: 1854 - protein, 2091 aa, synthetic construct
MPAAKRVKLDGGDKKYSIGLDIGTNSVGWAVITDEYKVPSKKFKVLGNTDRHSIKKNLIGALLFDSGETAEATRLKRTARRRYTRRKNRICYLQEIFSNEMAKVDDSFFHRLEESFLVEEDKKHERHPIFGNIVDEVAYHEKYPTIYHLRKKLVDSTDKADLRLIYLALAHMIKFRGHFLIEGDLNPDNSDVDKLFIQLVQTYNQLFEENPINASGVDAKAILSARLSKSRRLENLIAQLPGEKKNGLFGNLIALSLGLTPNFKSNFDLAEDAKLQLSKDTYDDDLDNLLAQIGDQYADLFLAAKNLSDAILLSDILRVNTEITKAPLSASMIKRYDEHHQDLTLLKALVRQQLPEKYKEIFFDQSKNGYAGYIDGGASQEEFYKFIKPILEKMDGTEELLVKLNREDLLRKQRTFDNGSIPHQIHLGELHAILRRQEDFYPFLKDNREKIEKILTFRIPYYVGPLARGNSRFAWMTRKSEETITPWNFEEVVDKGASAQSFIERMTNFDKNLPNEKVLPKHSLLYEYFTVYNELTKVKYVTEGMRKPAFLSGEQKKAIVDLLFKTNRKVTVKQLKEDYFKKIECFDSVEISGVEDRFNASLGTYHDLLKIIKDKDFLDNEENEDILEDIVLTLTLFEDREMIEERLKTYAHLFDDKVMKQLKRRRYTGWGRLSRKLINGIRDKQSGKTILDFLKSDGFANRNFMQLIHDDSLTFKEDIQKAQVSGQGDSLHEHIANLAGSPAIKKGILQTVKVVDELVKVMGRHKPENIVIEMARENQTTQKGQKNSRERMKRIEEGIKELGSQILKEHPVENTQLQNEKLYLYYLQNGRDMYVDQELDINRLSDYDVDHIVPQSFLKDDSIDNKVLTRSDKARGKSDNVPSEEVVKKMKNYWRQLLNAKLITQRKFDNLTKAERGGLSELDKAGFIKRQLVETRQITKHVAQILDSRMNTKYDENDKLIREVKVITLKSKLVSDFRKDFQFYKVREINNYHHAHDAYLNAVVGTALIKKYPKLESEFVYGDYKVYDVRKMIAKSEQEIGKATAKYFFYSNIMNFFKTEITLANGEIRKRPLIETNGETGEIVWDKGRDFATVRKVLSMPQVNIVKKTEVQTGGFSKESILPKRNSDKLIARKKDWDPKKYGGFDSPTVAYSVLVVAKVEKGKSKKLKSVKELLGITIMERSSFEKNPIDFLEAKGYKEVKKDLIIKLPKYSLFELENGRKRMLASAGELQKGNELALPSKYVNFLYLASHYEKLKGSPEDNEQKQLFVEQHKHYLDEIIEQISEFSKRVILADANLDKVLSAYNKHRDKPIREQAENIIHLFTLTNLGAPAAFKYFDTTIDRKRYTSTKEVLDATLIHQSITGLYETRIDLSQLGGDGGGGGPAPGGTLNLEDEYRLYETSAEPEVSPGSTWLSDFPQAWAETGGMGLAVRQAPLIIPLKATSTPVSIKQYPMSQEAKLGIKPHIQRLLDQGILVPCQSPWNTPLLPVKKPGTNDYRPVQDLREVNKRVEDIHPTVPNPYNLLSGLPPSHRWYTVLDLKDAFFCLRLHPTSQPLFAFEWRDPGMGISGQLTWTRLPQGFKNSPTLFNEALHRDLADFRIQHPDLILLQYVDDILLAATSELDCQQGTRALLLTLGNLGYRASAKKAQLCQKQVKYLGYLLKEGQRWLTEARKETVMGQPTPKTPRQLREFLGTAGFCRLWIPGFAEMAAPLYPLTKPGTLFNWGPDQQKAYQEIKQALLTAPALGLPDLTKPFELFVDEKQGYAKGVLTQKLGPWRRPVAYLSKKLDPVAAGWPPCLRMVAAIAVLRKDAGKLTMGQPLVILAPHAVEALVKQPPDRWLSNARMTHYQAMLLDTDRVQFGPVVALNPATLLPLPEEGAPHDCLEILAETHGTRPDLTDQPIPDADHTWYTDGSSFLQEGQRKAGAAVTTETEVIWARALPAGTSAQRAELIALTQALKMAEGKRLNVYTDSRYAFATAHIHGEIYRRRGWLTSEGREIKNKSEILALLKALFLPKRLSIIHCLGHQKGDSAEARGNRLADQAAREAAIKTPPDTSTLLAGKRTADGSEFEKRTADGSEFESPKKKAKVE

SEQ ID NO: 1855 - protein, 2090 aa, synthetic construct
MPAAKRVKLDGGDKKYSIGLDIGTNSVGWAVITDEYKVPSKKFKVLGNTDRHSIKKNLIGALLFDSGETAEATRLKRTARRRYTRRKNRICYLQEIFSNEMAKVDDSFFHRLEESFLVEEDKKHERHPIFGNIVDEVAYHEKYPTIYHLRKKLVDSTDKADLRLIYLALAHMIKFRGHFLIEGDLNPDNSDVDKLFIQLVQTYNQLFEENPINASGVDAKAILSARLSKSRRLENLIAQLPGEKKNGLFGNLIALSLGLTPNFKSNFDLAEDAKLQLSKDTYDDDLDNLLAQIGDQYADLFLAAKNLSDAILLSDILRVNTEITKAPLSASMIKRYDEHHQDLTLLKALVRQQLPEKYKEIFFDQSKNGYAGYIDGGASQEEFYKFIKPILEKMDGTEELLVKLNREDLLRKQRTFDNGSIPHQIHLGELHAILRRQEDFYPFLKDNREKIEKILTFRIPYYVGPLARGNSRFAWMTRKSEETITPWNFEEVVDKGASAQSFIERMTNFDKNLPNEKVLPKHSLLYEYFTVYNELTKVKYVTEGMRKPAFLSGEQKKAIVDLLFKTNRKVTVKQLKEDYFKKIECFDSVEISGVEDRFNASLGTYHDLLKIIKDKDFLDNEENEDILEDIVLTLTLFEDREMIEERLKTYAHLFDDKVMKQLKRRRYTGWGRLSRKLINGIRDKQSGKTILDFLKSDGFANRNFMQLIHDDSLTFKEDIQKAQVSGQGDSLHEHIANLAGSPAIKKGILQTVKVVDELVKVMGRHKPENIVIEMARENQTTQKGQKNSRERMKRIEEGIKELGSQILKEHPVENTQLQNEKLYLYYLQNGRDMYVDQELDINRLSDYDVDHIVPQSFLKDDSIDNKVLTRSDKARGKSDNVPSEEVVKKMKNYWRQLLNAKLITQRKFDNLTKAERGGLSELDKAGFIKRQLVETRQITKHVAQILDSRMNTKYDENDKLIREVKVITLKSKLVSDFRKDFQFYKVREINNYHHAHDAYLNAVVGTALIKKYPKLESEFVYGDYKVYDVRKMIAKSEQEIGKATAKYFFYSNIMNFFKTEITLANGEIRKRPLIETNGETGEIVWDKGRDFATVRKVLSMPQVNIVKKTEVQTGGFSKESILPKRNSDKLIARKKDWDPKKYGGFDSPTVAYSVLVVAKVEKGKSKKLKSVKELLGITIMERSSFEKNPIDFLEAKGYKEVKKDLIIKLPKYSLFELENGRKRMLASAGELQKGNELALPSKYVNFLYLASHYEKLKGSPEDNEQKQLFVEQHKHYLDEIIEQISEFSKRVILADANLDKVLSAYNKHRDKPIREQAENIIHLFTLTNLGAPAAFKYFDTTIDRKRYTSTKEVLDATLIHQSITGLYETRIDLSQLGGDGGPAPAPGGTLNLEDEYRLYETSAEPEVSPGSTWLSDFPQAWAETGGMGLAVRQAPLIIPLKATSTPVSIKQYPMSQEAKLGIKPHIQRLLDQGILVPCQSPWNTPLLPVKKPGTNDYRPVQDLREVNKRVEDIHPTVPNPYNLLSGLPPSHRWYTVLDLKDAFFCLRLHPTSQPLFAFEWRDPGMGISGQLTWTRLPQGFKNSPTLFNEALHRDLADFRIQHPDLILLQYVDDILLAATSELDCQQGTRALLLTLGNLGYRASAKKAQLCQKQVKYLGYLLKEGQRWLTEARKETVMGQPTPKTPRQLREFLGTAGFCRLWIPGFAEMAAPLYPLTKPGTLFNWGPDQQKAYQEIKQALLTAPALGLPDLTKPFELFVDEKQGYAKGVLTQKLGPWRRPVAYLSKKLDPVAAGWPPCLRMVAAIAVLRKDAGKLTMGQPLVILAPHAVEALVKQPPDRWLSNARMTHYQAMLLDTDRVQFGPVVALNPATLLPLPEEGAPHDCLEILAETHGTRPDLTDQPIPDADHTWYTDGSSFLQEGQRKAGAAVTTETEVIWARALPAGTSAQRAELIALTQALKMAEGKRLNVYTDSRYAFATAHIHGEIYRRRGWLTSEGREIKNKSEILALLKALFLPKRLSIIHCLGHQKGDSAEARGNRLADQAAREAAIKTPPDTSTLLAGKRTADGSEFEKRTADGSEFESPKKKAKVE

SEQ ID NO: 1856 - protein, 2096 aa, synthetic construct
MPAAKRVKLDGGDKKYSIGLDIGTNSVGWAVITDEYKVPSKKFKVLGNTDRHSIKKNLIGALLFDSGETAEATRLKRTARRRYTRRKNRICYLQEIFSNEMAKVDDSFFHRLEESFLVEEDKKHERHPIFGNIVDEVAYHEKYPTIYHLRKKLVDSTDKADLRLIYLALAHMIKFRGHFLIEGDLNPDNSDVDKLFIQLVQTYNQLFEENPINASGVDAKAILSARLSKSRRLENLIAQLPGEKKNGLFGNLIALSLGLTPNFKSNFDLAEDAKLQLSKDTYDDDLDNLLAQIGDQYADLFLAAKNLSDAILLSDILRVNTEITKAPLSASMIKRYDEHHQDLTLLKALVRQQLPEKYKEIFFDQSKNGYAGYIDGGASQEEFYKFIKPILEKMDGTEELLVKLNREDLLRKQRTFDNGSIPHQIHLGELHAILRRQEDFYPFLKDNREKIEKILTFRIPYYVGPLARGNSRFAWMTRKSEETITPWNFEEVVDKGASAQSFIERMTNFDKNLPNEKVLPKHSLLYEYFTVYNELTKVKYVTEGMRKPAFLSGEQKKAIVDLLFKTNRKVTVKQLKEDYFKKIECFDSVEISGVEDRFNASLGTYHDLLKIIKDKDFLDNEENEDILEDIVLTLTLFEDREMIEERLKTYAHLFDDKVMKQLKRRRYTGWGRLSRKLINGIRDKQSGKTILDFLKSDGFANRNFMQLIHDDSLTFKEDIQKAQVSGQGDSLHEHIANLAGSPAIKKGILQTVKVVDELVKVMGRHKPENIVIEMARENQTTQKGQKNSRERMKRIEEGIKELGSQILKEHPVENTQLQNEKLYLYYLQNGRDMYVDQELDINRLSDYDVDHIVPQSFLKDDSIDNKVLTRSDKARGKSDNVPSEEVVKKMKNYWRQLLNAKLITQRKFDNLTKAERGGLSELDKAGFIKRQLVETRQITKHVAQILDSRMNTKYDENDKLIREVKVITLKSKLVSDFRKDFQFYKVREINNYHHAHDAYLNAVVGTALIKKYPKLESEFVYGDYKVYDVRKMIAKSEQEIGKATAKYFFYSNIMNFFKTEITLANGEIRKRPLIETNGETGEIVWDKGRDFATVRKVLSMPQVNIVKKTEVQTGGFSKESILPKRNSDKLIARKKDWDPKKYGGFDSPTVAYSVLVVAKVEKGKSKKLKSVKELLGITIMERSSFEKNPIDFLEAKGYKEVKKDLIIKLPKYSLFELENGRKRMLASAGELQKGNELALPSKYVNFLYLASHYEKLKGSPEDNEQKQLFVEQHKHYLDEIIEQISEFSKRVILADANLDKVLSAYNKHRDKPIREQAENIIHLFTLTNLGAPAAFKYFDTTIDRKRYTSTKEVLDATLIHQSITGLYETRIDLSQLGGDGGPAPGGGEAAAKGGTLNLEDEYRLYETSAEPEVSPGSTWLSDFPQAWAETGGMGLAVRQAPLIIPLKATSTPVSIKQYPMSQEAKLGIKPHIQRLLDQGILVPCQSPWNTPLLPVKKPGTNDYRPVQDLREVNKRVEDIHPTVPNPYNLLSGLPPSHRWYTVLDLKDAFFCLRLHPTSQPLFAFEWRDPGMGISGQLTWTRLPQGFKNSPTLFNEALHRDLADFRIQHPDLILLQYVDDILLAATSELDCQQGTRALLLTLGNLGYRASAKKAQLCQKQVKYLGYLLKEGQRWLTEARKETVMGQPTPKTPRQLREFLGKAGFCRLFIPGFAEMAAPLYPLTKPGTLFNWGPDQQKAYQEIKQALLTAPALGLPDLTKPFELFVDEKQGYAKGVLTQKLGPWRRPVAYLSKKLDPVAAGWPPCLRMVAAIAVLRKDAGKLTMGQPLVILAPHAVEALVKQPPDRWLSNARMTHYQAMLLDTDRVQFGPVVALNPATLLPLPEEGAPHDCLEILAETHGTRPDLTDQPIPDADHTWYTDGSSFLQEGQRKAGAAVTTETEVIWARALPAGTSAQRAELIALTQALKMAEGKRLNVYTDSRYAFATAHIHGEIYRRRGWLTSEGREIKNKSEILALLKALFLPKRLSIIHCLGHQKGDSAEARGNRLADQAAREAAIKTPPDTSTLLAGKRTADGSEFEKRTADGSEFESPKKKAKVE

SEQ ID NO: 1857 - protein, 2094 aa, synthetic construct
MPAAKRVKLDGGDKKYSIGLDIGTNSVGWAVITDEYKVPSKKFKVLGNTDRHSIKKNLIGALLFDSGETAEATRLKRTARRRYTRRKNRICYLQEIFSNEMAKVDDSFFHRLEESFLVEEDKKHERHPIFGNIVDEVAYHEKYPTIYHLRKKLVDSTDKADLRLIYLALAHMIKFRGHFLIEGDLNPDNSDVDKLFIQLVQTYNQLFEENPINASGVDAKAILSARLSKSRRLENLIAQLPGEKKNGLFGNLIALSLGLTPNFKSNFDLAEDAKLQLSKDTYDDDLDNLLAQIGDQYADLFLAAKNLSDAILLSDILRVNTEITKAPLSASMIKRYDEHHQDLTLLKALVRQQLPEKYKEIFFDQSKNGYAGYIDGGASQEEFYKFIKPILEKMDGTEELLVKLNREDLLRKQRTFDNGSIPHQIHLGELHAILRRQEDFYPFLKDNREKIEKILTFRIPYYVGPLARGNSRFAWMTRKSEETITPWNFEEVVDKGASAQSFIERMTNFDKNLPNEKVLPKHSLLYEYFTVYNELTKVKYVTEGMRKPAFLSGEQKKAIVDLLFKTNRKVTVKQLKEDYFKKIECFDSVEISGVEDRFNASLGTYHDLLKIIKDKDFLDNEENEDILEDIVLTLTLFEDREMIEERLKTYAHLFDDKVMKQLKRRRYTGWGRLSRKLINGIRDKQSGKTILDFLKSDGFANRNFMQLIHDDSLTFKEDIQKAQVSGQGDSLHEHIANLAGSPAIKKGILQTVKVVDELVKVMGRHKPENIVIEMARENQTTQKGQKNSRERMKRIEEGIKELGSQILKEHPVENTQLQNEKLYLYYLQNGRDMYVDQELDINRLSDYDVDHIVPQSFLKDDSIDNKVLTRSDKARGKSDNVPSEEVVKKMKNYWRQLLNAKLITQRKFDNLTKAERGGLSELDKAGFIKRQLVETRQITKHVAQILDSRMNTKYDENDKLIREVKVITLKSKLVSDFRKDFQFYKVREINNYHHAHDAYLNAVVGTALIKKYPKLESEFVYGDYKVYDVRKMIAKSEQEIGKATAKYFFYSNIMNFFKTEITLANGEIRKRPLIETNGETGEIVWDKGRDFATVRKVLSMPQVNIVKKTEVQTGGFSKESILPKRNSDKLIARKKDWDPKKYGGFDSPTVAYSVLVVAKVEKGKSKKLKSVKELLGITIMERSSFEKNPIDFLEAKGYKEVKKDLIIKLPKYSLFELENGRKRMLASAGELQKGNELALPSKYVNFLYLASHYEKLKGSPEDNEQKQLFVEQHKHYLDEIIEQISEFSKRVILADANLDKVLSAYNKHRDKPIREQAENIIHLFTLTNLGAPAAFKYFDTTIDRKRYTSTKEVLDATLIHQSITGLYETRIDLSQLGGDGGGGGPAPGSSGGTLNLEDEYRLYETSAEPEVSPGSTWLSDFPQAWAETGGMGLAVRQAPLIIPLKATSTPVSIKQYPMSQEAKLGIKPHIQRLLDQGILVPCQSPWNTPLLPVKKPGTNDYRPVQDLREVNKRVEDIHPTVPNPYNLLSGLPPSHRWYTVLDLKDAFFCLRLHPTSQPLFAFEWRDPGMGISGQLTWTRLPQGFKNSPTLFNEALHRDLADFRIQHPDLILLQYVDDILLAATSELDCQQGTRALLLTLGNLGYRASAKKAQLCQKQVKYLGYLLKEGQRWLTEARKETVMGQPTPKTPRQLREFLGKAGFCRLFIPGFAEMAAPLYPLTKPGTLFNWGPDQQKAYQEIKQALLTAPALGLPDLTKPFELFVDEKQGYAKGVLTQKLGPWRRPVAYLSKKLDPVAAGWPPCLRMVAAIAVLRKDAGKLTMGQPLVILAPHAVEALVKQPPDRWLSNARMTHYQAMLLDTDRVQFGPVVALNPATLLPLPEEGAPHDCLEILAETHGTRPDLTDQPIPDADHTWYTDGSSFLQEGQRKAGAAVTTETEVIWARALPAGTSAQRAELIALTQALKMAEGKRLNVYTDSRYAFATAHIHGEIYRRRGWLTSEGREIKNKSEILALLKALFLPKRLSIIHCLGHQKGDSAEARGNRLADQAAREAAIKTPPDTSTLLAGKRTADGSEFEKRTADGSEFESPKKKAKVE

SEQ ID NO: 1858 - protein, 2093 aa, synthetic construct
MPAAKRVKLDGGDKKYSIGLDIGTNSVGWAVITDEYKVPSKKFKVLGNTDRHSIKKNLIGALLFDSGETAEATRLKRTARRRYTRRKNRICYLQEIFSNEMAKVDDSFFHRLEESFLVEEDKKHERHPIFGNIVDEVAYHEKYPTIYHLRKKLVDSTDKADLRLIYLALAHMIKFRGHFLIEGDLNPDNSDVDKLFIQLVQTYNQLFEENPINASGVDAKAILSARLSKSRRLENLIAQLPGEKKNGLFGNLIALSLGLTPNFKSNFDLAEDAKLQLSKDTYDDDLDNLLAQIGDQYADLFLAAKNLSDAILLSDILRVNTEITKAPLSASMIKRYDEHHQDLTLLKALVRQQLPEKYKEIFFDQSKNGYAGYIDGGASQEEFYKFIKPILEKMDGTEELLVKLNREDLLRKQRTFDNGSIPHQIHLGELHAILRRQEDFYPFLKDNREKIEKILTFRIPYYVGPLARGNSRFAWMTRKSEETITPWNFEEVVDKGASAQSFIERMTNFDKNLPNEKVLPKHSLLYEYFTVYNELTKVKYVTEGMRKPAFLSGEQKKAIVDLLFKTNRKVTVKQLKEDYFKKIECFDSVEISGVEDRFNASLGTYHDLLKIIKDKDFLDNEENEDILEDIVLTLTLFEDREMIEERLKTYAHLFDDKVMKQLKRRRYTGWGRLSRKLINGIRDKQSGKTILDFLKSDGFANRNFMQLIHDDSLTFKEDIQKAQVSGQGDSLHEHIANLAGSPAIKKGILQTVKVVDELVKVMGRHKPENIVIEMARENQTTQKGQKNSRERMKRIEEGIKELGSQILKEHPVENTQLQNEKLYLYYLQNGRDMYVDQELDINRLSDYDVDHIVPQSFLKDDSIDNKVLTRSDKARGKSDNVPSEEVVKKMKNYWRQLLNAKLITQRKFDNLTKAERGGLSELDKAGFIKRQLVETRQITKHVAQILDSRMNTKYDENDKLIREVKVITLKSKLVSDFRKDFQFYKVREINNYHHAHDAYLNAVVGTALIKKYPKLESEFVYGDYKVYDVRKMIAKSEQEIGKATAKYFFYSNIMNFFKTEITLANGEIRKRPLIETNGETGEIVWDKGRDFATVRKVLSMPQVNIVKKTEVQTGGFSKESILPKRNSDKLIARKKDWDPKKYGGFDSPTVAYSVLVVAKVEKGKSKKLKSVKELLGITIMERSSFEKNPIDFLEAKGYKEVKKDLIIKLPKYSLFELENGRKRMLASAGELQKGNELALPSKYVNFLYLASHYEKLKGSPEDNEQKQLFVEQHKHYLDEIIEQISEFSKRVILADANLDKVLSAYNKHRDKPIREQAENIIHLFTLTNLGAPAAFKYFDTTIDRKRYTSTKEVLDATLIHQSITGLYETRIDLSQLGGDGGPAPEAAAKGGTLNLEDEYRLYETSAEPEVSPGSTWLSDFPQAWAETGGMGLAVRQAPLIIPLKATSTPVSIKQYPMSQEAKLGIKPHIQRLLDQGILVPCQSPWNTPLLPVKKPGTNDYRPVQDLREVNKRVEDIHPTVPNPYNLLSGLPPSHRWYTVLDLKDAFFCLRLHPTSQPLFAFEWRDPGMGISGQLTWTRLPQGFKNSPTLFNEALHRDLADFRIQHPDLILLQYVDDILLAATSELDCQQGTRALLLTLGNLGYRASAKKAQLCQKQVKYLGYLLKEGQRWLTEARKETVMGQPTPKTPRQLREFLGKAGFCRLFIPGFAEMAAPLYPLTKPGTLFNWGPDQQKAYQEIKQALLTAPALGLPDLTKPFELFVDEKQGYAKGVLTQKLGPWRRPVAYLSKKLDPVAAGWPPCLRMVAAIAVLRKDAGKLTMGQPLVILAPHAVEALVKQPPDRWLSNARMTHYQAMLLDTDRVQFGPVVALNPATLLPLPEEGAPHDCLEILAETHGTRPDLTDQPIPDADHTWYTDGSSFLQEGQRKAGAAVTTETEVIWARALPAGTSAQRAELIALTQALKMAEGKRLNVYTDSRYAFATAHIHGEIYRRRGWLTSEGREIKNKSEILALLKALFLPKRLSIIHCLGHQKGDSAEARGNRLADQAAREAAIKTPPDTSTLLAGKRTADGSEFEKRTADGSEFESPKKKAKVE

SEQ ID NO: 1859 - protein, 2096 aa, synthetic construct
MPAAKRVKLDGGDKKYSIGLDIGTNSVGWAVITDEYKVPSKKFKVLGNTDRHSIKKNLIGALLFDSGETAEATRLKRTARRRYTRRKNRICYLQEIFSNEMAKVDDSFFHRLEESFLVEEDKKHERHPIFGNIVDEVAYHEKYPTIYHLRKKLVDSTDKADLRLIYLALAHMIKFRGHFLIEGDLNPDNSDVDKLFIQLVQTYNQLFEENPINASGVDAKAILSARLSKSRRLENLIAQLPGEKKNGLFGNLIALSLGLTPNFKSNFDLAEDAKLQLSKDTYDDDLDNLLAQIGDQYADLFLAAKNLSDAILLSDILRVNTEITKAPLSASMIKRYDEHHQDLTLLKALVRQQLPEKYKEIFFDQSKNGYAGYIDGGASQEEFYKFIKPILEKMDGTEELLVKLNREDLLRKQRTFDNGSIPHQIHLGELHAILRRQEDFYPFLKDNREKIEKILTFRIPYYVGPLARGNSRFAWMTRKSEETITPWNFEEVVDKGASAQSFIERMTNFDKNLPNEKVLPKHSLLYEYFTVYNELTKVKYVTEGMRKPAFLSGEQKKAIVDLLFKTNRKVTVKQLKEDYFKKIECFDSVEISGVEDRFNASLGTYHDLLKIIKDKDFLDNEENEDILEDIVLTLTLFEDREMIEERLKTYAHLFDDKVMKQLKRRRYTGWGRLSRKLINGIRDKQSGKTILDFLKSDGFANRNFMQLIHDDSLTFKEDIQKAQVSGQGDSLHEHIANLAGSPAIKKGILQTVKVVDELVKVMGRHKPENIVIEMARENQTTQKGQKNSRERMKRIEEGIKELGSQILKEHPVENTQLQNEKLYLYYLQNGRDMYVDQELDINRLSDYDVDHIVPQSFLKDDSIDNKVLTRSDKARGKSDNVPSEEVVKKMKNYWRQLLNAKLITQRKFDNLTKAERGGLSELDKAGFIKRQLVETRQITKHVAQILDSRMNTKYDENDKLIREVKVITLKSKLVSDFRKDFQFYKVREINNYHHAHDAYLNAVVGTALIKKYPKLESEFVYGDYKVYDVRKMIAKSEQEIGKATAKYFFYSNIMNFFKTEITLANGEIRKRPLIETNGETGEIVWDKGRDFATVRKVLSMPQVNIVKKTEVQTGGFSKESILPKRNSDKLIARKKDWDPKKYGGFDSPTVAYSVLVVAKVEKGKSKKLKSVKELLGITIMERSSFEKNPIDFLEAKGYKEVKKDLIIKLPKYSLFELENGRKRMLASAGELQKGNELALPSKYVNFLYLASHYEKLKGSPEDNEQKQLFVEQHKHYLDEIIEQISEFSKRVILADANLDKVLSAYNKHRDKPIREQAENIIHLFTLTNLGAPAAFKYFDTTIDRKRYTSTKEVLDATLIHQSITGLYETRIDLSQLGGDGGGGSEAAAKGSSGGTLNLEDEYRLYETSAEPEVSPGSTWLSDFPQAWAETGGMGLAVRQAPLIIPLKATSTPVSIKQYPMSQEAKLGIKPHIQRLLDQGILVPCQSPWNTPLLPVKKPGTNDYRPVQDLREVNKRVEDIHPTVPNPYNLLSGLPPSHRWYTVLDLKDAFFCLRLHPTSQPLFAFEWRDPGMGISGQLTWTRLPQGFKNSPTLFNEALHRDLADFRIQHPDLILLQYVDDILLAATSELDCQQGTRALLLTLGNLGYRASAKKAQLCQKQVKYLGYLLKEGQRWLTEARKETVMGQPTPKTPRQLREFLGKAGFCRLFIPGFAEMAAPLYPLTKPGTLFNWGPDQQKAYQEIKQALLTAPALGLPDLTKPFELFVDEKQGYAKGVLTQKLGPWRRPVAYLSKKLDPVAAGWPPCLRMVAAIAVLRKDAGKLTMGQPLVILAPHAVEALVKQPPDRWLSNARMTHYQAMLLDTDRVQFGPVVALNPATLLPLPEEGAPHDCLEILAETHGTRPDLTDQPIPDADHTWYTDGSSFLQEGQRKAGAAVTTETEVIWARALPAGTSAQRAELIALTQALKMAEGKRLNVYTDSRYAFATAHIHGEIYRRRGWLTSEGREIKNKSEILALLKALFLPKRLSIIHCLGHQKGDSAEARGNRLADQAAREAAIKTPPDTSTLLAGKRTADGSEFEKRTADGSEFESPKKKAKVE

SEQ ID NO: 1860 - protein, 2100 aa, synthetic construct
MPAAKRVKLDGGDKKYSIGLDIGTNSVGWAVITDEYKVPSKKFKVLGNTDRHSIKKNLIGALLFDSGETAEATRLKRTARRRYTRRKNRICYLQEIFSNEMAKVDDSFFHRLEESFLVEEDKKHERHPIFGNIVDEVAYHEKYPTIYHLRKKLVDSTDKADLRLIYLALAHMIKFRGHFLIEGDLNPDNSDVDKLFIQLVQTYNQLFEENPINASGVDAKAILSARLSKSRRLENLIAQLPGEKKNGLFGNLIALSLGLTPNFKSNFDLAEDAKLQLSKDTYDDDLDNLLAQIGDQYADLFLAAKNLSDAILLSDILRVNTEITKAPLSASMIKRYDEHHQDLTLLKALVRQQLPEKYKEIFFDQSKNGYAGYIDGGASQEEFYKFIKPILEKMDGTEELLVKLNREDLLRKQRTFDNGSIPHQIHLGELHAILRRQEDFYPFLKDNREKIEKILTFRIPYYVGPLARGNSRFAWMTRKSEETITPWNFEEVVDKGASAQSFIERMTNFDKNLPNEKVLPKHSLLYEYFTVYNELTKVKYVTEGMRKPAFLSGEQKKAIVDLLFKTNRKVTVKQLKEDYFKKIECFDSVEISGVEDRFNASLGTYHDLLKIIKDKDFLDNEENEDILEDIVLTLTLFEDREMIEERLKTYAHLFDDKVMKQLKRRRYTGWGRLSRKLINGIRDKQSGKTILDFLKSDGFANRNFMQLIHDDSLTFKEDIQKAQVSGQGDSLHEHIANLAGSPAIKKGILQTVKVVDELVKVMGRHKPENIVIEMARENQTTQKGQKNSRERMKRIEEGIKELGSQILKEHPVENTQLQNEKLYLYYLQNGRDMYVDQELDINRLSDYDVDHIVPQSFLKDDSIDNKVLTRSDKARGKSDNVPSEEVVKKMKNYWRQLLNAKLITQRKFDNLTKAERGGLSELDKAGFIKRQLVETRQITKHVAQILDSRMNTKYDENDKLIREVKVITLKSKLVSDFRKDFQFYKVREINNYHHAHDAYLNAVVGTALIKKYPKLESEFVYGDYKVYDVRKMIAKSEQEIGKATAKYFFYSNIMNFFKTEITLANGEIRKRPLIETNGETGEIVWDKGRDFATVRKVLSMPQVNIVKKTEVQTGGFSKESILPKRNSDKLIARKKDWDPKKYGGFDSPTVAYSVLVVAKVEKGKSKKLKSVKELLGITIMERSSFEKNPIDFLEAKGYKEVKKDLIIKLPKYSLFELENGRKRMLASAGELQKGNELALPSKYVNFLYLASHYEKLKGSPEDNEQKQLFVEQHKHYLDEIIEQISEFSKRVILADANLDKVLSAYNKHRDKPIREQAENIIHLFTLTNLGAPAAFKYFDTTIDRKRYTSTKEVLDATLIHQSITGLYETRIDLSQLGGDGGEAAAKGGGGSEAAAKGGTLNLEDEYRLYETSAEPEVSPGSTWLSDFPQAWAETGGMGLAVRQAPLIIPLKATSTPVSIKQYPMSQEAKLGIKPHIQRLLDQGILVPCQSPWNTPLLPVKKPGTNDYRPVQDLREVNKRVEDIHPTVPNPYNLLSGLPPSHRWYTVLDLKDAFFCLRLHPTSQPLFAFEWRDPGMGISGQLTWTRLPQGFKNSPTLFNEALHRDLADFRIQHPDLILLQYVDDILLAATSELDCQQGTRALLLTLGNLGYRASAKKAQLCQKQVKYLGYLLKEGQRWLTEARKETVMGQPTPKTPRQLREFLGKAGFCRLFIPGFAEMAAPLYPLTKPGTLFNWGPDQQKAYQEIKQALLTAPALGLPDLTKPFELFVDEKQGYAKGVLTQKLGPWRRPVAYLSKKLDPVAAGWPPCLRMVAAIAVLRKDAGKLTMGQPLVILAPHAVEALVKQPPDRWLSNARMTHYQAMLLDTDRVQFGPVVALNPATLLPLPEEGAPHDCLEILAETHGTRPDLTDQPIPDADHTWYTDGSSFLQEGQRKAGAAVTTETEVIWARALPAGTSAQRAELIALTQALKMAEGKRLNVYTDSRYAFATAHIHGEIYRRRGWLTSEGREIKNKSEILALLKALFLPKRLSIIHCLGHQKGDSAEARGNRLADQAAREAAIKTPPDTSTLLAGKRTADGSEFEKRTADGSEFESPKKKAKVE

SEQ ID NO: 1861 - protein, 2096 aa, synthetic construct
MPAAKRVKLDGGDKKYSIGLDIGTNSVGWAVITDEYKVPSKKFKVLGNTDRHSIKKNLIGALLFDSGETAEATRLKRTARRRYTRRKNRICYLQEIFSNEMAKVDDSFFHRLEESFLVEEDKKHERHPIFGNIVDEVAYHEKYPTIYHLRKKLVDSTDKADLRLIYLALAHMIKFRGHFLIEGDLNPDNSDVDKLFIQLVQTYNQLFEENPINASGVDAKAILSARLSKSRRLENLIAQLPGEKKNGLFGNLIALSLGLTPNFKSNFDLAEDAKLQLSKDTYDDDLDNLLAQIGDQYADLFLAAKNLSDAILLSDILRVNTEITKAPLSASMIKRYDEHHQDLTLLKALVRQQLPEKYKEIFFDQSKNGYAGYIDGGASQEEFYKFIKPILEKMDGTEELLVKLNREDLLRKQRTFDNGSIPHQIHLGELHAILRRQEDFYPFLKDNREKIEKILTFRIPYYVGPLARGNSRFAWMTRKSEETITPWNFEEVVDKGASAQSFIERMTNFDKNLPNEKVLPKHSLLYEYFTVYNELTKVKYVTEGMRKPAFLSGEQKKAIVDLLFKTNRKVTVKQLKEDYFKKIECFDSVEISGVEDRFNASLGTYHDLLKIIKDKDFLDNEENEDILEDIVLTLTLFEDREMIEERLKTYAHLFDDKVMKQLKRRRYTGWGRLSRKLINGIRDKQSGKTILDFLKSDGFANRNFMQLIHDDSLTFKEDIQKAQVSGQGDSLHEHIANLAGSPAIKKGILQTVKVVDELVKVMGRHKPENIVIEMARENQTTQKGQKNSRERMKRIEEGIKELGSQILKEHPVENTQLQNEKLYLYYLQNGRDMYVDQELDINRLSDYDVDHIVPQSFLKDDSIDNKVLTRSDKARGKSDNVPSEEVVKKMKNYWRQLLNAKLITQRKFDNLTKAERGGLSELDKAGFIKRQLVETRQITKHVAQILDSRMNTKYDENDKLIREVKVITLKSKLVSDFRKDFQFYKVREINNYHHAHDAYLNAVVGTALIKKYPKLESEFVYGDYKVYDVRKMIAKSEQEIGKATAKYFFYSNIMNFFKTEITLANGEIRKRPLIETNGETGEIVWDKGRDFATVRKVLSMPQVNIVKKTEVQTGGFSKESILPKRNSDKLIARKKDWDPKKYGGFDSPTVAYSVLVVAKVEKGKSKKLKSVKELLGITIMERSSFEKNPIDFLEAKGYKEVKKDLIIKLPKYSLFELENGRKRMLASAGELQKGNELALPSKYVNFLYLASHYEKLKGSPEDNEQKQLFVEQHKHYLDEIIEQISEFSKRVILADANLDKVLSAYNKHRDKPIREQAENIIHLFTLTNLGAPAAFKYFDTTIDRKRYTSTKEVLDATLIHQSITGLYETRIDLSQLGGDGGGSSEAAAKGGGGGTLNLEDEYRLYETSAEPEVSPGSTWLSDFPQAWAETGGMGLAVRQAPLIIPLKATSTPVSIKQYPMSQEAKLGIKPHIQRLLDQGILVPCQSPWNTPLLPVKKPGTNDYRPVQDLREVNKRVEDIHPTVPNPYNLLSGLPPSHRWYTVLDLKDAFFCLRLHPTSQPLFAFEWRDPGMGISGQLTWTRLPQGFKNSPTLFNEALHRDLADFRIQHPDLILLQYVDDILLAATSELDCQQGTRALLLTLGNLGYRASAKKAQLCQKQVKYLGYLLKEGQRWLTEARKETVMGQPTPKTPRQLREFLGKAGFCRLFIPGFAEMAAPLYPLTKPGTLFNWGPDQQKAYQEIKQALLTAPALGLPDLTKPFELFVDEKQGYAKGVLTQKLGPWRRPVAYLSKKLDPVAAGWPPCLRMVAAIAVLRKDAGKLTMGQPLVILAPHAVEALVKQPPDRWLSNARMTHYQAMLLDTDRVQFGPVVALNPATLLPLPEEGAPHDCLEILAETHGTRPDLTDQPIPDADHTWYTDGSSFLQEGQRKAGAAVTTETEVIWARALPAGTSAQRAELIALTQALKMAEGKRLNVYTDSRYAFATAHIHGEIYRRRGWLTSEGREIKNKSEILALLKALFLPKRLSIIHCLGHQKGDSAEARGNRLADQAAREAAIKTPPDTSTLLAGKRTADGSEFEKRTADGSEFESPKKKAKVE

SEQ ID NO: 1862 - protein, 2110 aa, synthetic construct
MPAAKRVKLDGGDKKYSIGLDIGTNSVGWAVITDEYKVPSKKFKVLGNTDRHSIKKNLIGALLFDSGETAEATRLKRTARRRYTRRKNRICYLQEIFSNEMAKVDDSFFHRLEESFLVEEDKKHERHPIFGNIVDEVAYHEKYPTIYHLRKKLVDSTDKADLRLIYLALAHMIKFRGHFLIEGDLNPDNSDVDKLFIQLVQTYNQLFEENPINASGVDAKAILSARLSKSRRLENLIAQLPGEKKNGLFGNLIALSLGLTPNFKSNFDLAEDAKLQLSKDTYDDDLDNLLAQIGDQYADLFLAAKNLSDAILLSDILRVNTEITKAPLSASMIKRYDEHHQDLTLLKALVRQQLPEKYKEIFFDQSKNGYAGYIDGGASQEEFYKFIKPILEKMDGTEELLVKLNREDLLRKQRTFDNGSIPHQIHLGELHAILRRQEDFYPFLKDNREKIEKILTFRIPYYVGPLARGNSRFAWMTRKSEETITPWNFEEVVDKGASAQSFIERMTNFDKNLPNEKVLPKHSLLYEYFTVYNELTKVKYVTEGMRKPAFLSGEQKKAIVDLLFKTNRKVTVKQLKEDYFKKIECFDSVEISGVEDRFNASLGTYHDLLKIIKDKDFLDNEENEDILEDIVLTLTLFEDREMIEERLKTYAHLFDDKVMKQLKRRRYTGWGRLSRKLINGIRDKQSGKTILDFLKSDGFANRNFMQLIHDDSLTFKEDIQKAQVSGQGDSLHEHIANLAGSPAIKKGILQTVKVVDELVKVMGRHKPENIVIEMARENQTTQKGQKNSRERMKRIEEGIKELGSQILKEHPVENTQLQNEKLYLYYLQNGRDMYVDQELDINRLSDYDVDHIVPQSFLKDDSIDNKVLTRSDKARGKSDNVPSEEVVKKMKNYWRQLLNAKLITQRKFDNLTKAERGGLSELDKAGFIKRQLVETRQITKHVAQILDSRMNTKYDENDKLIREVKVITLKSKLVSDFRKDFQFYKVREINNYHHAHDAYLNAVVGTALIKKYPKLESEFVYGDYKVYDVRKMIAKSEQEIGKATAKYFFYSNIMNFFKTEITLANGEIRKRPLIETNGETGEIVWDKGRDFATVRKVLSMPQVNIVKKTEVQTGGFSKESILPKRNSDKLIARKKDWDPKKYGGFDSPTVAYSVLVVAKVEKGKSKKLKSVKELLGITIMERSSFEKNPIDFLEAKGYKEVKKDLIIKLPKYSLFELENGRKRMLASAGELQKGNELALPSKYVNFLYLASHYEKLKGSPEDNEQKQLFVEQHKHYLDEIIEQISEFSKRVILADANLDKVLSAYNKHRDKPIREQAENIIHLFTLTNLGAPAAFKYFDTTIDRKRYTSTKEVLDATLIHQSITGLYETRIDLSQLGGDGGEAAAKEAAAKEAAAKEAAAKEAAAKGGTLNLEDEYRLYETSAEPEVSPGSTWLSDFPQAWAETGGMGLAVRQAPLIIPLKATSTPVSIKQYPMSQEAKLGIKPHIQRLLDQGILVPCQSPWNTPLLPVKKPGTNDYRPVQDLREVNKRVEDIHPTVPNPYNLLSGLPPSHRWYTVLDLKDAFFCLRLHPTSQPLFAFEWRDPGMGISGQLTWTRLPQGFKNSPTLFNEALHRDLADFRIQHPDLILLQYVDDILLAATSELDCQQGTRALLLTLGNLGYRASAKKAQLCQKQVKYLGYLLKEGQRWLTEARKETVMGQPTPKTPRQLREFLGKAGFCRLFIPGFAEMAAPLYPLTKPGTLFNWGPDQQKAYQEIKQALLTAPALGLPDLTKPFELFVDEKQGYAKGVLTQKLGPWRRPVAYLSKKLDPVAAGWPPCLRMVAAIAVLRKDAGKLTMGQPLVILAPHAVEALVKQPPDRWLSNARMTHYQAMLLDTDRVQFGPVVALNPATLLPLPEEGAPHDCLEILAETHGTRPDLTDQPIPDADHTWYTDGSSFLQEGQRKAGAAVTTETEVIWARALPAGTSAQRAELIALTQALKMAEGKRLNVYTDSRYAFATAHIHGEIYRRRGWLTSEGREIKNKSEILALLKALFLPKRLSIIHCLGHQKGDSAEARGNRLADQAAREAAIKTPPDTSTLLAGKRTADGSEFEKRTADGSEFESPKKKAKVE

SEQ ID NO: 1863 - protein, 2098 aa, synthetic construct
MPAAKRVKLDGGDKKYSIGLDIGTNSVGWAVITDEYKVPSKKFKVLGNTDRHSIKKNLIGALLFDSGETAEATRLKRTARRRYTRRKNRICYLQEIFSNEMAKVDDSFFHRLEESFLVEEDKKHERHPIFGNIVDEVAYHEKYPTIYHLRKKLVDSTDKADLRLIYLALAHMIKFRGHFLIEGDLNPDNSDVDKLFIQLVQTYNQLFEENPINASGVDAKAILSARLSKSRRLENLIAQLPGEKKNGLFGNLIALSLGLTPNFKSNFDLAEDAKLQLSKDTYDDDLDNLLAQIGDQYADLFLAAKNLSDAILLSDILRVNTEITKAPLSASMIKRYDEHHQDLTLLKALVRQQLPEKYKEIFFDQSKNGYAGYIDGGASQEEFYKFIKPILEKMDGTEELLVKLNREDLLRKQRTFDNGSIPHQIHLGELHAILRRQEDFYPFLKDNREKIEKILTFRIPYYVGPLARGNSRFAWMTRKSEETITPWNFEEVVDKGASAQSFIERMTNFDKNLPNEKVLPKHSLLYEYFTVYNELTKVKYVTEGMRKPAFLSGEQKKAIVDLLFKTNRKVTVKQLKEDYFKKIECFDSVEISGVEDRFNASLGTYHDLLKIIKDKDFLDNEENEDILEDIVLTLTLFEDREMIEERLKTYAHLFDDKVMKQLKRRRYTGWGRLSRKLINGIRDKQSGKTILDFLKSDGFANRNFMQLIHDDSLTFKEDIQKAQVSGQGDSLHEHIANLAGSPAIKKGILQTVKVVDELVKVMGRHKPENIVIEMARENQTTQKGQKNSRERMKRIEEGIKELGSQILKEHPVENTQLQNEKLYLYYLQNGRDMYVDQELDINRLSDYDVDHIVPQSFLKDDSIDNKVLTRSDKARGKSDNVPSEEVVKKMKNYWRQLLNAKLITQRKFDNLTKAERGGLSELDKAGFIKRQLVETRQITKHVAQILDSRMNTKYDENDKLIREVKVITLKSKLVSDFRKDFQFYKVREINNYHHAHDAYLNAVVGTALIKKYPKLESEFVYGDYKVYDVRKMIAKSEQEIGKATAKYFFYSNIMNFFKTEITLANGEIRKRPLIETNGETGEIVWDKGRDFATVRKVLSMPQVNIVKKTEVQTGGFSKESILPKRNSDKLIARKKDWDPKKYGGFDSPTVAYSVLVVAKVEKGKSKKLKSVKELLGITIMERSSFEKNPIDFLEAKGYKEVKKDLIIKLPKYSLFELENGRKRMLASAGELQKGNELALPSKYVNFLYLASHYEKLKGSPEDNEQKQLFVEQHKHYLDEIIEQISEFSKRVILADANLDKVLSAYNKHRDKPIREQAENIIHLFTLTNLGAPAAFKYFDTTIDRKRYTSTKEVLDATLIHQSITGLYETRIDLSQLGGDGGPAPAPAPAPAPAPGGTLNLEDEYRLYETSAEPEVSPGSTWLSDFPQAWAETGGMGLAVRQAPLIIPLKATSTPVSIKQYPMSQEAKLGIKPHIQRLLDQGILVPCQSPWNTPLLPVKKPGTNDYRPVQDLREVNKRVEDIHPTVPNPYNLLSGLPPSHRWYTVLDLKDAFFCLRLHPTSQPLFAFEWRDPGMGISGQLTWTRLPQGFKNSPTLFNEALHRDLADFRIQHPDLILLQYVDDILLAATSELDCQQGTRALLLTLGNLGYRASAKKAQLCQKQVKYLGYLLKEGQRWLTEARKETVMGQPTPKTPRQLREFLGKAGFCRLFIPGFAEMAAPLYPLTKPGTLFNWGPDQQKAYQEIKQALLTAPALGLPDLTKPFELFVDEKQGYAKGVLTQKLGPWRRPVAYLSKKLDPVAAGWPPCLRMVAAIAVLRKDAGKLTMGQPLVILAPHAVEALVKQPPDRWLSNARMTHYQAMLLDTDRVQFGPVVALNPATLLPLPEEGAPHDCLEILAETHGTRPDLTDQPIPDADHTWYTDGSSFLQEGQRKAGAAVTTETEVIWARALPAGTSAQRAELIALTQALKMAEGKRLNVYTDSRYAFATAHIHGEIYRRRGWLTSEGREIKNKSEILALLKALFLPKRLSIIHCLGHQKGDSAEARGNRLADQAAREAAIKTPPDTSTLLAGKRTADGSEFEKRTADGSEFESPKKKAKVE

SEQ ID NO: 1864 - protein, 2096 aa, synthetic construct
MPAAKRVKLDGGDKKYSIGLDIGTNSVGWAVITDEYKVPSKKFKVLGNTDRHSIKKNLIGALLFDSGETAEATRLKRTARRRYTRRKNRICYLQEIFSNEMAKVDDSFFHRLEESFLVEEDKKHERHPIFGNIVDEVAYHEKYPTIYHLRKKLVDSTDKADLRLIYLALAHMIKFRGHFLIEGDLNPDNSDVDKLFIQLVQTYNQLFEENPINASGVDAKAILSARLSKSRRLENLIAQLPGEKKNGLFGNLIALSLGLTPNFKSNFDLAEDAKLQLSKDTYDDDLDNLLAQIGDQYADLFLAAKNLSDAILLSDILRVNTEITKAPLSASMIKRYDEHHQDLTLLKALVRQQLPEKYKEIFFDQSKNGYAGYIDGGASQEEFYKFIKPILEKMDGTEELLVKLNREDLLRKQRTFDNGSIPHQIHLGELHAILRRQEDFYPFLKDNREKIEKILTFRIPYYVGPLARGNSRFAWMTRKSEETITPWNFEEVVDKGASAQSFIERMTNFDKNLPNEKVLPKHSLLYEYFTVYNELTKVKYVTEGMRKPAFLSGEQKKAIVDLLFKTNRKVTVKQLKEDYFKKIECFDSVEISGVEDRFNASLGTYHDLLKIIKDKDFLDNEENEDILEDIVLTLTLFEDREMIEERLKTYAHLFDDKVMKQLKRRRYTGWGRLSRKLINGIRDKQSGKTILDFLKSDGFANRNFMQLIHDDSLTFKEDIQKAQVSGQGDSLHEHIANLAGSPAIKKGILQTVKVVDELVKVMGRHKPENIVIEMARENQTTQKGQKNSRERMKRIEEGIKELGSQILKEHPVENTQLQNEKLYLYYLQNGRDMYVDQELDINRLSDYDVDHIVPQSFLKDDSIDNKVLTRSDKARGKSDNVPSEEVVKKMKNYWRQLLNAKLITQRKFDNLTKAERGGLSELDKAGFIKRQLVETRQITKHVAQILDSRMNTKYDENDKLIREVKVITLKSKLVSDFRKDFQFYKVREINNYHHAHDAYLNAVVGTALIKKYPKLESEFVYGDYKVYDVRKMIAKSEQEIGKATAKYFFYSNIMNFFKTEITLANGEIRKRPLIETNGETGEIVWDKGRDFATVRKVLSMPQVNIVKKTEVQTGGFSKESILPKRNSDKLIARKKDWDPKKYGGFDSPTVAYSVLVVAKVEKGKSKKLKSVKELLGITIMERSSFEKNPIDFLEAKGYKEVKKDLIIKLPKYSLFELENGRKRMLASAGELQKGNELALPSKYVNFLYLASHYEKLKGSPEDNEQKQLFVEQHKHYLDEIIEQISEFSKRVILADANLDKVLSAYNKHRDKPIREQAENIIHLFTLTNLGAPAAFKYFDTTIDRKRYTSTKEVLDATLIHQSITGLYETRIDLSQLGGDGGPAPEAAAKGGGGGTLNLEDEYRLYETSAEPEVSPGSTWLSDFPQAWAETGGMGLAVRQAPLIIPLKATSTPVSIKQYPMSQEAKLGIKPHIQRLLDQGILVPCQSPWNTPLLPVKKPGTNDYRPVQDLREVNKRVEDIHPTVPNPYNLLSGLPPSHRWYTVLDLKDAFFCLRLHPTSQPLFAFEWRDPGMGISGQLTWTRLPQGFKNSPTLFNEALHRDLADFRIQHPDLILLQYVDDILLAATSELDCQQGTRALLLTLGNLGYRASAKKAQLCQKQVKYLGYLLKEGQRWLTEARKETVMGQPTPKTPRQLREFLGKAGFCRLFIPGFAEMAAPLYPLTKPGTLFNWGPDQQKAYQEIKQALLTAPALGLPDLTKPFELFVDEKQGYAKGVLTQKLGPWRRPVAYLSKKLDPVAAGWPPCLRMVAAIAVLRKDAGKLTMGQPLVILAPHAVEALVKQPPDRWLSNARMTHYQAMLLDTDRVQFGPVVALNPATLLPLPEEGAPHDCLEILAETHGTRPDLTDQPIPDADHTWYTDGSSFLQEGQRKAGAAVTTETEVIWARALPAGTSAQRAELIALTQALKMAEGKRLNVYTDSRYAFATAHIHGEIYRRRGWLTSEGREIKNKSEILALLKALFLPKRLSIIHCLGHQKGDSAEARGNRLADQAAREAAIKTPPDTSTLLAGKRTADGSEFEKRTADGSEFESPKKKAKVE

SEQ ID NO: 1865 - protein, 2105 aa, synthetic construct
MPAAKRVKLDGGDKKYSIGLDIGTNSVGWAVITDEYKVPSKKFKVLGNTDRHSIKKNLIGALLFDSGETAEATRLKRTARRRYTRRKNRICYLQEIFSNEMAKVDDSFFHRLEESFLVEEDKKHERHPIFGNIVDEVAYHEKYPTIYHLRKKLVDSTDKADLRLIYLALAHMIKFRGHFLIEGDLNPDNSDVDKLFIQLVQTYNQLFEENPINASGVDAKAILSARLSKSRRLENLIAQLPGEKKNGLFGNLIALSLGLTPNFKSNFDLAEDAKLQLSKDTYDDDLDNLLAQIGDQYADLFLAAKNLSDAILLSDILRVNTEITKAPLSASMIKRYDEHHQDLTLLKALVRQQLPEKYKEIFFDQSKNGYAGYIDGGASQEEFYKFIKPILEKMDGTEELLVKLNREDLLRKQRTFDNGSIPHQIHLGELHAILRRQEDFYPFLKDNREKIEKILTFRIPYYVGPLARGNSRFAWMTRKSEETITPWNFEEVVDKGASAQSFIERMTNFDKNLPNEKVLPKHSLLYEYFTVYNELTKVKYVTEGMRKPAFLSGEQKKAIVDLLFKTNRKVTVKQLKEDYFKKIECFDSVEISGVEDRFNASLGTYHDLLKIIKDKDFLDNEENEDILEDIVLTLTLFEDREMIEERLKTYAHLFDDKVMKQLKRRRYTGWGRLSRKLINGIRDKQSGKTILDFLKSDGFANRNFMQLIHDDSLTFKEDIQKAQVSGQGDSLHEHIANLAGSPAIKKGILQTVKVVDELVKVMGRHKPENIVIEMARENQTTQKGQKNSRERMKRIEEGIKELGSQILKEHPVENTQLQNEKLYLYYLQNGRDMYVDQELDINRLSDYDVDHIVPQSFLKDDSIDNKVLTRSDKARGKSDNVPSEEVVKKMKNYWRQLLNAKLITQRKFDNLTKAERGGLSELDKAGFIKRQLVETRQITKHVAQILDSRMNTKYDENDKLIREVKVITLKSKLVSDFRKDFQFYKVREINNYHHAHDAYLNAVVGTALIKKYPKLESEFVYGDYKVYDVRKMIAKSEQEIGKATAKYFFYSNIMNFFKTEITLANGEIRKRPLIETNGETGEIVWDKGRDFATVRKVLSMPQVNIVKKTEVQTGGFSKESILPKRNSDKLIARKKDWDPKKYGGFDSPTVAYSVLVVAKVEKGKSKKLKSVKELLGITIMERSSFEKNPIDFLEAKGYKEVKKDLIIKLPKYSLFELENGRKRMLASAGELQKGNELALPSKYVNFLYLASHYEKLKGSPEDNEQKQLFVEQHKHYLDEIIEQISEFSKRVILADANLDKVLSAYNKHRDKPIREQAENIIHLFTLTNLGAPAAFKYFDTTIDRKRYTSTKEVLDATLIHQSITGLYETRIDLSQLGGDGGEAAAKEAAAKEAAAKEAAAKGGTLNLEDEYRLYETSAEPEVSPGSTWLSDFPQAWAETGGMGLAVRQAPLIIPLKATSTPVSIKQYPMSQEAKLGIKPHIQRLLDQGILVPCQSPWNTPLLPVKKPGTNDYRPVQDLREVNKRVEDIHPTVPNPYNLLSGLPPSHRWYTVLDLKDAFFCLRLHPTSQPLFAFEWRDPGMGISGQLTWTRLPQGFKNSPTLFNEALHRDLADFRIQHPDLILLQYVDDILLAATSELDCQQGTRALLLTLGNLGYRASAKKAQLCQKQVKYLGYLLKEGQRWLTEARKETVMGQPTPKTPRQLREFLGKAGFCRLFIPGFAEMAAPLYPLTKPGTLFNWGPDQQKAYQEIKQALLTAPALGLPDLTKPFELFVDEKQGYAKGVLTQKLGPWRRPVAYLSKKLDPVAAGWPPCLRMVAAIAVLRKDAGKLTMGQPLVILAPHAVEALVKQPPDRWLSNARMTHYQAMLLDTDRVQFGPVVALNPATLLPLPEEGAPHDCLEILAETHGTRPDLTDQPIPDADHTWYTDGSSFLQEGQRKAGAAVTTETEVIWARALPAGTSAQRAELIALTQALKMAEGKRLNVYTDSRYAFATAHIHGEIYRRRGWLTSEGREIKNKSEILALLKALFLPKRLSIIHCLGHQKGDSAEARGNRLADQAAREAAIKTPPDTSTLLAGKRTADGSEFEKRTADGSEFESPKKKAKVE

SEQ ID NO: 1866 - protein, 2096 aa, synthetic construct
MPAAKRVKLDGGDKKYSIGLDIGTNSVGWAVITDEYKVPSKKFKVLGNTDRHSIKKNLIGALLFDSGETAEATRLKRTARRRYTRRKNRICYLQEIFSNEMAKVDDSFFHRLEESFLVEEDKKHERHPIFGNIVDEVAYHEKYPTIYHLRKKLVDSTDKADLRLIYLALAHMIKFRGHFLIEGDLNPDNSDVDKLFIQLVQTYNQLFEENPINASGVDAKAILSARLSKSRRLENLIAQLPGEKKNGLFGNLIALSLGLTPNFKSNFDLAEDAKLQLSKDTYDDDLDNLLAQIGDQYADLFLAAKNLSDAILLSDILRVNTEITKAPLSASMIKRYDEHHQDLTLLKALVRQQLPEKYKEIFFDQSKNGYAGYIDGGASQEEFYKFIKPILEKMDGTEELLVKLNREDLLRKQRTFDNGSIPHQIHLGELHAILRRQEDFYPFLKDNREKIEKILTFRIPYYVGPLARGNSRFAWMTRKSEETITPWNFEEVVDKGASAQSFIERMTNFDKNLPNEKVLPKHSLLYEYFTVYNELTKVKYVTEGMRKPAFLSGEQKKAIVDLLFKTNRKVTVKQLKEDYFKKIECFDSVEISGVEDRFNASLGTYHDLLKIIKDKDFLDNEENEDILEDIVLTLTLFEDREMIEERLKTYAHLFDDKVMKQLKRRRYTGWGRLSRKLINGIRDKQSGKTILDFLKSDGFANRNFMQLIHDDSLTFKEDIQKAQVSGQGDSLHEHIANLAGSPAIKKGILQTVKVVDELVKVMGRHKPENIVIEMARENQTTQKGQKNSRERMKRIEEGIKELGSQILKEHPVENTQLQNEKLYLYYLQNGRDMYVDQELDINRLSDYDVDHIVPQSFLKDDSIDNKVLTRSDKARGKSDNVPSEEVVKKMKNYWRQLLNAKLITQRKFDNLTKAERGGLSELDKAGFIKRQLVETRQITKHVAQILDSRMNTKYDENDKLIREVKVITLKSKLVSDFRKDFQFYKVREINNYHHAHDAYLNAVVGTALIKKYPKLESEFVYGDYKVYDVRKMIAKSEQEIGKATAKYFFYSNIMNFFKTEITLANGEIRKRPLIETNGETGEIVWDKGRDFATVRKVLSMPQVNIVKKTEVQTGGFSKESILPKRNSDKLIARKKDWDPKKYGGFDSPTVAYSVLVVAKVEKGKSKKLKSVKELLGITIMERSSFEKNPIDFLEAKGYKEVKKDLIIKLPKYSLFELENGRKRMLASAGELQKGNELALPSKYVNFLYLASHYEKLKGSPEDNEQKQLFVEQHKHYLDEIIEQISEFSKRVILADANLDKVLSAYNKHRDKPIREQAENIIHLFTLTNLGAPAAFKYFDTTIDRKRYTSTKEVLDATLIHQSITGLYETRIDLSQLGGDGGPAPGGSEAAAKGGTLNLEDEYRLYETSAEPEVSPGSTWLSDFPQAWAETGGMGLAVRQAPLIIPLKATSTPVSIKQYPMSQEAKLGIKPHIQRLLDQGILVPCQSPWNTPLLPVKKPGTNDYRPVQDLREVNKRVEDIHPTVPNPYNLLSGLPPSHRWYTVLDLKDAFFCLRLHPTSQPLFAFEWRDPGMGISGQLTWTRLPQGFKNSPTLFNEALHRDLADFRIQHPDLILLQYVDDILLAATSELDCQQGTRALLLTLGNLGYRASAKKAQLCQKQVKYLGYLLKEGQRWLTEARKETVMGQPTPKTPRQLREFLGKAGFCRLFIPGFAEMAAPLYPLTKPGTLFNWGPDQQKAYQEIKQALLTAPALGLPDLTKPFELFVDEKQGYAKGVLTQKLGPWRRPVAYLSKKLDPVAAGWPPCLRMVAAIAVLRKDAGKLTMGQPLVILAPHAVEALVKQPPDRWLSNARMTHYQAMLLDTDRVQFGPVVALNPATLLPLPEEGAPHDCLEILAETHGTRPDLTDQPIPDADHTWYTDGSSFLQEGQRKAGAAVTTETEVIWARALPAGTSAQRAELIALTQALKMAEGKRLNVYTDSRYAFATAHIHGEIYRRRGWLTSEGREIKNKSEILALLKALFLPKRLSIIHCLGHQKGDSAEARGNRLADQAAREAAIKTPPDTSTLLAGKRTADGSEFEKRTADGSEFESPKKKAKVE

SEQ ID NO: 1867 - protein, 2096 aa, synthetic construct
MPAAKRVKLDGGDKKYSIGLDIGTNSVGWAVITDEYKVPSKKFKVLGNTDRHSIKKNLIGALLFDSGETAEATRLKRTARRRYTRRKNRICYLQEIFSNEMAKVDDSFFHRLEESFLVEEDKKHERHPIFGNIVDEVAYHEKYPTIYHLRKKLVDSTDKADLRLIYLALAHMIKFRGHFLIEGDLNPDNSDVDKLFIQLVQTYNQLFEENPINASGVDAKAILSARLSKSRRLENLIAQLPGEKKNGLFGNLIALSLGLTPNFKSNFDLAEDAKLQLSKDTYDDDLDNLLAQIGDQYADLFLAAKNLSDAILLSDILRVNTEITKAPLSASMIKRYDEHHQDLTLLKALVRQQLPEKYKEIFFDQSKNGYAGYIDGGASQEEFYKFIKPILEKMDGTEELLVKLNREDLLRKQRTFDNGSIPHQIHLGELHAILRRQEDFYPFLKDNREKIEKILTFRIPYYVGPLARGNSRFAWMTRKSEETITPWNFEEVVDKGASAQSFIERMTNFDKNLPNEKVLPKHSLLYEYFTVYNELTKVKYVTEGMRKPAFLSGEQKKAIVDLLFKTNRKVTVKQLKEDYFKKIECFDSVEISGVEDRFNASLGTYHDLLKIIKDKDFLDNEENEDILEDIVLTLTLFEDREMIEERLKTYAHLFDDKVMKQLKRRRYTGWGRLSRKLINGIRDKQSGKTILDFLKSDGFANRNFMQLIHDDSLTFKEDIQKAQVSGQGDSLHEHIANLAGSPAIKKGILQTVKVVDELVKVMGRHKPENIVIEMARENQTTQKGQKNSRERMKRIEEGIKELGSQILKEHPVENTQLQNEKLYLYYLQNGRDMYVDQELDINRLSDYDVDHIVPQSFLKDDSIDNKVLTRSDKARGKSDNVPSEEVVKKMKNYWRQLLNAKLITQRKFDNLTKAERGGLSELDKAGFIKRQLVETRQITKHVAQILDSRMNTKYDENDKLIREVKVITLKSKLVSDFRKDFQFYKVREINNYHHAHDAYLNAVVGTALIKKYPKLESEFVYGDYKVYDVRKMIAKSEQEIGKATAKYFFYSNIMNFFKTEITLANGEIRKRPLIETNGETGEIVWDKGRDFATVRKVLSMPQVNIVKKTEVQTGGFSKESILPKRNSDKLIARKKDWDPKKYGGFDSPTVAYSVLVVAKVEKGKSKKLKSVKELLGITIMERSSFEKNPIDFLEAKGYKEVKKDLIIKLPKYSLFELENGRKRMLASAGELQKGNELALPSKYVNFLYLASHYEKLKGSPEDNEQKQLFVEQHKHYLDEIIEQISEFSKRVILADANLDKVLSAYNKHRDKPIREQAENIIHLFTLTNLGAPAAFKYFDTTIDRKRYTSTKEVLDATLIHQSITGLYETRIDLSQLGGDGGEAAAKGGGPAPGGTLNLEDEYRLYETSAEPEVSPGSTWLSDFPQAWAETGGMGLAVRQAPLIIPLKATSTPVSIKQYPMSQEAKLGIKPHIQRLLDQGILVPCQSPWNTPLLPVKKPGTNDYRPVQDLREVNKRVEDIHPTVPNPYNLLSGLPPSHRWYTVLDLKDAFFCLRLHPTSQPLFAFEWRDPGMGISGQLTWTRLPQGFKNSPTLFNEALHRDLADFRIQHPDLILLQYVDDILLAATSELDCQQGTRALLLTLGNLGYRASAKKAQLCQKQVKYLGYLLKEGQRWLTEARKETVMGQPTPKTPRQLREFLGKAGFCRLFIPGFAEMAAPLYPLTKPGTLFNWGPDQQKAYQEIKQALLTAPALGLPDLTKPFELFVDEKQGYAKGVLTQKLGPWRRPVAYLSKKLDPVAAGWPPCLRMVAAIAVLRKDAGKLTMGQPLVILAPHAVEALVKQPPDRWLSNARMTHYQAMLLDTDRVQFGPVVALNPATLLPLPEEGAPHDCLEILAETHGTRPDLTDQPIPDADHTWYTDGSSFLQEGQRKAGAAVTTETEVIWARALPAGTSAQRAELIALTQALKMAEGKRLNVYTDSRYAFATAHIHGEIYRRRGWLTSEGREIKNKSEILALLKALFLPKRLSIIHCLGHQKGDSAEARGNRLADQAAREAAIKTPPDTSTLLAGKRTADGSEFEKRTADGSEFESPKKKAKVE

SEQ ID NO: 1868 - protein, 2090 aa, synthetic construct
MPAAKRVKLDGGDKKYSIGLDIGTNSVGWAVITDEYKVPSKKFKVLGNTDRHSIKKNLIGALLFDSGETAEATRLKRTARRRYTRRKNRICYLQEIFSNEMAKVDDSFFHRLEESFLVEEDKKHERHPIFGNIVDEVAYHEKYPTIYHLRKKLVDSTDKADLRLIYLALAHMIKFRGHFLIEGDLNPDNSDVDKLFIQLVQTYNQLFEENPINASGVDAKAILSARLSKSRRLENLIAQLPGEKKNGLFGNLIALSLGLTPNFKSNFDLAEDAKLQLSKDTYDDDLDNLLAQIGDQYADLFLAAKNLSDAILLSDILRVNTEITKAPLSASMIKRYDEHHQDLTLLKALVRQQLPEKYKEIFFDQSKNGYAGYIDGGASQEEFYKFIKPILEKMDGTEELLVKLNREDLLRKQRTFDNGSIPHQIHLGELHAILRRQEDFYPFLKDNREKIEKILTFRIPYYVGPLARGNSRFAWMTRKSEETITPWNFEEVVDKGASAQSFIERMTNFDKNLPNEKVLPKHSLLYEYFTVYNELTKVKYVTEGMRKPAFLSGEQKKAIVDLLFKTNRKVTVKQLKEDYFKKIECFDSVEISGVEDRFNASLGTYHDLLKIIKDKDFLDNEENEDILEDIVLTLTLFEDREMIEERLKTYAHLFDDKVMKQLKRRRYTGWGRLSRKLINGIRDKQSGKTILDFLKSDGFANRNFMQLIHDDSLTFKEDIQKAQVSGQGDSLHEHIANLAGSPAIKKGILQTVKVVDELVKVMGRHKPENIVIEMARENQTTQKGQKNSRERMKRIEEGIKELGSQILKEHPVENTQLQNEKLYLYYLQNGRDMYVDQELDINRLSDYDVDHIVPQSFLKDDSIDNKVLTRSDKARGKSDNVPSEEVVKKMKNYWRQLLNAKLITQRKFDNLTKAERGGLSELDKAGFIKRQLVETRQITKHVAQILDSRMNTKYDENDKLIREVKVITLKSKLVSDFRKDFQFYKVREINNYHHAHDAYLNAVVGTALIKKYPKLESEFVYGDYKVYDVRKMIAKSEQEIGKATAKYFFYSNIMNFFKTEITLANGEIRKRPLIETNGETGEIVWDKGRDFATVRKVLSMPQVNIVKKTEVQTGGFSKESILPKRNSDKLIARKKDWDPKKYGGFDSPTVAYSVLVVAKVEKGKSKKLKSVKELLGITIMERSSFEKNPIDFLEAKGYKEVKKDLIIKLPKYSLFELENGRKRMLASAGELQKGNELALPSKYVNFLYLASHYEKLKGSPEDNEQKQLFVEQHKHYLDEIIEQISEFSKRVILADANLDKVLSAYNKHRDKPIREQAENIIHLFTLTNLGAPAAFKYFDTTIDRKRYTSTKEVLDATLIHQSITGLYETRIDLSQLGGDGGEAAAKGGTLNLEDEYRLYETSAEPEVSPGSTWLSDFPQAWAETGGMGLAVRQAPLIIPLKATSTPVSIKQYPMSQEAKLGIKPHIQRLLDQGILVPCQSPWNTPLLPVKKPGTNDYRPVQDLREVNKRVEDIHPTVPNPYNLLSGLPPSHRWYTVLDLKDAFFCLRLHPTSQPLFAFEWRDPGMGISGQLTWTRLPQGFKNSPTLFNEALHRDLADFRIQHPDLILLQYVDDILLAATSELDCQQGTRALLLTLGNLGYRASAKKAQLCQKQVKYLGYLLKEGQRWLTEARKETVMGQPTPKTPRQLREFLGKAGFCRLFIPGFAEMAAPLYPLTKPGTLFNWGPDQQKAYQEIKQALLTAPALGLPDLTKPFELFVDEKQGYAKGVLTQKLGPWRRPVAYLSKKLDPVAAGWPPCLRMVAAIAVLRKDAGKLTMGQPLVILAPHAVEALVKQPPDRWLSNARMTHYQAMLLDTDRVQFGPVVALNPATLLPLPEEGAPHDCLEILAETHGTRPDLTDQPIPDADHTWYTDGSSFLQEGQRKAGAAVTTETEVIWARALPAGTSAQRAELIALTQALKMAEGKRLNVYTDSRYAFATAHIHGEIYRRRGWLTSEGREIKNKSEILALLKALFLPKRLSIIHCLGHQKGDSAEARGNRLADQAAREAAIKTPPDTSTLLAGKRTADGSEFEKRTADGSEFESPKKKAKVE

SEQ ID NO: 1869 - protein, 2096 aa, synthetic construct
MPAAKRVKLDGGDKKYSIGLDIGTNSVGWAVITDEYKVPSKKFKVLGNTDRHSIKKNLIGALLFDSGETAEATRLKRTARRRYTRRKNRICYLQEIFSNEMAKVDDSFFHRLEESFLVEEDKKHERHPIFGNIVDEVAYHEKYPTIYHLRKKLVDSTDKADLRLIYLALAHMIKFRGHFLIEGDLNPDNSDVDKLFIQLVQTYNQLFEENPINASGVDAKAILSARLSKSRRLENLIAQLPGEKKNGLFGNLIALSLGLTPNFKSNFDLAEDAKLQLSKDTYDDDLDNLLAQIGDQYADLFLAAKNLSDAILLSDILRVNTEITKAPLSASMIKRYDEHHQDLTLLKALVRQQLPEKYKEIFFDQSKNGYAGYIDGGASQEEFYKFIKPILEKMDGTEELLVKLNREDLLRKQRTFDNGSIPHQIHLGELHAILRRQEDFYPFLKDNREKIEKILTFRIPYYVGPLARGNSRFAWMTRKSEETITPWNFEEVVDKGASAQSFIERMTNFDKNLPNEKVLPKHSLLYEYFTVYNELTKVKYVTEGMRKPAFLSGEQKKAIVDLLFKTNRKVTVKQLKEDYFKKIECFDSVEISGVEDRFNASLGTYHDLLKIIKDKDFLDNEENEDILEDIVLTLTLFEDREMIEERLKTYAHLFDDKVMKQLKRRRYTGWGRLSRKLINGIRDKQSGKTILDFLKSDGFANRNFMQLIHDDSLTFKEDIQKAQVSGQGDSLHEHIANLAGSPAIKKGILQTVKVVDELVKVMGRHKPENIVIEMARENQTTQKGQKNSRERMKRIEEGIKELGSQILKEHPVENTQLQNEKLYLYYLQNGRDMYVDQELDINRLSDYDVDHIVPQSFLKDDSIDNKVLTRSDKARGKSDNVPSEEVVKKMKNYWRQLLNAKLITQRKFDNLTKAERGGLSELDKAGFIKRQLVETRQITKHVAQILDSRMNTKYDENDKLIREVKVITLKSKLVSDFRKDFQFYKVREINNYHHAHDAYLNAVVGTALIKKYPKLESEFVYGDYKVYDVRKMIAKSEQEIGKATAKYFFYSNIMNFFKTEITLANGEIRKRPLIETNGETGEIVWDKGRDFATVRKVLSMPQVNIVKKTEVQTGGFSKESILPKRNSDKLIARKKDWDPKKYGGFDSPTVAYSVLVVAKVEKGKSKKLKSVKELLGITIMERSSFEKNPIDFLEAKGYKEVKKDLIIKLPKYSLFELENGRKRMLASAGELQKGNELALPSKYVNFLYLASHYEKLKGSPEDNEQKQLFVEQHKHYLDEIIEQISEFSKRVILADANLDKVLSAYNKHRDKPIREQAENIIHLFTLTNLGAPAAFKYFDTTIDRKRYTSTKEVLDATLIHQSITGLYETRIDLSQLGGDGGEAAAKGGGGSSGGTLNLEDEYRLYETSAEPEVSPGSTWLSDFPQAWAETGGMGLAVRQAPLIIPLKATSTPVSIKQYPMSQEAKLGIKPHIQRLLDQGILVPCQSPWNTPLLPVKKPGTNDYRPVQDLREVNKRVEDIHPTVPNPYNLLSGLPPSHRWYTVLDLKDAFFCLRLHPTSQPLFAFEWRDPGMGISGQLTWTRLPQGFKNSPTLFNEALHRDLADFRIQHPDLILLQYVDDILLAATSELDCQQGTRALLLTLGNLGYRASAKKAQLCQKQVKYLGYLLKEGQRWLTEARKETVMGQPTPKTPRQLREFLGKAGFCRLFIPGFAEMAAPLYPLTKPGTLFNWGPDQQKAYQEIKQALLTAPALGLPDLTKPFELFVDEKQGYAKGVLTQKLGPWRRPVAYLSKKLDPVAAGWPPCLRMVAAIAVLRKDAGKLTMGQPLVILAPHAVEALVKQPPDRWLSNARMTHYQAMLLDTDRVQFGPVVALNPATLLPLPEEGAPHDCLEILAETHGTRPDLTDQPIPDADHTWYTDGSSFLQEGQRKAGAAVTTETEVIWARALPAGTSAQRAELIALTQALKMAEGKRLNVYTDSRYAFATAHIHGEIYRRRGWLTSEGREIKNKSEILALLKALFLPKRLSIIHCLGHQKGDSAEARGNRLADQAAREAAIKTPPDTSTLLAGKRTADGSEFEKRTADGSEFESPKKKAKVE

SEQ ID NO: 1870 - protein, 2097 aa, synthetic construct
MPAAKRVKLDGGDKKYSIGLDIGTNSVGWAVITDEYKVPSKKFKVLGNTDRHSIKKNLIGALLFDSGETAEATRLKRTARRRYTRRKNRICYLQEIFSNEMAKVDDSFFHRLEESFLVEEDKKHERHPIFGNIVDEVAYHEKYPTIYHLRKKLVDSTDKADLRLIYLALAHMIKFRGHFLIEGDLNPDNSDVDKLFIQLVQTYNQLFEENPINASGVDAKAILSARLSKSRRLENLIAQLPGEKKNGLFGNLIALSLGLTPNFKSNFDLAEDAKLQLSKDTYDDDLDNLLAQIGDQYADLFLAAKNLSDAILLSDILRVNTEITKAPLSASMIKRYDEHHQDLTLLKALVRQQLPEKYKEIFFDQSKNGYAGYIDGGASQEEFYKFIKPILEKMDGTEELLVKLNREDLLRKQRTFDNGSIPHQIHLGELHAILRRQEDFYPFLKDNREKIEKILTFRIPYYVGPLARGNSRFAWMTRKSEETITPWNFEEVVDKGASAQSFIERMTNFDKNLPNEKVLPKHSLLYEYFTVYNELTKVKYVTEGMRKPAFLSGEQKKAIVDLLFKTNRKVTVKQLKEDYFKKIECFDSVEISGVEDRFNASLGTYHDLLKIIKDKDFLDNEENEDILEDIVLTLTLFEDREMIEERLKTYAHLFDDKVMKQLKRRRYTGWGRLSRKLINGIRDKQSGKTILDFLKSDGFANRNFMQLIHDDSLTFKEDIQKAQVSGQGDSLHEHIANLAGSPAIKKGILQTVKVVDELVKVMGRHKPENIVIEMARENQTTQKGQKNSRERMKRIEEGIKELGSQILKEHPVENTQLQNEKLYLYYLQNGRDMYVDQELDINRLSDYDVDHIVPQSFLKDDSIDNKVLTRSDKARGKSDNVPSEEVVKKMKNYWRQLLNAKLITQRKFDNLTKAERGGLSELDKAGFIKRQLVETRQITKHVAQILDSRMNTKYDENDKLIREVKVITLKSKLVSDFRKDFQFYKVREINNYHHAHDAYLNAVVGTALIKKYPKLESEFVYGDYKVYDVRKMIAKSEQEIGKATAKYFFYSNIMNFFKTEITLANGEIRKRPLIETNGETGEIVWDKGRDFATVRKVLSMPQVNIVKKTEVQTGGFSKESILPKRNSDKLIARKKDWDPKKYGGFDSPTVAYSVLVVAKVEKGKSKKLKSVKELLGITIMERSSFEKNPIDFLEAKGYKEVKKDLIIKLPKYSLFELENGRKRMLASAGELQKGNELALPSKYVNFLYLASHYEKLKGSPEDNEQKQLFVEQHKHYLDEIIEQISEFSKRVILADANLDKVLSAYNKHRDKPIREQAENIIHLFTLTNLGAPAAFKYFDTTIDRKRYTSTKEVLDATLIHQSITGLYETRIDLSQLGGDGGGSAGSAAGSGEFGGTLNLEDEYRLYETSAEPEVSPGSTWLSDFPQAWAETGGMGLAVRQAPLIIPLKATSTPVSIKQYPMSQEAKLGIKPHIQRLLDQGILVPCQSPWNTPLLPVKKPGTNDYRPVQDLREVNKRVEDIHPTVPNPYNLLSGLPPSHRWYTVLDLKDAFFCLRLHPTSQPLFAFEWRDPGMGISGQLTWTRLPQGFKNSPTLFNEALHRDLADFRIQHPDLILLQYVDDILLAATSELDCQQGTRALLLTLGNLGYRASAKKAQLCQKQVKYLGYLLKEGQRWLTEARKETVMGQPTPKTPRQLREFLGKAGFCRLFIPGFAEMAAPLYPLTKPGTLFNWGPDQQKAYQEIKQALLTAPALGLPDLTKPFELFVDEKQGYAKGVLTQKLGPWRRPVAYLSKKLDPVAAGWPPCLRMVAAIAVLRKDAGKLTMGQPLVILAPHAVEALVKQPPDRWLSNARMTHYQAMLLDTDRVQFGPVVALNPATLLPLPEEGAPHDCLEILAETHGTRPDLTDQPIPDADHTWYTDGSSFLQEGQRKAGAAVTTETEVIWARALPAGTSAQRAELIALTQALKMAEGKRLNVYTDSRYAFATAHIHGEIYRRRGWLTSEGREIKNKSEILALLKALFLPKRLSIIHCLGHQKGDSAEARGNRLADQAAREAAIKTPPDTSTLLAGKRTADGSEFEKRTADGSEFESPKKKAKVE

SEQ ID NO: 1871 - protein, 2096 aa, synthetic construct
MPAAKRVKLDGGDKKYSIGLDIGTNSVGWAVITDEYKVPSKKFKVLGNTDRHSIKKNLIGALLFDSGETAEATRLKRTARRRYTRRKNRICYLQEIFSNEMAKVDDSFFHRLEESFLVEEDKKHERHPIFGNIVDEVAYHEKYPTIYHLRKKLVDSTDKADLRLIYLALAHMIKFRGHFLIEGDLNPDNSDVDKLFIQLVQTYNQLFEENPINASGVDAKAILSARLSKSRRLENLIAQLPGEKKNGLFGNLIALSLGLTPNFKSNFDLAEDAKLQLSKDTYDDDLDNLLAQIGDQYADLFLAAKNLSDAILLSDILRVNTEITKAPLSASMIKRYDEHHQDLTLLKALVRQQLPEKYKEIFFDQSKNGYAGYIDGGASQEEFYKFIKPILEKMDGTEELLVKLNREDLLRKQRTFDNGSIPHQIHLGELHAILRRQEDFYPFLKDNREKIEKILTFRIPYYVGPLARGNSRFAWMTRKSEETITPWNFEEVVDKGASAQSFIERMTNFDKNLPNEKVLPKHSLLYEYFTVYNELTKVKYVTEGMRKPAFLSGEQKKAIVDLLFKTNRKVTVKQLKEDYFKKIECFDSVEISGVEDRFNASLGTYHDLLKIIKDKDFLDNEENEDILEDIVLTLTLFEDREMIEERLKTYAHLFDDKVMKQLKRRRYTGWGRLSRKLINGIRDKQSGKTILDFLKSDGFANRNFMQLIHDDSLTFKEDIQKAQVSGQGDSLHEHIANLAGSPAIKKGILQTVKVVDELVKVMGRHKPENIVIEMARENQTTQKGQKNSRERMKRIEEGIKELGSQILKEHPVENTQLQNEKLYLYYLQNGRDMYVDQELDINRLSDYDVDHIVPQSFLKDDSIDNKVLTRSDKARGKSDNVPSEEVVKKMKNYWRQLLNAKLITQRKFDNLTKAERGGLSELDKAGFIKRQLVETRQITKHVAQILDSRMNTKYDENDKLIREVKVITLKSKLVSDFRKDFQFYKVREINNYHHAHDAYLNAVVGTALIKKYPKLESEFVYGDYKVYDVRKMIAKSEQEIGKATAKYFFYSNIMNFFKTEITLANGEIRKRPLIETNGETGEIVWDKGRDFATVRKVLSMPQVNIVKKTEVQTGGFSKESILPKRNSDKLIARKKDWDPKKYGGFDSPTVAYSVLVVAKVEKGKSKKLKSVKELLGITIMERSSFEKNPIDFLEAKGYKEVKKDLIIKLPKYSLFELENGRKRMLASAGELQKGNELALPSKYVNFLYLASHYEKLKGSPEDNEQKQLFVEQHKHYLDEIIEQISEFSKRVILADANLDKVLSAYNKHRDKPIREQAENIIHLFTLTNLGAPAAFKYFDTTIDRKRYTSTKEVLDATLIHQSITGLYETRIDLSQLGGDGGEAAAKPAPGGSGGTLNLEDEYRLYETSAEPEVSPGSTWLSDFPQAWAETGGMGLAVRQAPLIIPLKATSTPVSIKQYPMSQEAKLGIKPHIQRLLDQGILVPCQSPWNTPLLPVKKPGTNDYRPVQDLREVNKRVEDIHPTVPNPYNLLSGLPPSHRWYTVLDLKDAFFCLRLHPTSQPLFAFEWRDPGMGISGQLTWTRLPQGFKNSPTLFNEALHRDLADFRIQHPDLILLQYVDDILLAATSELDCQQGTRALLLTLGNLGYRASAKKAQLCQKQVKYLGYLLKEGQRWLTEARKETVMGQPTPKTPRQLREFLGKAGFCRLFIPGFAEMAAPLYPLTKPGTLFNWGPDQQKAYQEIKQALLTAPALGLPDLTKPFELFVDEKQGYAKGVLTQKLGPWRRPVAYLSKKLDPVAAGWPPCLRMVAAIAVLRKDAGKLTMGQPLVILAPHAVEALVKQPPDRWLSNARMTHYQAMLLDTDRVQFGPVVALNPATLLPLPEEGAPHDCLEILAETHGTRPDLTDQPIPDADHTWYTDGSSFLQEGQRKAGAAVTTETEVIWARALPAGTSAQRAELIALTQALKMAEGKRLNVYTDSRYAFATAHIHGEIYRRRGWLTSEGREIKNKSEILALLKALFLPKRLSIIHCLGHQKGDSAEARGNRLADQAAREAAIKTPPDTSTLLAGKRTADGSEFEKRTADGSEFESPKKKAKVE

SEQ ID NO: 1872 - protein, 2096 aa, synthetic construct
MPAAKRVKLDGGDKKYSIGLDIGTNSVGWAVITDEYKVPSKKFKVLGNTDRHSIKKNLIGALLFDSGETAEATRLKRTARRRYTRRKNRICYLQEIFSNEMAKVDDSFFHRLEESFLVEEDKKHERHPIFGNIVDEVAYHEKYPTIYHLRKKLVDSTDKADLRLIYLALAHMIKFRGHFLIEGDLNPDNSDVDKLFIQLVQTYNQLFEENPINASGVDAKAILSARLSKSRRLENLIAQLPGEKKNGLFGNLIALSLGLTPNFKSNFDLAEDAKLQLSKDTYDDDLDNLLAQIGDQYADLFLAAKNLSDAILLSDILRVNTEITKAPLSASMIKRYDEHHQDLTLLKALVRQQLPEKYKEIFFDQSKNGYAGYIDGGASQEEFYKFIKPILEKMDGTEELLVKLNREDLLRKQRTFDNGSIPHQIHLGELHAILRRQEDFYPFLKDNREKIEKILTFRIPYYVGPLARGNSRFAWMTRKSEETITPWNFEEVVDKGASAQSFIERMTNFDKNLPNEKVLPKHSLLYEYFTVYNELTKVKYVTEGMRKPAFLSGEQKKAIVDLLFKTNRKVTVKQLKEDYFKKIECFDSVEISGVEDRFNASLGTYHDLLKIIKDKDFLDNEENEDILEDIVLTLTLFEDREMIEERLKTYAHLFDDKVMKQLKRRRYTGWGRLSRKLINGIRDKQSGKTILDFLKSDGFANRNFMQLIHDDSLTFKEDIQKAQVSGQGDSLHEHIANLAGSPAIKKGILQTVKVVDELVKVMGRHKPENIVIEMARENQTTQKGQKNSRERMKRIEEGIKELGSQILKEHPVENTQLQNEKLYLYYLQNGRDMYVDQELDINRLSDYDVDHIVPQSFLKDDSIDNKVLTRSDKARGKSDNVPSEEVVKKMKNYWRQLLNAKLITQRKFDNLTKAERGGLSELDKAGFIKRQLVETRQITKHVAQILDSRMNTKYDENDKLIREVKVITLKSKLVSDFRKDFQFYKVREINNYHHAHDAYLNAVVGTALIKKYPKLESEFVYGDYKVYDVRKMIAKSEQEIGKATAKYFFYSNIMNFFKTEITLANGEIRKRPLIETNGETGEIVWDKGRDFATVRKVLSMPQVNIVKKTEVQTGGFSKESILPKRNSDKLIARKKDWDPKKYGGFDSPTVAYSVLVVAKVEKGKSKKLKSVKELLGITIMERSSFEKNPIDFLEAKGYKEVKKDLIIKLPKYSLFELENGRKRMLASAGELQKGNELALPSKYVNFLYLASHYEKLKGSPEDNEQKQLFVEQHKHYLDEIIEQISEFSKRVILADANLDKVLSAYNKHRDKPIREQAENIIHLFTLTNLGAPAAFKYFDTTIDRKRYTSTKEVLDATLIHQSITGLYETRIDLSQLGGDGGEAAAKGSSPAPGGTLNLEDEYRLYETSAEPEVSPGSTWLSDFPQAWAETGGMGLAVRQAPLIIPLKATSTPVSIKQYPMSQEAKLGIKPHIQRLLDQGILVPCQSPWNTPLLPVKKPGTNDYRPVQDLREVNKRVEDIHPTVPNPYNLLSGLPPSHRWYTVLDLKDAFFCLRLHPTSQPLFAFEWRDPGMGISGQLTWTRLPQGFKNSPTLFNEALHRDLADFRIQHPDLILLQYVDDILLAATSELDCQQGTRALLLTLGNLGYRASAKKAQLCQKQVKYLGYLLKEGQRWLTEARKETVMGQPTPKTPRQLREFLGKAGFCRLFIPGFAEMAAPLYPLTKPGTLFNWGPDQQKAYQEIKQALLTAPALGLPDLTKPFELFVDEKQGYAKGVLTQKLGPWRRPVAYLSKKLDPVAAGWPPCLRMVAAIAVLRKDAGKLTMGQPLVILAPHAVEALVKQPPDRWLSNARMTHYQAMLLDTDRVQFGPVVALNPATLLPLPEEGAPHDCLEILAETHGTRPDLTDQPIPDADHTWYTDGSSFLQEGQRKAGAAVTTETEVIWARALPAGTSAQRAELIALTQALKMAEGKRLNVYTDSRYAFATAHIHGEIYRRRGWLTSEGREIKNKSEILALLKALFLPKRLSIIHCLGHQKGDSAEARGNRLADQAAREAAIKTPPDTSTLLAGKRTADGSEFEKRTADGSEFESPKKKAKVE

SEQ ID NO: 1873 - protein, 2091 aa, synthetic construct
MPAAKRVKLDGGDKKYSIGLDIGTNSVGWAVITDEYKVPSKKFKVLGNTDRHSIKKNLIGALLFDSGETAEATRLKRTARRRYTRRKNRICYLQEIFSNEMAKVDDSFFHRLEESFLVEEDKKHERHPIFGNIVDEVAYHEKYPTIYHLRKKLVDSTDKADLRLIYLALAHMIKFRGHFLIEGDLNPDNSDVDKLFIQLVQTYNQLFEENPINASGVDAKAILSARLSKSRRLENLIAQLPGEKKNGLFGNLIALSLGLTPNFKSNFDLAEDAKLQLSKDTYDDDLDNLLAQIGDQYADLFLAAKNLSDAILLSDILRVNTEITKAPLSASMIKRYDEHHQDLTLLKALVRQQLPEKYKEIFFDQSKNGYAGYIDGGASQEEFYKFIKPILEKMDGTEELLVKLNREDLLRKQRTFDNGSIPHQIHLGELHAILRRQEDFYPFLKDNREKIEKILTFRIPYYVGPLARGNSRFAWMTRKSEETITPWNFEEVVDKGASAQSFIERMTNFDKNLPNEKVLPKHSLLYEYFTVYNELTKVKYVTEGMRKPAFLSGEQKKAIVDLLFKTNRKVTVKQLKEDYFKKIECFDSVEISGVEDRFNASLGTYHDLLKIIKDKDFLDNEENEDILEDIVLTLTLFEDREMIEERLKTYAHLFDDKVMKQLKRRRYTGWGRLSRKLINGIRDKQSGKTILDFLKSDGFANRNFMQLIHDDSLTFKEDIQKAQVSGQGDSLHEHIANLAGSPAIKKGILQTVKVVDELVKVMGRHKPENIVIEMARENQTTQKGQKNSRERMKRIEEGIKELGSQILKEHPVENTQLQNEKLYLYYLQNGRDMYVDQELDINRLSDYDVDHIVPQSFLKDDSIDNKVLTRSDKARGKSDNVPSEEVVKKMKNYWRQLLNAKLITQRKFDNLTKAERGGLSELDKAGFIKRQLVETRQITKHVAQILDSRMNTKYDENDKLIREVKVITLKSKLVSDFRKDFQFYKVREINNYHHAHDAYLNAVVGTALIKKYPKLESEFVYGDYKVYDVRKMIAKSEQEIGKATAKYFFYSNIMNFFKTEITLANGEIRKRPLIETNGETGEIVWDKGRDFATVRKVLSMPQVNIVKKTEVQTGGFSKESILPKRNSDKLIARKKDWDPKKYGGFDSPTVAYSVLVVAKVEKGKSKKLKSVKELLGITIMERSSFEKNPIDFLEAKGYKEVKKDLIIKLPKYSLFELENGRKRMLASAGELQKGNELALPSKYVNFLYLASHYEKLKGSPEDNEQKQLFVEQHKHYLDEIIEQISEFSKRVILADANLDKVLSAYNKHRDKPIREQAENIIHLFTLTNLGAPAAFKYFDTTIDRKRYTSTKEVLDATLIHQSITGLYETRIDLSQLGGDGGGGGGGGGGTLNLEDEYRLYETSAEPEVSPGSTWLSDFPQAWAETGGMGLAVRQAPLIIPLKATSTPVSIKQYPMSQEAKLGIKPHIQRLLDQGILVPCQSPWNTPLLPVKKPGTNDYRPVQDLREVNKRVEDIHPTVPNPYNLLSGLPPSHRWYTVLDLKDAFFCLRLHPTSQPLFAFEWRDPGMGISGQLTWTRLPQGFKNSPTLFNEALHRDLADFRIQHPDLILLQYVDDILLAATSELDCQQGTRALLLTLGNLGYRASAKKAQLCQKQVKYLGYLLKEGQRWLTEARKETVMGQPTPKTPRQLREFLGKAGFCRLFIPGFAEMAAPLYPLTKPGTLFNWGPDQQKAYQEIKQALLTAPALGLPDLTKPFELFVDEKQGYAKGVLTQKLGPWRRPVAYLSKKLDPVAAGWPPCLRMVAAIAVLRKDAGKLTMGQPLVILAPHAVEALVKQPPDRWLSNARMTHYQAMLLDTDRVQFGPVVALNPATLLPLPEEGAPHDCLEILAETHGTRPDLTDQPIPDADHTWYTDGSSFLQEGQRKAGAAVTTETEVIWARALPAGTSAQRAELIALTQALKMAEGKRLNVYTDSRYAFATAHIHGEIYRRRGWLTSEGREIKNKSEILALLKALFLPKRLSIIHCLGHQKGDSAEARGNRLADQAAREAAIKTPPDTSTLLAGKRTADGSEFEKRTADGSEFESPKKKAKVE

SEQ ID NO: 1874 - protein, 2094 aa, synthetic construct
MPAAKRVKLDGGDKKYSIGLDIGTNSVGWAVITDEYKVPSKKFKVLGNTDRHSIKKNLIGALLFDSGETAEATRLKRTARRRYTRRKNRICYLQEIFSNEMAKVDDSFFHRLEESFLVEEDKKHERHPIFGNIVDEVAYHEKYPTIYHLRKKLVDSTDKADLRLIYLALAHMIKFRGHFLIEGDLNPDNSDVDKLFIQLVQTYNQLFEENPINASGVDAKAILSARLSKSRRLENLIAQLPGEKKNGLFGNLIALSLGLTPNFKSNFDLAEDAKLQLSKDTYDDDLDNLLAQIGDQYADLFLAAKNLSDAILLSDILRVNTEITKAPLSASMIKRYDEHHQDLTLLKALVRQQLPEKYKEIFFDQSKNGYAGYIDGGASQEEFYKFIKPILEKMDGTEELLVKLNREDLLRKQRTFDNGSIPHQIHLGELHAILRRQEDFYPFLKDNREKIEKILTFRIPYYVGPLARGNSRFAWMTRKSEETITPWNFEEVVDKGASAQSFIERMTNFDKNLPNEKVLPKHSLLYEYFTVYNELTKVKYVTEGMRKPAFLSGEQKKAIVDLLFKTNRKVTVKQLKEDYFKKIECFDSVEISGVEDRFNASLGTYHDLLKIIKDKDFLDNEENEDILEDIVLTLTLFEDREMIEERLKTYAHLFDDKVMKQLKRRRYTGWGRLSRKLINGIRDKQSGKTILDFLKSDGFANRNFMQLIHDDSLTFKEDIQKAQVSGQGDSLHEHIANLAGSPAIKKGILQTVKVVDELVKVMGRHKPENIVIEMARENQTTQKGQKNSRERMKRIEEGIKELGSQILKEHPVENTQLQNEKLYLYYLQNGRDMYVDQELDINRLSDYDVDHIVPQSFLKDDSIDNKVLTRSDKARGKSDNVPSEEVVKKMKNYWRQLLNAKLITQRKFDNLTKAERGGLSELDKAGFIKRQLVETRQITKHVAQILDSRMNTKYDENDKLIREVKVITLKSKLVSDFRKDFQFYKVREINNYHHAHDAYLNAVVGTALIKKYPKLESEFVYGDYKVYDVRKMIAKSEQEIGKATAKYFFYSNIMNFFKTEITLANGEIRKRPLIETNGETGEIVWDKGRDFATVRKVLSMPQVNIVKKTEVQTGGFSKESILPKRNSDKLIARKKDWDPKKYGGFDSPTVAYSVLVVAKVEKGKSKKLKSVKELLGITIMERSSFEKNPIDFLEAKGYKEVKKDLIIKLPKYSLFELENGRKRMLASAGELQKGNELALPSKYVNFLYLASHYEKLKGSPEDNEQKQLFVEQHKHYLDEIIEQISEFSKRVILADANLDKVLSAYNKHRDKPIREQAENIIHLFTLTNLGAPAAFKYFDTTIDRKRYTSTKEVLDATLIHQSITGLYETRIDLSQLGGDGGGSSPAPGGGGGTLNLEDEYRLYETSAEPEVSPGSTWLSDFPQAWAETGGMGLAVRQAPLIIPLKATSTPVSIKQYPMSQEAKLGIKPHIQRLLDQGILVPCQSPWNTPLLPVKKPGTNDYRPVQDLREVNKRVEDIHPTVPNPYNLLSGLPPSHRWYTVLDLKDAFFCLRLHPTSQPLFAFEWRDPGMGISGQLTWTRLPQGFKNSPTLFNEALHRDLADFRIQHPDLILLQYVDDILLAATSELDCQQGTRALLLTLGNLGYRASAKKAQLCQKQVKYLGYLLKEGQRWLTEARKETVMGQPTPKTPRQLREFLGKAGFCRLFIPGFAEMAAPLYPLTKPGTLFNWGPDQQKAYQEIKQALLTAPALGLPDLTKPFELFVDEKQGYAKGVLTQKLGPWRRPVAYLSKKLDPVAAGWPPCLRMVAAIAVLRKDAGKLTMGQPLVILAPHAVEALVKQPPDRWLSNARMTHYQAMLLDTDRVQFGPVVALNPATLLPLPEEGAPHDCLEILAETHGTRPDLTDQPIPDADHTWYTDGSSFLQEGQRKAGAAVTTETEVIWARALPAGTSAQRAELIALTQALKMAEGKRLNVYTDSRYAFATAHIHGEIYRRRGWLTSEGREIKNKSEILALLKALFLPKRLSIIHCLGHQKGDSAEARGNRLADQAAREAAIKTPPDTSTLLAGKRTADGSEFEKRTADGSEFESPKKKAKVE

SEQ ID NO: 1875 - protein, 2096 aa, synthetic construct
MPAAKRVKLDGGDKKYSIGLDIGTNSVGWAVITDEYKVPSKKFKVLGNTDRHSIKKNLIGALLFDSGETAEATRLKRTARRRYTRRKNRICYLQEIFSNEMAKVDDSFFHRLEESFLVEEDKKHERHPIFGNIVDEVAYHEKYPTIYHLRKKLVDSTDKADLRLIYLALAHMIKFRGHFLIEGDLNPDNSDVDKLFIQLVQTYNQLFEENPINASGVDAKAILSARLSKSRRLENLIAQLPGEKKNGLFGNLIALSLGLTPNFKSNFDLAEDAKLQLSKDTYDDDLDNLLAQIGDQYADLFLAAKNLSDAILLSDILRVNTEITKAPLSASMIKRYDEHHQDLTLLKALVRQQLPEKYKEIFFDQSKNGYAGYIDGGASQEEFYKFIKPILEKMDGTEELLVKLNREDLLRKQRTFDNGSIPHQIHLGELHAILRRQEDFYPFLKDNREKIEKILTFRIPYYVGPLARGNSRFAWMTRKSEETITPWNFEEVVDKGASAQSFIERMTNFDKNLPNEKVLPKHSLLYEYFTVYNELTKVKYVTEGMRKPAFLSGEQKKAIVDLLFKTNRKVTVKQLKEDYFKKIECFDSVEISGVEDRFNASLGTYHDLLKIIKDKDFLDNEENEDILEDIVLTLTLFEDREMIEERLKTYAHLFDDKVMKQLKRRRYTGWGRLSRKLINGIRDKQSGKTILDFLKSDGFANRNFMQLIHDDSLTFKEDIQKAQVSGQGDSLHEHIANLAGSPAIKKGILQTVKVVDELVKVMGRHKPENIVIEMARENQTTQKGQKNSRERMKRIEEGIKELGSQILKEHPVENTQLQNEKLYLYYLQNGRDMYVDQELDINRLSDYDVDHIVPQSFLKDDSIDNKVLTRSDKARGKSDNVPSEEVVKKMKNYWRQLLNAKLITQRKFDNLTKAERGGLSELDKAGFIKRQLVETRQITKHVAQILDSRMNTKYDENDKLIREVKVITLKSKLVSDFRKDFQFYKVREINNYHHAHDAYLNAVVGTALIKKYPKLESEFVYGDYKVYDVRKMIAKSEQEIGKATAKYFFYSNIMNFFKTEITLANGEIRKRPLIETNGETGEIVWDKGRDFATVRKVLSMPQVNIVKKTEVQTGGFSKESILPKRNSDKLIARKKDWDPKKYGGFDSPTVAYSVLVVAKVEKGKSKKLKSVKELLGITIMERSSFEKNPIDFLEAKGYKEVKKDLIIKLPKYSLFELENGRKRMLASAGELQKGNELALPSKYVNFLYLASHYEKLKGSPEDNEQKQLFVEQHKHYLDEIIEQISEFSKRVILADANLDKVLSAYNKHRDKPIREQAENIIHLFTLTNLGAPAAFKYFDTTIDRKRYTSTKEVLDATLIHQSITGLYETRIDLSQLGGDGGGSSGGGEAAAKGGTLNLEDEYRLYETSAEPEVSPGSTWLSDFPQAWAETGGMGLAVRQAPLIIPLKATSTPVSIKQYPMSQEAKLGIKPHIQRLLDQGILVPCQSPWNTPLLPVKKPGTNDYRPVQDLREVNKRVEDIHPTVPNPYNLLSGLPPSHRWYTVLDLKDAFFCLRLHPTSQPLFAFEWRDPGMGISGQLTWTRLPQGFKNSPTLFNEALHRDLADFRIQHPDLILLQYVDDILLAATSELDCQQGTRALLLTLGNLGYRASAKKAQLCQKQVKYLGYLLKEGQRWLTEARKETVMGQPTPKTPRQLREFLGKAGFCRLFIPGFAEMAAPLYPLTKPGTLFNWGPDQQKAYQEIKQALLTAPALGLPDLTKPFELFVDEKQGYAKGVLTQKLGPWRRPVAYLSKKLDPVAAGWPPCLRMVAAIAVLRKDAGKLTMGQPLVILAPHAVEALVKQPPDRWLSNARMTHYQAMLLDTDRVQFGPVVALNPATLLPLPEEGAPHDCLEILAETHGTRPDLTDQPIPDADHTWYTDGSSFLQEGQRKAGAAVTTETEVIWARALPAGTSAQRAELIALTQALKMAEGKRLNVYTDSRYAFATAHIHGEIYRRRGWLTSEGREIKNKSEILALLKALFLPKRLSIIHCLGHQKGDSAEARGNRLADQAAREAAIKTPPDTSTLLAGKRTADGSEFEKRTADGSEFESPKKKAKVE

SEQ ID NO: 1876 - protein, 2105 aa, synthetic construct
MPAAKRVKLDGGDKKYSIGLDIGTNSVGWAVITDEYKVPSKKFKVLGNTDRHSIKKNLIGALLFDSGETAEATRLKRTARRRYTRRKNRICYLQEIFSNEMAKVDDSFFHRLEESFLVEEDKKHERHPIFGNIVDEVAYHEKYPTIYHLRKKLVDSTDKADLRLIYLALAHMIKFRGHFLIEGDLNPDNSDVDKLFIQLVQTYNQLFEENPINASGVDAKAILSARLSKSRRLENLIAQLPGEKKNGLFGNLIALSLGLTPNFKSNFDLAEDAKLQLSKDTYDDDLDNLLAQIGDQYADLFLAAKNLSDAILLSDILRVNTEITKAPLSASMIKRYDEHHQDLTLLKALVRQQLPEKYKEIFFDQSKNGYAGYIDGGASQEEFYKFIKPILEKMDGTEELLVKLNREDLLRKQRTFDNGSIPHQIHLGELHAILRRQEDFYPFLKDNREKIEKILTFRIPYYVGPLARGNSRFAWMTRKSEETITPWNFEEVVDKGASAQSFIERMTNFDKNLPNEKVLPKHSLLYEYFTVYNELTKVKYVTEGMRKPAFLSGEQKKAIVDLLFKTNRKVTVKQLKEDYFKKIECFDSVEISGVEDRFNASLGTYHDLLKIIKDKDFLDNEENEDILEDIVLTLTLFEDREMIEERLKTYAHLFDDKVMKQLKRRRYTGWGRLSRKLINGIRDKQSGKTILDFLKSDGFANRNFMQLIHDDSLTFKEDIQKAQVSGQGDSLHEHIANLAGSPAIKKGILQTVKVVDELVKVMGRHKPENIVIEMARENQTTQKGQKNSRERMKRIEEGIKELGSQILKEHPVENTQLQNEKLYLYYLQNGRDMYVDQELDINRLSDYDVDHIVPQSFLKDDSIDNKVLTRSDKARGKSDNVPSEEVVKKMKNYWRQLLNAKLITQRKFDNLTKAERGGLSELDKAGFIKRQLVETRQITKHVAQILDSRMNTKYDENDKLIREVKVITLKSKLVSDFRKDFQFYKVREINNYHHAHDAYLNAVVGTALIKKYPKLESEFVYGDYKVYDVRKMIAKSEQEIGKATAKYFFYSNIMNFFKTEITLANGEIRKRPLIETNGETGEIVWDKGRDFATVRKVLSMPQVNIVKKTEVQTGGFSKESILPKRNSDKLIARKKDWDPKKYGGFDSPTVAYSVLVVAKVEKGKSKKLKSVKELLGITIMERSSFEKNPIDFLEAKGYKEVKKDLIIKLPKYSLFELENGRKRMLASAGELQKGNELALPSKYVNFLYLASHYEKLKGSPEDNEQKQLFVEQHKHYLDEIIEQISEFSKRVILADANLDKVLSAYNKHRDKPIREQAENIIHLFTLTNLGAPAAFKYFDTTIDRKRYTSTKEVLDATLIHQSITGLYETRIDLSQLGGDGGGGGGSGGGGSGGGGSGGGGSGGTLNLEDEYRLYETSAEPEVSPGSTWLSDFPQAWAETGGMGLAVRQAPLIIPLKATSTPVSIKQYPMSQEAKLGIKPHIQRLLDQGILVPCQSPWNTPLLPVKKPGTNDYRPVQDLREVNKRVEDIHPTVPNPYNLLSGLPPSHRWYTVLDLKDAFFCLRLHPTSQPLFAFEWRDPGMGISGQLTWTRLPQGFKNSPTLFNEALHRDLADFRIQHPDLILLQYVDDILLAATSELDCQQGTRALLLTLGNLGYRASAKKAQLCQKQVKYLGYLLKEGQRWLTEARKETVMGQPTPKTPRQLREFLGKAGFCRLFIPGFAEMAAPLYPLTKPGTLFNWGPDQQKAYQEIKQALLTAPALGLPDLTKPFELFVDEKQGYAKGVLTQKLGPWRRPVAYLSKKLDPVAAGWPPCLRMVAAIAVLRKDAGKLTMGQPLVILAPHAVEALVKQPPDRWLSNARMTHYQAMLLDTDRVQFGPVVALNPATLLPLPEEGAPHDCLEILAETHGTRPDLTDQPIPDADHTWYTDGSSFLQEGQRKAGAAVTTETEVIWARALPAGTSAQRAELIALTQALKMAEGKRLNVYTDSRYAFATAHIHGEIYRRRGWLTSEGREIKNKSEILALLKALFLPKRLSIIHCLGHQKGDSAEARGNRLADQAAREAAIKTPPDTSTLLAGKRTADGSEFEKRTADGSEFESPKKKAKVE

SEQ ID NO: 1877 - protein, 2097 aa, synthetic construct
MPAAKRVKLDGGDKKYSIGLDIGTNSVGWAVITDEYKVPSKKFKVLGNTDRHSIKKNLIGALLFDSGETAEATRLKRTARRRYTRRKNRICYLQEIFSNEMAKVDDSFFHRLEESFLVEEDKKHERHPIFGNIVDEVAYHEKYPTIYHLRKKLVDSTDKADLRLIYLALAHMIKFRGHFLIEGDLNPDNSDVDKLFIQLVQTYNQLFEENPINASGVDAKAILSARLSKSRRLENLIAQLPGEKKNGLFGNLIALSLGLTPNFKSNFDLAEDAKLQLSKDTYDDDLDNLLAQIGDQYADLFLAAKNLSDAILLSDILRVNTEITKAPLSASMIKRYDEHHQDLTLLKALVRQQLPEKYKEIFFDQSKNGYAGYIDGGASQEEFYKFIKPILEKMDGTEELLVKLNREDLLRKQRTFDNGSIPHQIHLGELHAILRRQEDFYPFLKDNREKIEKILTFRIPYYVGPLARGNSRFAWMTRKSEETITPWNFEEVVDKGASAQSFIERMTNFDKNLPNEKVLPKHSLLYEYFTVYNELTKVKYVTEGMRKPAFLSGEQKKAIVDLLFKTNRKVTVKQLKEDYFKKIECFDSVEISGVEDRFNASLGTYHDLLKIIKDKDFLDNEENEDILEDIVLTLTLFEDREMIEERLKTYAHLFDDKVMKQLKRRRYTGWGRLSRKLINGIRDKQSGKTILDFLKSDGFANRNFMQLIHDDSLTFKEDIQKAQVSGQGDSLHEHIANLAGSPAIKKGILQTVKVVDELVKVMGRHKPENIVIEMARENQTTQKGQKNSRERMKRIEEGIKELGSQILKEHPVENTQLQNEKLYLYYLQNGRDMYVDQELDINRLSDYDVDHIVPQSFLKDDSIDNKVLTRSDKARGKSDNVPSEEVVKKMKNYWRQLLNAKLITQRKFDNLTKAERGGLSELDKAGFIKRQLVETRQITKHVAQILDSRMNTKYDENDKLIREVKVITLKSKLVSDFRKDFQFYKVREINNYHHAHDAYLNAVVGTALIKKYPKLESEFVYGDYKVYDVRKMIAKSEQEIGKATAKYFFYSNIMNFFKTEITLANGEIRKRPLIETNGETGEIVWDKGRDFATVRKVLSMPQVNIVKKTEVQTGGFSKESILPKRNSDKLIARKKDWDPKKYGGFDSPTVAYSVLVVAKVEKGKSKKLKSVKELLGITIMERSSFEKNPIDFLEAKGYKEVKKDLIIKLPKYSLFELENGRKRMLASAGELQKGNELALPSKYVNFLYLASHYEKLKGSPEDNEQKQLFVEQHKHYLDEIIEQISEFSKRVILADANLDKVLSAYNKHRDKPIREQAENIIHLFTLTNLGAPAAFKYFDTTIDRKRYTSTKEVLDATLIHQSITGLYETRIDLSQLGGDGGGSSGSSGSSGSSGGTLNLEDEYRLYETSAEPEVSPGSTWLSDFPQAWAETGGMGLAVRQAPLIIPLKATSTPVSIKQYPMSQEAKLGIKPHIQRLLDQGILVPCQSPWNTPLLPVKKPGTNDYRPVQDLREVNKRVEDIHPTVPNPYNLLSGLPPSHRWYTVLDLKDAFFCLRLHPTSQPLFAFEWRDPGMGISGQLTWTRLPQGFKNSPTLFNEALHRDLADFRIQHPDLILLQYVDDILLAATSELDCQQGTRALLLTLGNLGYRASAKKAQLCQKQVKYLGYLLKEGQRWLTEARKETVMGQPTPKTPRQLREFLGKAGFCRLFIPGFAEMAAPLYPLTKPGTLFNWGPDQQKAYQEIKQALLTAPALGLPDLTKPFELFVDEKQGYAKGVLTQKLGPWRRPVAYLSKKLDPVAAGWPPCLRMVAAIAVLRKDAGKLTMGQPLVILAPHAVEALVKQPPDRWLSNARMTHYQAMLLDTDRVQFGPVVALNPATLLPLPEEGAPHDCLEILAETHGTRPDLTDQPIPDADHTWYTDGSSFLQEGQRKAGAAVTTETEVIWARALPAGTSAQRAELIALTQALKMAEGKRLNVYTDSRYAFATAHIHGEIYRRRGWLTSEGREIKNKSEILALLKALFLPKRLSIIHCLGHQKGDSAEARGNRLADQAAREAAIKTPPDTSTLLAGKRTADGSEFEKRTADGSEFESPKKKAKVE

SEQ ID NO: 1878 - protein, 2096 aa, synthetic construct
MPAAKRVKLDGGDKKYSIGLDIGTNSVGWAVITDEYKVPSKKFKVLGNTDRHSIKKNLIGALLFDSGETAEATRLKRTARRRYTRRKNRICYLQEIFSNEMAKVDDSFFHRLEESFLVEEDKKHERHPIFGNIVDEVAYHEKYPTIYHLRKKLVDSTDKADLRLIYLALAHMIKFRGHFLIEGDLNPDNSDVDKLFIQLVQTYNQLFEENPINASGVDAKAILSARLSKSRRLENLIAQLPGEKKNGLFGNLIALSLGLTPNFKSNFDLAEDAKLQLSKDTYDDDLDNLLAQIGDQYADLFLAAKNLSDAILLSDILRVNTEITKAPLSASMIKRYDEHHQDLTLLKALVRQQLPEKYKEIFFDQSKNGYAGYIDGGASQEEFYKFIKPILEKMDGTEELLVKLNREDLLRKQRTFDNGSIPHQIHLGELHAILRRQEDFYPFLKDNREKIEKILTFRIPYYVGPLARGNSRFAWMTRKSEETITPWNFEEVVDKGASAQSFIERMTNFDKNLPNEKVLPKHSLLYEYFTVYNELTKVKYVTEGMRKPAFLSGEQKKAIVDLLFKTNRKVTVKQLKEDYFKKIECFDSVEISGVEDRFNASLGTYHDLLKIIKDKDFLDNEENEDILEDIVLTLTLFEDREMIEERLKTYAHLFDDKVMKQLKRRRYTGWGRLSRKLINGIRDKQSGKTILDFLKSDGFANRNFMQLIHDDSLTFKEDIQKAQVSGQGDSLHEHIANLAGSPAIKKGILQTVKVVDELVKVMGRHKPENIVIEMARENQTTQKGQKNSRERMKRIEEGIKELGSQILKEHPVENTQLQNEKLYLYYLQNGRDMYVDQELDINRLSDYDVDHIVPQSFLKDDSIDNKVLTRSDKARGKSDNVPSEEVVKKMKNYWRQLLNAKLITQRKFDNLTKAERGGLSELDKAGFIKRQLVETRQITKHVAQILDSRMNTKYDENDKLIREVKVITLKSKLVSDFRKDFQFYKVREINNYHHAHDAYLNAVVGTALIKKYPKLESEFVYGDYKVYDVRKMIAKSEQEIGKATAKYFFYSNIMNFFKTEITLANGEIRKRPLIETNGETGEIVWDKGRDFATVRKVLSMPQVNIVKKTEVQTGGFSKESILPKRNSDKLIARKKDWDPKKYGGFDSPTVAYSVLVVAKVEKGKSKKLKSVKELLGITIMERSSFEKNPIDFLEAKGYKEVKKDLIIKLPKYSLFELENGRKRMLASAGELQKGNELALPSKYVNFLYLASHYEKLKGSPEDNEQKQLFVEQHKHYLDEIIEQISEFSKRVILADANLDKVLSAYNKHRDKPIREQAENIIHLFTLTNLGAPAAFKYFDTTIDRKRYTSTKEVLDATLIHQSITGLYETRIDLSQLGGDGGGGGEAAAKGSSGGTLNLEDEYRLYETSAEPEVSPGSTWLSDFPQAWAETGGMGLAVRQAPLIIPLKATSTPVSIKQYPMSQEAKLGIKPHIQRLLDQGILVPCQSPWNTPLLPVKKPGTNDYRPVQDLREVNKRVEDIHPTVPNPYNLLSGLPPSHRWYTVLDLKDAFFCLRLHPTSQPLFAFEWRDPGMGISGQLTWTRLPQGFKNSPTLFNEALHRDLADFRIQHPDLILLQYVDDILLAATSELDCQQGTRALLLTLGNLGYRASAKKAQLCQKQVKYLGYLLKEGQRWLTEARKETVMGQPTPKTPRQLREFLGKAGFCRLFIPGFAEMAAPLYPLTKPGTLFNWGPDQQKAYQEIKQALLTAPALGLPDLTKPFELFVDEKQGYAKGVLTQKLGPWRRPVAYLSKKLDPVAAGWPPCLRMVAAIAVLRKDAGKLTMGQPLVILAPHAVEALVKQPPDRWLSNARMTHYQAMLLDTDRVQFGPVVALNPATLLPLPEEGAPHDCLEILAETHGTRPDLTDQPIPDADHTWYTDGSSFLQEGQRKAGAAVTTETEVIWARALPAGTSAQRAELIALTQALKMAEGKRLNVYTDSRYAFATAHIHGEIYRRRGWLTSEGREIKNKSEILALLKALFLPKRLSIIHCLGHQKGDSAEARGNRLADQAAREAAIKTPPDTSTLLAGKRTADGSEFEKRTADGSEFESPKKKAKVE

SEQ ID NO: 1879 - protein, 2100 aa, synthetic construct
MPAAKRVKLDGGDKKYSIGLDIGTNSVGWAVITDEYKVPSKKFKVLGNTDRHSIKKNLIGALLFDSGETAEATRLKRTARRRYTRRKNRICYLQEIFSNEMAKVDDSFFHRLEESFLVEEDKKHERHPIFGNIVDEVAYHEKYPTIYHLRKKLVDSTDKADLRLIYLALAHMIKFRGHFLIEGDLNPDNSDVDKLFIQLVQTYNQLFEENPINASGVDAKAILSARLSKSRRLENLIAQLPGEKKNGLFGNLIALSLGLTPNFKSNFDLAEDAKLQLSKDTYDDDLDNLLAQIGDQYADLFLAAKNLSDAILLSDILRVNTEITKAPLSASMIKRYDEHHQDLTLLKALVRQQLPEKYKEIFFDQSKNGYAGYIDGGASQEEFYKFIKPILEKMDGTEELLVKLNREDLLRKQRTFDNGSIPHQIHLGELHAILRRQEDFYPFLKDNREKIEKILTFRIPYYVGPLARGNSRFAWMTRKSEETITPWNFEEVVDKGASAQSFIERMTNFDKNLPNEKVLPKHSLLYEYFTVYNELTKVKYVTEGMRKPAFLSGEQKKAIVDLLFKTNRKVTVKQLKEDYFKKIECFDSVEISGVEDRFNASLGTYHDLLKIIKDKDFLDNEENEDILEDIVLTLTLFEDREMIEERLKTYAHLFDDKVMKQLKRRRYTGWGRLSRKLINGIRDKQSGKTILDFLKSDGFANRNFMQLIHDDSLTFKEDIQKAQVSGQGDSLHEHIANLAGSPAIKKGILQTVKVVDELVKVMGRHKPENIVIEMARENQTTQKGQKNSRERMKRIEEGIKELGSQILKEHPVENTQLQNEKLYLYYLQNGRDMYVDQELDINRLSDYDVDHIVPQSFLKDDSIDNKVLTRSDKARGKSDNVPSEEVVKKMKNYWRQLLNAKLITQRKFDNLTKAERGGLSELDKAGFIKRQLVETRQITKHVAQILDSRMNTKYDENDKLIREVKVITLKSKLVSDFRKDFQFYKVREINNYHHAHDAYLNAVVGTALIKKYPKLESEFVYGDYKVYDVRKMIAKSEQEIGKATAKYFFYSNIMNFFKTEITLANGEIRKRPLIETNGETGEIVWDKGRDFATVRKVLSMPQVNIVKKTEVQTGGFSKESILPKRNSDKLIARKKDWDPKKYGGFDSPTVAYSVLVVAKVEKGKSKKLKSVKELLGITIMERSSFEKNPIDFLEAKGYKEVKKDLIIKLPKYSLFELENGRKRMLASAGELQKGNELALPSKYVNFLYLASHYEKLKGSPEDNEQKQLFVEQHKHYLDEIIEQISEFSKRVILADANLDKVLSAYNKHRDKPIREQAENIIHLFTLTNLGAPAAFKYFDTTIDRKRYTSTKEVLDATLIHQSITGLYETRIDLSQLGGDGGEAAAKEAAAKEAAAKGGTLNLEDEYRLYETSAEPEVSPGSTWLSDFPQAWAETGGMGLAVRQAPLIIPLKATSTPVSIKQYPMSQEAKLGIKPHIQRLLDQGILVPCQSPWNTPLLPVKKPGTNDYRPVQDLREVNKRVEDIHPTVPNPYNLLSGLPPSHRWYTVLDLKDAFFCLRLHPTSQPLFAFEWRDPGMGISGQLTWTRLPQGFKNSPTLFNEALHRDLADFRIQHPDLILLQYVDDILLAATSELDCQQGTRALLLTLGNLGYRASAKKAQLCQKQVKYLGYLLKEGQRWLTEARKETVMGQPTPKTPRQLREFLGKAGFCRLFIPGFAEMAAPLYPLTKPGTLFNWGPDQQKAYQEIKQALLTAPALGLPDLTKPFELFVDEKQGYAKGVLTQKLGPWRRPVAYLSKKLDPVAAGWPPCLRMVAAIAVLRKDAGKLTMGQPLVILAPHAVEALVKQPPDRWLSNARMTHYQAMLLDTDRVQFGPVVALNPATLLPLPEEGAPHDCLEILAETHGTRPDLTDQPIPDADHTWYTDGSSFLQEGQRKAGAAVTTETEVIWARALPAGTSAQRAELIALTQALKMAEGKRLNVYTDSRYAFATAHIHGEIYRRRGWLTSEGREIKNKSEILALLKALFLPKRLSIIHCLGHQKGDSAEARGNRLADQAAREAAIKTPPDTSTLLAGKRTADGSEFEKRTADGSEFESPKKKAKVE

SEQ ID NO: 1880 - protein, 2103 aa, synthetic construct
MPAAKRVKLDGGDKKYSIGLDIGTNSVGWAVITDEYKVPSKKFKVLGNTDRHSIKKNLIGALLFDSGETAEATRLKRTARRRYTRRKNRICYLQEIFSNEMAKVDDSFFHRLEESFLVEEDKKHERHPIFGNIVDEVAYHEKYPTIYHLRKKLVDSTDKADLRLIYLALAHMIKFRGHFLIEGDLNPDNSDVDKLFIQLVQTYNQLFEENPINASGVDAKAILSARLSKSRRLENLIAQLPGEKKNGLFGNLIALSLGLTPNFKSNFDLAEDAKLQLSKDTYDDDLDNLLAQIGDQYADLFLAAKNLSDAILLSDILRVNTEITKAPLSASMIKRYDEHHQDLTLLKALVRQQLPEKYKEIFFDQSKNGYAGYIDGGASQEEFYKFIKPILEKMDGTEELLVKLNREDLLRKQRTFDNGSIPHQIHLGELHAILRRQEDFYPFLKDNREKIEKILTFRIPYYVGPLARGNSRFAWMTRKSEETITPWNFEEVVDKGASAQSFIERMTNFDKNLPNEKVLPKHSLLYEYFTVYNELTKVKYVTEGMRKPAFLSGEQKKAIVDLLFKTNRKVTVKQLKEDYFKKIECFDSVEISGVEDRFNASLGTYHDLLKIIKDKDFLDNEENEDILEDIVLTLTLFEDREMIEERLKTYAHLFDDKVMKQLKRRRYTGWGRLSRKLINGIRDKQSGKTILDFLKSDGFANRNFMQLIHDDSLTFKEDIQKAQVSGQGDSLHEHIANLAGSPAIKKGILQTVKVVDELVKVMGRHKPENIVIEMARENQTTQKGQKNSRERMKRIEEGIKELGSQILKEHPVENTQLQNEKLYLYYLQNGRDMYVDQELDINRLSDYDVDHIVPQSFLKDDSIDNKVLTRSDKARGKSDNVPSEEVVKKMKNYWRQLLNAKLITQRKFDNLTKAERGGLSELDKAGFIKRQLVETRQITKHVAQILDSRMNTKYDENDKLIREVKVITLKSKLVSDFRKDFQFYKVREINNYHHAHDAYLNAVVGTALIKKYPKLESEFVYGDYKVYDVRKMIAKSEQEIGKATAKYFFYSNIMNFFKTEITLANGEIRKRPLIETNGETGEIVWDKGRDFATVRKVLSMPQVNIVKKTEVQTGGFSKESILPKRNSDKLIARKKDWDPKKYGGFDSPTVAYSVLVVAKVEKGKSKKLKSVKELLGITIMERSSFEKNPIDFLEAKGYKEVKKDLIIKLPKYSLFELENGRKRMLASAGELQKGNELALPSKYVNFLYLASHYEKLKGSPEDNEQKQLFVEQHKHYLDEIIEQISEFSKRVILADANLDKVLSAYNKHRDKPIREQAENIIHLFTLTNLGAPAAFKYFDTTIDRKRYTSTKEVLDATLIHQSITGLYETRIDLSQLGGDGGGGSGGSGGSGGSGGSGGSGGTLNLEDEYRLYETSAEPEVSPGSTWLSDFPQAWAETGGMGLAVRQAPLIIPLKATSTPVSIKQYPMSQEAKLGIKPHIQRLLDQGILVPCQSPWNTPLLPVKKPGTNDYRPVQDLREVNKRVEDIHPTVPNPYNLLSGLPPSHRWYTVLDLKDAFFCLRLHPTSQPLFAFEWRDPGMGISGQLTWTRLPQGFKNSPTLFNEALHRDLADFRIQHPDLILLQYVDDILLAATSELDCQQGTRALLLTLGNLGYRASAKKAQLCQKQVKYLGYLLKEGQRWLTEARKETVMGQPTPKTPRQLREFLGKAGFCRLFIPGFAEMAAPLYPLTKPGTLFNWGPDQQKAYQEIKQALLTAPALGLPDLTKPFELFVDEKQGYAKGVLTQKLGPWRRPVAYLSKKLDPVAAGWPPCLRMVAAIAVLRKDAGKLTMGQPLVILAPHAVEALVKQPPDRWLSNARMTHYQAMLLDTDRVQFGPVVALNPATLLPLPEEGAPHDCLEILAETHGTRPDLTDQPIPDADHTWYTDGSSFLQEGQRKAGAAVTTETEVIWARALPAGTSAQRAELIALTQALKMAEGKRLNVYTDSRYAFATAHIHGEIYRRRGWLTSEGREIKNKSEILALLKALFLPKRLSIIHCLGHQKGDSAEARGNRLADQAAREAAIKTPPDTSTLLAGKRTADGSEFEKRTADGSEFESPKKKAKVE

SEQ ID NO: 1881 - protein, 2094 aa, synthetic construct
MPAAKRVKLDGGDKKYSIGLDIGTNSVGWAVITDEYKVPSKKFKVLGNTDRHSIKKNLIGALLFDSGETAEATRLKRTARRRYTRRKNRICYLQEIFSNEMAKVDDSFFHRLEESFLVEEDKKHERHPIFGNIVDEVAYHEKYPTIYHLRKKLVDSTDKADLRLIYLALAHMIKFRGHFLIEGDLNPDNSDVDKLFIQLVQTYNQLFEENPINASGVDAKAILSARLSKSRRLENLIAQLPGEKKNGLFGNLIALSLGLTPNFKSNFDLAEDAKLQLSKDTYDDDLDNLLAQIGDQYADLFLAAKNLSDAILLSDILRVNTEITKAPLSASMIKRYDEHHQDLTLLKALVRQQLPEKYKEIFFDQSKNGYAGYIDGGASQEEFYKFIKPILEKMDGTEELLVKLNREDLLRKQRTFDNGSIPHQIHLGELHAILRRQEDFYPFLKDNREKIEKILTFRIPYYVGPLARGNSRFAWMTRKSEETITPWNFEEVVDKGASAQSFIERMTNFDKNLPNEKVLPKHSLLYEYFTVYNELTKVKYVTEGMRKPAFLSGEQKKAIVDLLFKTNRKVTVKQLKEDYFKKIECFDSVEISGVEDRFNASLGTYHDLLKIIKDKDFLDNEENEDILEDIVLTLTLFEDREMIEERLKTYAHLFDDKVMKQLKRRRYTGWGRLSRKLINGIRDKQSGKTILDFLKSDGFANRNFMQLIHDDSLTFKEDIQKAQVSGQGDSLHEHIANLAGSPAIKKGILQTVKVVDELVKVMGRHKPENIVIEMARENQTTQKGQKNSRERMKRIEEGIKELGSQILKEHPVENTQLQNEKLYLYYLQNGRDMYVDQELDINRLSDYDVDHIVPQSFLKDDSIDNKVLTRSDKARGKSDNVPSEEVVKKMKNYWRQLLNAKLITQRKFDNLTKAERGGLSELDKAGFIKRQLVETRQITKHVAQILDSRMNTKYDENDKLIREVKVITLKSKLVSDFRKDFQFYKVREINNYHHAHDAYLNAVVGTALIKKYPKLESEFVYGDYKVYDVRKMIAKSEQEIGKATAKYFFYSNIMNFFKTEITLANGEIRKRPLIETNGETGEIVWDKGRDFATVRKVLSMPQVNIVKKTEVQTGGFSKESILPKRNSDKLIARKKDWDPKKYGGFDSPTVAYSVLVVAKVEKGKSKKLKSVKELLGITIMERSSFEKNPIDFLEAKGYKEVKKDLIIKLPKYSLFELENGRKRMLASAGELQKGNELALPSKYVNFLYLASHYEKLKGSPEDNEQKQLFVEQHKHYLDEIIEQISEFSKRVILADANLDKVLSAYNKHRDKPIREQAENIIHLFTLTNLGAPAAFKYFDTTIDRKRYTSTKEVLDATLIHQSITGLYETRIDLSQLGGDGGPAPAPAPAPGGTLNLEDEYRLYETSAEPEVSPGSTWLSDFPQAWAETGGMGLAVRQAPLIIPLKATSTPVSIKQYPMSQEAKLGIKPHIQRLLDQGILVPCQSPWNTPLLPVKKPGTNDYRPVQDLREVNKRVEDIHPTVPNPYNLLSGLPPSHRWYTVLDLKDAFFCLRLHPTSQPLFAFEWRDPGMGISGQLTWTRLPQGFKNSPTLFNEALHRDLADFRIQHPDLILLQYVDDILLAATSELDCQQGTRALLLTLGNLGYRASAKKAQLCQKQVKYLGYLLKEGQRWLTEARKETVMGQPTPKTPRQLREFLGKAGFCRLFIPGFAEMAAPLYPLTKPGTLFNWGPDQQKAYQEIKQALLTAPALGLPDLTKPFELFVDEKQGYAKGVLTQKLGPWRRPVAYLSKKLDPVAAGWPPCLRMVAAIAVLRKDAGKLTMGQPLVILAPHAVEALVKQPPDRWLSNARMTHYQAMLLDTDRVQFGPVVALNPATLLPLPEEGAPHDCLEILAETHGTRPDLTDQPIPDADHTWYTDGSSFLQEGQRKAGAAVTTETEVIWARALPAGTSAQRAELIALTQALKMAEGKRLNVYTDSRYAFATAHIHGEIYRRRGWLTSEGREIKNKSEILALLKALFLPKRLSIIHCLGHQKGDSAEARGNRLADQAAREAAIKTPPDTSTLLAGKRTADGSEFEKRTADGSEFESPKKKAKVE

SEQ ID NO: 1882 - protein, 2093 aa, synthetic construct
MPAAKRVKLDGGDKKYSIGLDIGTNSVGWAVITDEYKVPSKKFKVLGNTDRHSIKKNLIGALLFDSGETAEATRLKRTARRRYTRRKNRICYLQEIFSNEMAKVDDSFFHRLEESFLVEEDKKHERHPIFGNIVDEVAYHEKYPTIYHLRKKLVDSTDKADLRLIYLALAHMIKFRGHFLIEGDLNPDNSDVDKLFIQLVQTYNQLFEENPINASGVDAKAILSARLSKSRRLENLIAQLPGEKKNGLFGNLIALSLGLTPNFKSNFDLAEDAKLQLSKDTYDDDLDNLLAQIGDQYADLFLAAKNLSDAILLSDILRVNTEITKAPLSASMIKRYDEHHQDLTLLKALVRQQLPEKYKEIFFDQSKNGYAGYIDGGASQEEFYKFIKPILEKMDGTEELLVKLNREDLLRKQRTFDNGSIPHQIHLGELHAILRRQEDFYPFLKDNREKIEKILTFRIPYYVGPLARGNSRFAWMTRKSEETITPWNFEEVVDKGASAQSFIERMTNFDKNLPNEKVLPKHSLLYEYFTVYNELTKVKYVTEGMRKPAFLSGEQKKAIVDLLFKTNRKVTVKQLKEDYFKKIECFDSVEISGVEDRFNASLGTYHDLLKIIKDKDFLDNEENEDILEDIVLTLTLFEDREMIEERLKTYAHLFDDKVMKQLKRRRYTGWGRLSRKLINGIRDKQSGKTILDFLKSDGFANRNFMQLIHDDSLTFKEDIQKAQVSGQGDSLHEHIANLAGSPAIKKGILQTVKVVDELVKVMGRHKPENIVIEMARENQTTQKGQKNSRERMKRIEEGIKELGSQILKEHPVENTQLQNEKLYLYYLQNGRDMYVDQELDINRLSDYDVDHIVPQSFLKDDSIDNKVLTRSDKARGKSDNVPSEEVVKKMKNYWRQLLNAKLITQRKFDNLTKAERGGLSELDKAGFIKRQLVETRQITKHVAQILDSRMNTKYDENDKLIREVKVITLKSKLVSDFRKDFQFYKVREINNYHHAHDAYLNAVVGTALIKKYPKLESEFVYGDYKVYDVRKMIAKSEQEIGKATAKYFFYSNIMNFFKTEITLANGEIRKRPLIETNGETGEIVWDKGRDFATVRKVLSMPQVNIVKKTEVQTGGFSKESILPKRNSDKLIARKKDWDPKKYGGFDSPTVAYSVLVVAKVEKGKSKKLKSVKELLGITIMERSSFEKNPIDFLEAKGYKEVKKDLIIKLPKYSLFELENGRKRMLASAGELQKGNELALPSKYVNFLYLASHYEKLKGSPEDNEQKQLFVEQHKHYLDEIIEQISEFSKRVILADANLDKVLSAYNKHRDKPIREQAENIIHLFTLTNLGAPAAFKYFDTTIDRKRYTSTKEVLDATLIHQSITGLYETRIDLSQLGGDGGEAAAKGGSGGTLNLEDEYRLYETSAEPEVSPGSTWLSDFPQAWAETGGMGLAVRQAPLIIPLKATSTPVSIKQYPMSQEAKLGIKPHIQRLLDQGILVPCQSPWNTPLLPVKKPGTNDYRPVQDLREVNKRVEDIHPTVPNPYNLLSGLPPSHRWYTVLDLKDAFFCLRLHPTSQPLFAFEWRDPGMGISGQLTWTRLPQGFKNSPTLFNEALHRDLADFRIQHPDLILLQYVDDILLAATSELDCQQGTRALLLTLGNLGYRASAKKAQLCQKQVKYLGYLLKEGQRWLTEARKETVMGQPTPKTPRQLREFLGKAGFCRLFIPGFAEMAAPLYPLTKPGTLFNWGPDQQKAYQEIKQALLTAPALGLPDLTKPFELFVDEKQGYAKGVLTQKLGPWRRPVAYLSKKLDPVAAGWPPCLRMVAAIAVLRKDAGKLTMGQPLVILAPHAVEALVKQPPDRWLSNARMTHYQAMLLDTDRVQFGPVVALNPATLLPLPEEGAPHDCLEILAETHGTRPDLTDQPIPDADHTWYTDGSSFLQEGQRKAGAAVTTETEVIWARALPAGTSAQRAELIALTQALKMAEGKRLNVYTDSRYAFATAHIHGEIYRRRGWLTSEGREIKNKSEILALLKALFLPKRLSIIHCLGHQKGDSAEARGNRLADQAAREAAIKTPPDTSTLLAGKRTADGSEFEKRTADGSEFESPKKKAKVE

SEQ ID NO: 1883 - protein, 2094 aa, synthetic construct
MPAAKRVKLDGGDKKYSIGLDIGTNSVGWAVITDEYKVPSKKFKVLGNTDRHSIKKNLIGALLFDSGETAEATRLKRTARRRYTRRKNRICYLQEIFSNEMAKVDDSFFHRLEESFLVEEDKKHERHPIFGNIVDEVAYHEKYPTIYHLRKKLVDSTDKADLRLIYLALAHMIKFRGHFLIEGDLNPDNSDVDKLFIQLVQTYNQLFEENPINASGVDAKAILSARLSKSRRLENLIAQLPGEKKNGLFGNLIALSLGLTPNFKSNFDLAEDAKLQLSKDTYDDDLDNLLAQIGDQYADLFLAAKNLSDAILLSDILRVNTEITKAPLSASMIKRYDEHHQDLTLLKALVRQQLPEKYKEIFFDQSKNGYAGYIDGGASQEEFYKFIKPILEKMDGTEELLVKLNREDLLRKQRTFDNGSIPHQIHLGELHAILRRQEDFYPFLKDNREKIEKILTFRIPYYVGPLARGNSRFAWMTRKSEETITPWNFEEVVDKGASAQSFIERMTNFDKNLPNEKVLPKHSLLYEYFTVYNELTKVKYVTEGMRKPAFLSGEQKKAIVDLLFKTNRKVTVKQLKEDYFKKIECFDSVEISGVEDRFNASLGTYHDLLKIIKDKDFLDNEENEDILEDIVLTLTLFEDREMIEERLKTYAHLFDDKVMKQLKRRRYTGWGRLSRKLINGIRDKQSGKTILDFLKSDGFANRNFMQLIHDDSLTFKEDIQKAQVSGQGDSLHEHIANLAGSPAIKKGILQTVKVVDELVKVMGRHKPENIVIEMARENQTTQKGQKNSRERMKRIEEGIKELGSQILKEHPVENTQLQNEKLYLYYLQNGRDMYVDQELDINRLSDYDVDHIVPQSFLKDDSIDNKVLTRSDKARGKSDNVPSEEVVKKMKNYWRQLLNAKLITQRKFDNLTKAERGGLSELDKAGFIKRQLVETRQITKHVAQILDSRMNTKYDENDKLIREVKVITLKSKLVSDFRKDFQFYKVREINNYHHAHDAYLNAVVGTALIKKYPKLESEFVYGDYKVYDVRKMIAKSEQEIGKATAKYFFYSNIMNFFKTEITLANGEIRKRPLIETNGETGEIVWDKGRDFATVRKVLSMPQVNIVKKTEVQTGGFSKESILPKRNSDKLIARKKDWDPKKYGGFDSPTVAYSVLVVAKVEKGKSKKLKSVKELLGITIMERSSFEKNPIDFLEAKGYKEVKKDLIIKLPKYSLFELENGRKRMLASAGELQKGNELALPSKYVNFLYLASHYEKLKGSPEDNEQKQLFVEQHKHYLDEIIEQISEFSKRVILADANLDKVLSAYNKHRDKPIREQAENIIHLFTLTNLGAPAAFKYFDTTIDRKRYTSTKEVLDATLIHQSITGLYETRIDLSQLGGDGGPAPGSSGGSGGTLNLEDEYRLYETSAEPEVSPGSTWLSDFPQAWAETGGMGLAVRQAPLIIPLKATSTPVSIKQYPMSQEAKLGIKPHIQRLLDQGILVPCQSPWNTPLLPVKKPGTNDYRPVQDLREVNKRVEDIHPTVPNPYNLLSGLPPSHRWYTVLDLKDAFFCLRLHPTSQPLFAFEWRDPGMGISGQLTWTRLPQGFKNSPTLFNEALHRDLADFRIQHPDLILLQYVDDILLAATSELDCQQGTRALLLTLGNLGYRASAKKAQLCQKQVKYLGYLLKEGQRWLTEARKETVMGQPTPKTPRQLREFLGKAGFCRLFIPGFAEMAAPLYPLTKPGTLFNWGPDQQKAYQEIKQALLTAPALGLPDLTKPFELFVDEKQGYAKGVLTQKLGPWRRPVAYLSKKLDPVAAGWPPCLRMVAAIAVLRKDAGKLTMGQPLVILAPHAVEALVKQPPDRWLSNARMTHYQAMLLDTDRVQFGPVVALNPATLLPLPEEGAPHDCLEILAETHGTRPDLTDQPIPDADHTWYTDGSSFLQEGQRKAGAAVTTETEVIWARALPAGTSAQRAELIALTQALKMAEGKRLNVYTDSRYAFATAHIHGEIYRRRGWLTSEGREIKNKSEILALLKALFLPKRLSIIHCLGHQKGDSAEARGNRLADQAAREAAIKTPPDTSTLLAGKRTADGSEFEKRTADGSEFESPKKKAKVE

SEQ ID NO: 1884 - protein, 2094 aa, synthetic construct
MPAAKRVKLDGGDKKYSIGLDIGTNSVGWAVITDEYKVPSKKFKVLGNTDRHSIKKNLIGALLFDSGETAEATRLKRTARRRYTRRKNRICYLQEIFSNEMAKVDDSFFHRLEESFLVEEDKKHERHPIFGNIVDEVAYHEKYPTIYHLRKKLVDSTDKADLRLIYLALAHMIKFRGHFLIEGDLNPDNSDVDKLFIQLVQTYNQLFEENPINASGVDAKAILSARLSKSRRLENLIAQLPGEKKNGLFGNLIALSLGLTPNFKSNFDLAEDAKLQLSKDTYDDDLDNLLAQIGDQYADLFLAAKNLSDAILLSDILRVNTEITKAPLSASMIKRYDEHHQDLTLLKALVRQQLPEKYKEIFFDQSKNGYAGYIDGGASQEEFYKFIKPILEKMDGTEELLVKLNREDLLRKQRTFDNGSIPHQIHLGELHAILRRQEDFYPFLKDNREKIEKILTFRIPYYVGPLARGNSRFAWMTRKSEETITPWNFEEVVDKGASAQSFIERMTNFDKNLPNEKVLPKHSLLYEYFTVYNELTKVKYVTEGMRKPAFLSGEQKKAIVDLLFKTNRKVTVKQLKEDYFKKIECFDSVEISGVEDRFNASLGTYHDLLKIIKDKDFLDNEENEDILEDIVLTLTLFEDREMIEERLKTYAHLFDDKVMKQLKRRRYTGWGRLSRKLINGIRDKQSGKTILDFLKSDGFANRNFMQLIHDDSLTFKEDIQKAQVSGQGDSLHEHIANLAGSPAIKKGILQTVKVVDELVKVMGRHKPENIVIEMARENQTTQKGQKNSRERMKRIEEGIKELGSQILKEHPVENTQLQNEKLYLYYLQNGRDMYVDQELDINRLSDYDVDHIVPQSFLKDDSIDNKVLTRSDKARGKSDNVPSEEVVKKMKNYWRQLLNAKLITQRKFDNLTKAERGGLSELDKAGFIKRQLVETRQITKHVAQILDSRMNTKYDENDKLIREVKVITLKSKLVSDFRKDFQFYKVREINNYHHAHDAYLNAVVGTALIKKYPKLESEFVYGDYKVYDVRKMIAKSEQEIGKATAKYFFYSNIMNFFKTEITLANGEIRKRPLIETNGETGEIVWDKGRDFATVRKVLSMPQVNIVKKTEVQTGGFSKESILPKRNSDKLIARKKDWDPKKYGGFDSPTVAYSVLVVAKVEKGKSKKLKSVKELLGITIMERSSFEKNPIDFLEAKGYKEVKKDLIIKLPKYSLFELENGRKRMLASAGELQKGNELALPSKYVNFLYLASHYEKLKGSPEDNEQKQLFVEQHKHYLDEIIEQISEFSKRVILADANLDKVLSAYNKHRDKPIREQAENIIHLFTLTNLGAPAAFKYFDTTIDRKRYTSTKEVLDATLIHQSITGLYETRIDLSQLGGDGGGGGGSSGGSGGTLNLEDEYRLYETSAEPEVSPGSTWLSDFPQAWAETGGMGLAVRQAPLIIPLKATSTPVSIKQYPMSQEAKLGIKPHIQRLLDQGILVPCQSPWNTPLLPVKKPGTNDYRPVQDLREVNKRVEDIHPTVPNPYNLLSGLPPSHRWYTVLDLKDAFFCLRLHPTSQPLFAFEWRDPGMGISGQLTWTRLPQGFKNSPTLFNEALHRDLADFRIQHPDLILLQYVDDILLAATSELDCQQGTRALLLTLGNLGYRASAKKAQLCQKQVKYLGYLLKEGQRWLTEARKETVMGQPTPKTPRQLREFLGKAGFCRLFIPGFAEMAAPLYPLTKPGTLFNWGPDQQKAYQEIKQALLTAPALGLPDLTKPFELFVDEKQGYAKGVLTQKLGPWRRPVAYLSKKLDPVAAGWPPCLRMVAAIAVLRKDAGKLTMGQPLVILAPHAVEALVKQPPDRWLSNARMTHYQAMLLDTDRVQFGPVVALNPATLLPLPEEGAPHDCLEILAETHGTRPDLTDQPIPDADHTWYTDGSSFLQEGQRKAGAAVTTETEVIWARALPAGTSAQRAELIALTQALKMAEGKRLNVYTDSRYAFATAHIHGEIYRRRGWLTSEGREIKNKSEILALLKALFLPKRLSIIHCLGHQKGDSAEARGNRLADQAAREAAIKTPPDTSTLLAGKRTADGSEFEKRTADGSEFESPKKKAKVE

SEQ ID NO: 1885 - protein, 2090 aa, synthetic construct
MPAAKRVKLDGGDKKYSIGLDIGTNSVGWAVITDEYKVPSKKFKVLGNTDRHSIKKNLIGALLFDSGETAEATRLKRTARRRYTRRKNRICYLQEIFSNEMAKVDDSFFHRLEESFLVEEDKKHERHPIFGNIVDEVAYHEKYPTIYHLRKKLVDSTDKADLRLIYLALAHMIKFRGHFLIEGDLNPDNSDVDKLFIQLVQTYNQLFEENPINASGVDAKAILSARLSKSRRLENLIAQLPGEKKNGLFGNLIALSLGLTPNFKSNFDLAEDAKLQLSKDTYDDDLDNLLAQIGDQYADLFLAAKNLSDAILLSDILRVNTEITKAPLSASMIKRYDEHHQDLTLLKALVRQQLPEKYKEIFFDQSKNGYAGYIDGGASQEEFYKFIKPILEKMDGTEELLVKLNREDLLRKQRTFDNGSIPHQIHLGELHAILRRQEDFYPFLKDNREKIEKILTFRIPYYVGPLARGNSRFAWMTRKSEETITPWNFEEVVDKGASAQSFIERMTNFDKNLPNEKVLPKHSLLYEYFTVYNELTKVKYVTEGMRKPAFLSGEQKKAIVDLLFKTNRKVTVKQLKEDYFKKIECFDSVEISGVEDRFNASLGTYHDLLKIIKDKDFLDNEENEDILEDIVLTLTLFEDREMIEERLKTYAHLFDDKVMKQLKRRRYTGWGRLSRKLINGIRDKQSGKTILDFLKSDGFANRNFMQLIHDDSLTFKEDIQKAQVSGQGDSLHEHIANLAGSPAIKKGILQTVKVVDELVKVMGRHKPENIVIEMARENQTTQKGQKNSRERMKRIEEGIKELGSQILKEHPVENTQLQNEKLYLYYLQNGRDMYVDQELDINRLSDYDVDHIVPQSFLKDDSIDNKVLTRSDKARGKSDNVPSEEVVKKMKNYWRQLLNAKLITQRKFDNLTKAERGGLSELDKAGFIKRQLVETRQITKHVAQILDSRMNTKYDENDKLIREVKVITLKSKLVSDFRKDFQFYKVREINNYHHAHDAYLNAVVGTALIKKYPKLESEFVYGDYKVYDVRKMIAKSEQEIGKATAKYFFYSNIMNFFKTEITLANGEIRKRPLIETNGETGEIVWDKGRDFATVRKVLSMPQVNIVKKTEVQTGGFSKESILPKRNSDKLIARKKDWDPKKYGGFDSPTVAYSVLVVAKVEKGKSKKLKSVKELLGITIMERSSFEKNPIDFLEAKGYKEVKKDLIIKLPKYSLFELENGRKRMLASAGELQKGNELALPSKYVNFLYLASHYEKLKGSPEDNEQKQLFVEQHKHYLDEIIEQISEFSKRVILADANLDKVLSAYNKHRDKPIREQAENIIHLFTLTNLGAPAAFKYFDTTIDRKRYTSTKEVLDATLIHQSITGLYETRIDLSQLGGDGGGGGGSGGTLNLEDEYRLYETSAEPEVSPGSTWLSDFPQAWAETGGMGLAVRQAPLIIPLKATSTPVSIKQYPMSQEAKLGIKPHIQRLLDQGILVPCQSPWNTPLLPVKKPGTNDYRPVQDLREVNKRVEDIHPTVPNPYNLLSGLPPSHRWYTVLDLKDAFFCLRLHPTSQPLFAFEWRDPGMGISGQLTWTRLPQGFKNSPTLFNEALHRDLADFRIQHPDLILLQYVDDILLAATSELDCQQGTRALLLTLGNLGYRASAKKAQLCQKQVKYLGYLLKEGQRWLTEARKETVMGQPTPKTPRQLREFLGKAGFCRLFIPGFAEMAAPLYPLTKPGTLFNWGPDQQKAYQEIKQALLTAPALGLPDLTKPFELFVDEKQGYAKGVLTQKLGPWRRPVAYLSKKLDPVAAGWPPCLRMVAAIAVLRKDAGKLTMGQPLVILAPHAVEALVKQPPDRWLSNARMTHYQAMLLDTDRVQFGPVVALNPATLLPLPEEGAPHDCLEILAETHGTRPDLTDQPIPDADHTWYTDGSSFLQEGQRKAGAAVTTETEVIWARALPAGTSAQRAELIALTQALKMAEGKRLNVYTDSRYAFATAHIHGEIYRRRGWLTSEGREIKNKSEILALLKALFLPKRLSIIHCLGHQKGDSAEARGNRLADQAAREAAIKTPPDTSTLLAGKRTADGSEFEKRTADGSEFESPKKKAKVE

SEQ ID NO: 1886 - protein, 2096 aa, synthetic construct
MPAAKRVKLDGGDKKYSIGLDIGTNSVGWAVITDEYKVPSKKFKVLGNTDRHSIKKNLIGALLFDSGETAEATRLKRTARRRYTRRKNRICYLQEIFSNEMAKVDDSFFHRLEESFLVEEDKKHERHPIFGNIVDEVAYHEKYPTIYHLRKKLVDSTDKADLRLIYLALAHMIKFRGHFLIEGDLNPDNSDVDKLFIQLVQTYNQLFEENPINASGVDAKAILSARLSKSRRLENLIAQLPGEKKNGLFGNLIALSLGLTPNFKSNFDLAEDAKLQLSKDTYDDDLDNLLAQIGDQYADLFLAAKNLSDAILLSDILRVNTEITKAPLSASMIKRYDEHHQDLTLLKALVRQQLPEKYKEIFFDQSKNGYAGYIDGGASQEEFYKFIKPILEKMDGTEELLVKLNREDLLRKQRTFDNGSIPHQIHLGELHAILRRQEDFYPFLKDNREKIEKILTFRIPYYVGPLARGNSRFAWMTRKSEETITPWNFEEVVDKGASAQSFIERMTNFDKNLPNEKVLPKHSLLYEYFTVYNELTKVKYVTEGMRKPAFLSGEQKKAIVDLLFKTNRKVTVKQLKEDYFKKIECFDSVEISGVEDRFNASLGTYHDLLKIIKDKDFLDNEENEDILEDIVLTLTLFEDREMIEERLKTYAHLFDDKVMKQLKRRRYTGWGRLSRKLINGIRDKQSGKTILDFLKSDGFANRNFMQLIHDDSLTFKEDIQKAQVSGQGDSLHEHIANLAGSPAIKKGILQTVKVVDELVKVMGRHKPENIVIEMARENQTTQKGQKNSRERMKRIEEGIKELGSQILKEHPVENTQLQNEKLYLYYLQNGRDMYVDQELDINRLSDYDVDHIVPQSFLKDDSIDNKVLTRSDKARGKSDNVPSEEVVKKMKNYWRQLLNAKLITQRKFDNLTKAERGGLSELDKAGFIKRQLVETRQITKHVAQILDSRMNTKYDENDKLIREVKVITLKSKLVSDFRKDFQFYKVREINNYHHAHDAYLNAVVGTALIKKYPKLESEFVYGDYKVYDVRKMIAKSEQEIGKATAKYFFYSNIMNFFKTEITLANGEIRKRPLIETNGETGEIVWDKGRDFATVRKVLSMPQVNIVKKTEVQTGGFSKESILPKRNSDKLIARKKDWDPKKYGGFDSPTVAYSVLVVAKVEKGKSKKLKSVKELLGITIMERSSFEKNPIDFLEAKGYKEVKKDLIIKLPKYSLFELENGRKRMLASAGELQKGNELALPSKYVNFLYLASHYEKLKGSPEDNEQKQLFVEQHKHYLDEIIEQISEFSKRVILADANLDKVLSAYNKHRDKPIREQAENIIHLFTLTNLGAPAAFKYFDTTIDRKRYTSTKEVLDATLIHQSITGLYETRIDLSQLGGDGGGGGEAAAKPAPGGTLNLEDEYRLYETSAEPEVSPGSTWLSDFPQAWAETGGMGLAVRQAPLIIPLKATSTPVSIKQYPMSQEAKLGIKPHIQRLLDQGILVPCQSPWNTPLLPVKKPGTNDYRPVQDLREVNKRVEDIHPTVPNPYNLLSGLPPSHRWYTVLDLKDAFFCLRLHPTSQPLFAFEWRDPGMGISGQLTWTRLPQGFKNSPTLFNEALHRDLADFRIQHPDLILLQYVDDILLAATSELDCQQGTRALLLTLGNLGYRASAKKAQLCQKQVKYLGYLLKEGQRWLTEARKETVMGQPTPKTPRQLREFLGKAGFCRLFIPGFAEMAAPLYPLTKPGTLFNWGPDQQKAYQEIKQALLTAPALGLPDLTKPFELFVDEKQGYAKGVLTQKLGPWRRPVAYLSKKLDPVAAGWPPCLRMVAAIAVLRKDAGKLTMGQPLVILAPHAVEALVKQPPDRWLSNARMTHYQAMLLDTDRVQFGPVVALNPATLLPLPEEGAPHDCLEILAETHGTRPDLTDQPIPDADHTWYTDGSSFLQEGQRKAGAAVTTETEVIWARALPAGTSAQRAELIALTQALKMAEGKRLNVYTDSRYAFATAHIHGEIYRRRGWLTSEGREIKNKSEILALLKALFLPKRLSIIHCLGHQKGDSAEARGNRLADQAAREAAIKTPPDTSTLLAGKRTADGSEFEKRTADGSEFESPKKKAKVE

SEQ ID NO: 1887 - protein, 2091 aa, synthetic construct
MPAAKRVKLDGGDKKYSIGLDIGTNSVGWAVITDEYKVPSKKFKVLGNTDRHSIKKNLIGALLFDSGETAEATRLKRTARRRYTRRKNRICYLQEIFSNEMAKVDDSFFHRLEESFLVEEDKKHERHPIFGNIVDEVAYHEKYPTIYHLRKKLVDSTDKADLRLIYLALAHMIKFRGHFLIEGDLNPDNSDVDKLFIQLVQTYNQLFEENPINASGVDAKAILSARLSKSRRLENLIAQLPGEKKNGLFGNLIALSLGLTPNFKSNFDLAEDAKLQLSKDTYDDDLDNLLAQIGDQYADLFLAAKNLSDAILLSDILRVNTEITKAPLSASMIKRYDEHHQDLTLLKALVRQQLPEKYKEIFFDQSKNGYAGYIDGGASQEEFYKFIKPILEKMDGTEELLVKLNREDLLRKQRTFDNGSIPHQIHLGELHAILRRQEDFYPFLKDNREKIEKILTFRIPYYVGPLARGNSRFAWMTRKSEETITPWNFEEVVDKGASAQSFIERMTNFDKNLPNEKVLPKHSLLYEYFTVYNELTKVKYVTEGMRKPAFLSGEQKKAIVDLLFKTNRKVTVKQLKEDYFKKIECFDSVEISGVEDRFNASLGTYHDLLKIIKDKDFLDNEENEDILEDIVLTLTLFEDREMIEERLKTYAHLFDDKVMKQLKRRRYTGWGRLSRKLINGIRDKQSGKTILDFLKSDGFANRNFMQLIHDDSLTFKEDIQKAQVSGQGDSLHEHIANLAGSPAIKKGILQTVKVVDELVKVMGRHKPENIVIEMARENQTTQKGQKNSRERMKRIEEGIKELGSQILKEHPVENTQLQNEKLYLYYLQNGRDMYVDQELDINRLSDYDVDHIVPQSFLKDDSIDNKVLTRSDKARGKSDNVPSEEVVKKMKNYWRQLLNAKLITQRKFDNLTKAERGGLSELDKAGFIKRQLVETRQITKHVAQILDSRMNTKYDENDKLIREVKVITLKSKLVSDFRKDFQFYKVREINNYHHAHDAYLNAVVGTALIKKYPKLESEFVYGDYKVYDVRKMIAKSEQEIGKATAKYFFYSNIMNFFKTEITLANGEIRKRPLIETNGETGEIVWDKGRDFATVRKVLSMPQVNIVKKTEVQTGGFSKESILPKRNSDKLIARKKDWDPKKYGGFDSPTVAYSVLVVAKVEKGKSKKLKSVKELLGITIMERSSFEKNPIDFLEAKGYKEVKKDLIIKLPKYSLFELENGRKRMLASAGELQKGNELALPSKYVNFLYLASHYEKLKGSPEDNEQKQLFVEQHKHYLDEIIEQISEFSKRVILADANLDKVLSAYNKHRDKPIREQAENIIHLFTLTNLGAPAAFKYFDTTIDRKRYTSTKEVLDATLIHQSITGLYETRIDLSQLGGDGGGSSPAPGGTLNLEDEYRLYETSAEPEVSPGSTWLSDFPQAWAETGGMGLAVRQAPLIIPLKATSTPVSIKQYPMSQEAKLGIKPHIQRLLDQGILVPCQSPWNTPLLPVKKPGTNDYRPVQDLREVNKRVEDIHPTVPNPYNLLSGLPPSHRWYTVLDLKDAFFCLRLHPTSQPLFAFEWRDPGMGISGQLTWTRLPQGFKNSPTLFNEALHRDLADFRIQHPDLILLQYVDDILLAATSELDCQQGTRALLLTLGNLGYRASAKKAQLCQKQVKYLGYLLKEGQRWLTEARKETVMGQPTPKTPRQLREFLGKAGFCRLFIPGFAEMAAPLYPLTKPGTLFNWGPDQQKAYQEIKQALLTAPALGLPDLTKPFELFVDEKQGYAKGVLTQKLGPWRRPVAYLSKKLDPVAAGWPPCLRMVAAIAVLRKDAGKLTMGQPLVILAPHAVEALVKQPPDRWLSNARMTHYQAMLLDTDRVQFGPVVALNPATLLPLPEEGAPHDCLEILAETHGTRPDLTDQPIPDADHTWYTDGSSFLQEGQRKAGAAVTTETEVIWARALPAGTSAQRAELIALTQALKMAEGKRLNVYTDSRYAFATAHIHGEIYRRRGWLTSEGREIKNKSEILALLKALFLPKRLSIIHCLGHQKGDSAEARGNRLADQAAREAAIKTPPDTSTLLAGKRTADGSEFEKRTADGSEFESPKKKAKVE

SEQ ID NO: 1888 - protein, 2093 aa, synthetic construct
MPAAKRVKLDGGDKKYSIGLDIGTNSVGWAVITDEYKVPSKKFKVLGNTDRHSIKKNLIGALLFDSGETAEATRLKRTARRRYTRRKNRICYLQEIFSNEMAKVDDSFFHRLEESFLVEEDKKHERHPIFGNIVDEVAYHEKYPTIYHLRKKLVDSTDKADLRLIYLALAHMIKFRGHFLIEGDLNPDNSDVDKLFIQLVQTYNQLFEENPINASGVDAKAILSARLSKSRRLENLIAQLPGEKKNGLFGNLIALSLGLTPNFKSNFDLAEDAKLQLSKDTYDDDLDNLLAQIGDQYADLFLAAKNLSDAILLSDILRVNTEITKAPLSASMIKRYDEHHQDLTLLKALVRQQLPEKYKEIFFDQSKNGYAGYIDGGASQEEFYKFIKPILEKMDGTEELLVKLNREDLLRKQRTFDNGSIPHQIHLGELHAILRRQEDFYPFLKDNREKIEKILTFRIPYYVGPLARGNSRFAWMTRKSEETITPWNFEEVVDKGASAQSFIERMTNFDKNLPNEKVLPKHSLLYEYFTVYNELTKVKYVTEGMRKPAFLSGEQKKAIVDLLFKTNRKVTVKQLKEDYFKKIECFDSVEISGVEDRFNASLGTYHDLLKIIKDKDFLDNEENEDILEDIVLTLTLFEDREMIEERLKTYAHLFDDKVMKQLKRRRYTGWGRLSRKLINGIRDKQSGKTILDFLKSDGFANRNFMQLIHDDSLTFKEDIQKAQVSGQGDSLHEHIANLAGSPAIKKGILQTVKVVDELVKVMGRHKPENIVIEMARENQTTQKGQKNSRERMKRIEEGIKELGSQILKEHPVENTQLQNEKLYLYYLQNGRDMYVDQELDINRLSDYDVDHIVPQSFLKDDSIDNKVLTRSDKARGKSDNVPSEEVVKKMKNYWRQLLNAKLITQRKFDNLTKAERGGLSELDKAGFIKRQLVETRQITKHVAQILDSRMNTKYDENDKLIREVKVITLKSKLVSDFRKDFQFYKVREINNYHHAHDAYLNAVVGTALIKKYPKLESEFVYGDYKVYDVRKMIAKSEQEIGKATAKYFFYSNIMNFFKTEITLANGEIRKRPLIETNGETGEIVWDKGRDFATVRKVLSMPQVNIVKKTEVQTGGFSKESILPKRNSDKLIARKKDWDPKKYGGFDSPTVAYSVLVVAKVEKGKSKKLKSVKELLGITIMERSSFEKNPIDFLEAKGYKEVKKDLIIKLPKYSLFELENGRKRMLASAGELQKGNELALPSKYVNFLYLASHYEKLKGSPEDNEQKQLFVEQHKHYLDEIIEQISEFSKRVILADANLDKVLSAYNKHRDKPIREQAENIIHLFTLTNLGAPAAFKYFDTTIDRKRYTSTKEVLDATLIHQSITGLYETRIDLSQLGGDGGEAAAKGGGGGTLNLEDEYRLYETSAEPEVSPGSTWLSDFPQAWAETGGMGLAVRQAPLIIPLKATSTPVSIKQYPMSQEAKLGIKPHIQRLLDQGILVPCQSPWNTPLLPVKKPGTNDYRPVQDLREVNKRVEDIHPTVPNPYNLLSGLPPSHRWYTVLDLKDAFFCLRLHPTSQPLFAFEWRDPGMGISGQLTWTRLPQGFKNSPTLFNEALHRDLADFRIQHPDLILLQYVDDILLAATSELDCQQGTRALLLTLGNLGYRASAKKAQLCQKQVKYLGYLLKEGQRWLTEARKETVMGQPTPKTPRQLREFLGKAGFCRLFIPGFAEMAAPLYPLTKPGTLFNWGPDQQKAYQEIKQALLTAPALGLPDLTKPFELFVDEKQGYAKGVLTQKLGPWRRPVAYLSKKLDPVAAGWPPCLRMVAAIAVLRKDAGKLTMGQPLVILAPHAVEALVKQPPDRWLSNARMTHYQAMLLDTDRVQFGPVVALNPATLLPLPEEGAPHDCLEILAETHGTRPDLTDQPIPDADHTWYTDGSSFLQEGQRKAGAAVTTETEVIWARALPAGTSAQRAELIALTQALKMAEGKRLNVYTDSRYAFATAHIHGEIYRRRGWLTSEGREIKNKSEILALLKALFLPKRLSIIHCLGHQKGDSAEARGNRLADQAAREAAIKTPPDTSTLLAGKRTADGSEFEKRTADGSEFESPKKKAKVE

SEQ ID NO: 1889 - protein, 2096 aa, synthetic construct
MPAAKRVKLDGGDKKYSIGLDIGTNSVGWAVITDEYKVPSKKFKVLGNTDRHSIKKNLIGALLFDSGETAEATRLKRTARRRYTRRKNRICYLQEIFSNEMAKVDDSFFHRLEESFLVEEDKKHERHPIFGNIVDEVAYHEKYPTIYHLRKKLVDSTDKADLRLIYLALAHMIKFRGHFLIEGDLNPDNSDVDKLFIQLVQTYNQLFEENPINASGVDAKAILSARLSKSRRLENLIAQLPGEKKNGLFGNLIALSLGLTPNFKSNFDLAEDAKLQLSKDTYDDDLDNLLAQIGDQYADLFLAAKNLSDAILLSDILRVNTEITKAPLSASMIKRYDEHHQDLTLLKALVRQQLPEKYKEIFFDQSKNGYAGYIDGGASQEEFYKFIKPILEKMDGTEELLVKLNREDLLRKQRTFDNGSIPHQIHLGELHAILRRQEDFYPFLKDNREKIEKILTFRIPYYVGPLARGNSRFAWMTRKSEETITPWNFEEVVDKGASAQSFIERMTNFDKNLPNEKVLPKHSLLYEYFTVYNELTKVKYVTEGMRKPAFLSGEQKKAIVDLLFKTNRKVTVKQLKEDYFKKIECFDSVEISGVEDRFNASLGTYHDLLKIIKDKDFLDNEENEDILEDIVLTLTLFEDREMIEERLKTYAHLFDDKVMKQLKRRRYTGWGRLSRKLINGIRDKQSGKTILDFLKSDGFANRNFMQLIHDDSLTFKEDIQKAQVSGQGDSLHEHIANLAGSPAIKKGILQTVKVVDELVKVMGRHKPENIVIEMARENQTTQKGQKNSRERMKRIEEGIKELGSQILKEHPVENTQLQNEKLYLYYLQNGRDMYVDQELDINRLSDYDVDHIVPQSFLKDDSIDNKVLTRSDKARGKSDNVPSEEVVKKMKNYWRQLLNAKLITQRKFDNLTKAERGGLSELDKAGFIKRQLVETRQITKHVAQILDSRMNTKYDENDKLIREVKVITLKSKLVSDFRKDFQFYKVREINNYHHAHDAYLNAVVGTALIKKYPKLESEFVYGDYKVYDVRKMIAKSEQEIGKATAKYFFYSNIMNFFKTEITLANGEIRKRPLIETNGETGEIVWDKGRDFATVRKVLSMPQVNIVKKTEVQTGGFSKESILPKRNSDKLIARKKDWDPKKYGGFDSPTVAYSVLVVAKVEKGKSKKLKSVKELLGITIMERSSFEKNPIDFLEAKGYKEVKKDLIIKLPKYSLFELENGRKRMLASAGELQKGNELALPSKYVNFLYLASHYEKLKGSPEDNEQKQLFVEQHKHYLDEIIEQISEFSKRVILADANLDKVLSAYNKHRDKPIREQAENIIHLFTLTNLGAPAAFKYFDTTIDRKRYTSTKEVLDATLIHQSITGLYETRIDLSQLGGDGGGGSGSSEAAAKGGTLNLEDEYRLYETSAEPEVSPGSTWLSDFPQAWAETGGMGLAVRQAPLIIPLKATSTPVSIKQYPMSQEAKLGIKPHIQRLLDQGILVPCQSPWNTPLLPVKKPGTNDYRPVQDLREVNKRVEDIHPTVPNPYNLLSGLPPSHRWYTVLDLKDAFFCLRLHPTSQPLFAFEWRDPGMGISGQLTWTRLPQGFKNSPTLFNEALHRDLADFRIQHPDLILLQYVDDILLAATSELDCQQGTRALLLTLGNLGYRASAKKAQLCQKQVKYLGYLLKEGQRWLTEARKETVMGQPTPKTPRQLREFLGKAGFCRLFIPGFAEMAAPLYPLTKPGTLFNWGPDQQKAYQEIKQALLTAPALGLPDLTKPFELFVDEKQGYAKGVLTQKLGPWRRPVAYLSKKLDPVAAGWPPCLRMVAAIAVLRKDAGKLTMGQPLVILAPHAVEALVKQPPDRWLSNARMTHYQAMLLDTDRVQFGPVVALNPATLLPLPEEGAPHDCLEILAETHGTRPDLTDQPIPDADHTWYTDGSSFLQEGQRKAGAAVTTETEVIWARALPAGTSAQRAELIALTQALKMAEGKRLNVYTDSRYAFATAHIHGEIYRRRGWLTSEGREIKNKSEILALLKALFLPKRLSIIHCLGHQKGDSAEARGNRLADQAAREAAIKTPPDTSTLLAGKRTADGSEFEKRTADGSEFESPKKKAKVE

SEQ ID NO: 1890 - protein, 2096 aa, synthetic construct
MPAAKRVKLDGGDKKYSIGLDIGTNSVGWAVITDEYKVPSKKFKVLGNTDRHSIKKNLIGALLFDSGETAEATRLKRTARRRYTRRKNRICYLQEIFSNEMAKVDDSFFHRLEESFLVEEDKKHERHPIFGNIVDEVAYHEKYPTIYHLRKKLVDSTDKADLRLIYLALAHMIKFRGHFLIEGDLNPDNSDVDKLFIQLVQTYNQLFEENPINASGVDAKAILSARLSKSRRLENLIAQLPGEKKNGLFGNLIALSLGLTPNFKSNFDLAEDAKLQLSKDTYDDDLDNLLAQIGDQYADLFLAAKNLSDAILLSDILRVNTEITKAPLSASMIKRYDEHHQDLTLLKALVRQQLPEKYKEIFFDQSKNGYAGYIDGGASQEEFYKFIKPILEKMDGTEELLVKLNREDLLRKQRTFDNGSIPHQIHLGELHAILRRQEDFYPFLKDNREKIEKILTFRIPYYVGPLARGNSRFAWMTRKSEETITPWNFEEVVDKGASAQSFIERMTNFDKNLPNEKVLPKHSLLYEYFTVYNELTKVKYVTEGMRKPAFLSGEQKKAIVDLLFKTNRKVTVKQLKEDYFKKIECFDSVEISGVEDRFNASLGTYHDLLKIIKDKDFLDNEENEDILEDIVLTLTLFEDREMIEERLKTYAHLFDDKVMKQLKRRRYTGWGRLSRKLINGIRDKQSGKTILDFLKSDGFANRNFMQLIHDDSLTFKEDIQKAQVSGQGDSLHEHIANLAGSPAIKKGILQTVKVVDELVKVMGRHKPENIVIEMARENQTTQKGQKNSRERMKRIEEGIKELGSQILKEHPVENTQLQNEKLYLYYLQNGRDMYVDQELDINRLSDYDVDHIVPQSFLKDDSIDNKVLTRSDKARGKSDNVPSEEVVKKMKNYWRQLLNAKLITQRKFDNLTKAERGGLSELDKAGFIKRQLVETRQITKHVAQILDSRMNTKYDENDKLIREVKVITLKSKLVSDFRKDFQFYKVREINNYHHAHDAYLNAVVGTALIKKYPKLESEFVYGDYKVYDVRKMIAKSEQEIGKATAKYFFYSNIMNFFKTEITLANGEIRKRPLIETNGETGEIVWDKGRDFATVRKVLSMPQVNIVKKTEVQTGGFSKESILPKRNSDKLIARKKDWDPKKYGGFDSPTVAYSVLVVAKVEKGKSKKLKSVKELLGITIMERSSFEKNPIDFLEAKGYKEVKKDLIIKLPKYSLFELENGRKRMLASAGELQKGNELALPSKYVNFLYLASHYEKLKGSPEDNEQKQLFVEQHKHYLDEIIEQISEFSKRVILADANLDKVLSAYNKHRDKPIREQAENIIHLFTLTNLGAPAAFKYFDTTIDRKRYTSTKEVLDATLIHQSITGLYETRIDLSQLGGDGGGSSPAPEAAAKGGTLNLEDEYRLYETSAEPEVSPGSTWLSDFPQAWAETGGMGLAVRQAPLIIPLKATSTPVSIKQYPMSQEAKLGIKPHIQRLLDQGILVPCQSPWNTPLLPVKKPGTNDYRPVQDLREVNKRVEDIHPTVPNPYNLLSGLPPSHRWYTVLDLKDAFFCLRLHPTSQPLFAFEWRDPGMGISGQLTWTRLPQGFKNSPTLFNEALHRDLADFRIQHPDLILLQYVDDILLAATSELDCQQGTRALLLTLGNLGYRASAKKAQLCQKQVKYLGYLLKEGQRWLTEARKETVMGQPTPKTPRQLREFLGKAGFCRLFIPGFAEMAAPLYPLTKPGTLFNWGPDQQKAYQEIKQALLTAPALGLPDLTKPFELFVDEKQGYAKGVLTQKLGPWRRPVAYLSKKLDPVAAGWPPCLRMVAAIAVLRKDAGKLTMGQPLVILAPHAVEALVKQPPDRWLSNARMTHYQAMLLDTDRVQFGPVVALNPATLLPLPEEGAPHDCLEILAETHGTRPDLTDQPIPDADHTWYTDGSSFLQEGQRKAGAAVTTETEVIWARALPAGTSAQRAELIALTQALKMAEGKRLNVYTDSRYAFATAHIHGEIYRRRGWLTSEGREIKNKSEILALLKALFLPKRLSIIHCLGHQKGDSAEARGNRLADQAAREAAIKTPPDTSTLLAGKRTADGSEFEKRTADGSEFESPKKKAKVE

SEQ ID NO: 1891 - protein, 2093 aa, synthetic construct
MPAAKRVKLDGGDKKYSIGLDIGTNSVGWAVITDEYKVPSKKFKVLGNTDRHSIKKNLIGALLFDSGETAEATRLKRTARRRYTRRKNRICYLQEIFSNEMAKVDDSFFHRLEESFLVEEDKKHERHPIFGNIVDEVAYHEKYPTIYHLRKKLVDSTDKADLRLIYLALAHMIKFRGHFLIEGDLNPDNSDVDKLFIQLVQTYNQLFEENPINASGVDAKAILSARLSKSRRLENLIAQLPGEKKNGLFGNLIALSLGLTPNFKSNFDLAEDAKLQLSKDTYDDDLDNLLAQIGDQYADLFLAAKNLSDAILLSDILRVNTEITKAPLSASMIKRYDEHHQDLTLLKALVRQQLPEKYKEIFFDQSKNGYAGYIDGGASQEEFYKFIKPILEKMDGTEELLVKLNREDLLRKQRTFDNGSIPHQIHLGELHAILRRQEDFYPFLKDNREKIEKILTFRIPYYVGPLARGNSRFAWMTRKSEETITPWNFEEVVDKGASAQSFIERMTNFDKNLPNEKVLPKHSLLYEYFTVYNELTKVKYVTEGMRKPAFLSGEQKKAIVDLLFKTNRKVTVKQLKEDYFKKIECFDSVEISGVEDRFNASLGTYHDLLKIIKDKDFLDNEENEDILEDIVLTLTLFEDREMIEERLKTYAHLFDDKVMKQLKRRRYTGWGRLSRKLINGIRDKQSGKTILDFLKSDGFANRNFMQLIHDDSLTFKEDIQKAQVSGQGDSLHEHIANLAGSPAIKKGILQTVKVVDELVKVMGRHKPENIVIEMARENQTTQKGQKNSRERMKRIEEGIKELGSQILKEHPVENTQLQNEKLYLYYLQNGRDMYVDQELDINRLSDYDVDHIVPQSFLKDDSIDNKVLTRSDKARGKSDNVPSEEVVKKMKNYWRQLLNAKLITQRKFDNLTKAERGGLSELDKAGFIKRQLVETRQITKHVAQILDSRMNTKYDENDKLIREVKVITLKSKLVSDFRKDFQFYKVREINNYHHAHDAYLNAVVGTALIKKYPKLESEFVYGDYKVYDVRKMIAKSEQEIGKATAKYFFYSNIMNFFKTEITLANGEIRKRPLIETNGETGEIVWDKGRDFATVRKVLSMPQVNIVKKTEVQTGGFSKESILPKRNSDKLIARKKDWDPKKYGGFDSPTVAYSVLVVAKVEKGKSKKLKSVKELLGITIMERSSFEKNPIDFLEAKGYKEVKKDLIIKLPKYSLFELENGRKRMLASAGELQKGNELALPSKYVNFLYLASHYEKLKGSPEDNEQKQLFVEQHKHYLDEIIEQISEFSKRVILADANLDKVLSAYNKHRDKPIREQAENIIHLFTLTNLGAPAAFKYFDTTIDRKRYTSTKEVLDATLIHQSITGLYETRIDLSQLGGDGGGSSEAAAKGGTLNLEDEYRLYETSAEPEVSPGSTWLSDFPQAWAETGGMGLAVRQAPLIIPLKATSTPVSIKQYPMSQEAKLGIKPHIQRLLDQGILVPCQSPWNTPLLPVKKPGTNDYRPVQDLREVNKRVEDIHPTVPNPYNLLSGLPPSHRWYTVLDLKDAFFCLRLHPTSQPLFAFEWRDPGMGISGQLTWTRLPQGFKNSPTLFNEALHRDLADFRIQHPDLILLQYVDDILLAATSELDCQQGTRALLLTLGNLGYRASAKKAQLCQKQVKYLGYLLKEGQRWLTEARKETVMGQPTPKTPRQLREFLGKAGFCRLFIPGFAEMAAPLYPLTKPGTLFNWGPDQQKAYQEIKQALLTAPALGLPDLTKPFELFVDEKQGYAKGVLTQKLGPWRRPVAYLSKKLDPVAAGWPPCLRMVAAIAVLRKDAGKLTMGQPLVILAPHAVEALVKQPPDRWLSNARMTHYQAMLLDTDRVQFGPVVALNPATLLPLPEEGAPHDCLEILAETHGTRPDLTDQPIPDADHTWYTDGSSFLQEGQRKAGAAVTTETEVIWARALPAGTSAQRAELIALTQALKMAEGKRLNVYTDSRYAFATAHIHGEIYRRRGWLTSEGREIKNKSEILALLKALFLPKRLSIIHCLGHQKGDSAEARGNRLADQAAREAAIKTPPDTSTLLAGKRTADGSEFEKRTADGSEFESPKKKAKVE

SEQ ID NO: 1892 - protein, 2094 aa, synthetic construct
MPAAKRVKLDGGDKKYSIGLDIGTNSVGWAVITDEYKVPSKKFKVLGNTDRHSIKKNLIGALLFDSGETAEATRLKRTARRRYTRRKNRICYLQEIFSNEMAKVDDSFFHRLEESFLVEEDKKHERHPIFGNIVDEVAYHEKYPTIYHLRKKLVDSTDKADLRLIYLALAHMIKFRGHFLIEGDLNPDNSDVDKLFIQLVQTYNQLFEENPINASGVDAKAILSARLSKSRRLENLIAQLPGEKKNGLFGNLIALSLGLTPNFKSNFDLAEDAKLQLSKDTYDDDLDNLLAQIGDQYADLFLAAKNLSDAILLSDILRVNTEITKAPLSASMIKRYDEHHQDLTLLKALVRQQLPEKYKEIFFDQSKNGYAGYIDGGASQEEFYKFIKPILEKMDGTEELLVKLNREDLLRKQRTFDNGSIPHQIHLGELHAILRRQEDFYPFLKDNREKIEKILTFRIPYYVGPLARGNSRFAWMTRKSEETITPWNFEEVVDKGASAQSFIERMTNFDKNLPNEKVLPKHSLLYEYFTVYNELTKVKYVTEGMRKPAFLSGEQKKAIVDLLFKTNRKVTVKQLKEDYFKKIECFDSVEISGVEDRFNASLGTYHDLLKIIKDKDFLDNEENEDILEDIVLTLTLFEDREMIEERLKTYAHLFDDKVMKQLKRRRYTGWGRLSRKLINGIRDKQSGKTILDFLKSDGFANRNFMQLIHDDSLTFKEDIQKAQVSGQGDSLHEHIANLAGSPAIKKGILQTVKVVDELVKVMGRHKPENIVIEMARENQTTQKGQKNSRERMKRIEEGIKELGSQILKEHPVENTQLQNEKLYLYYLQNGRDMYVDQELDINRLSDYDVDHIVPQSFLKDDSIDNKVLTRSDKARGKSDNVPSEEVVKKMKNYWRQLLNAKLITQRKFDNLTKAERGGLSELDKAGFIKRQLVETRQITKHVAQILDSRMNTKYDENDKLIREVKVITLKSKLVSDFRKDFQFYKVREINNYHHAHDAYLNAVVGTALIKKYPKLESEFVYGDYKVYDVRKMIAKSEQEIGKATAKYFFYSNIMNFFKTEITLANGEIRKRPLIETNGETGEIVWDKGRDFATVRKVLSMPQVNIVKKTEVQTGGFSKESILPKRNSDKLIARKKDWDPKKYGGFDSPTVAYSVLVVAKVEKGKSKKLKSVKELLGITIMERSSFEKNPIDFLEAKGYKEVKKDLIIKLPKYSLFELENGRKRMLASAGELQKGNELALPSKYVNFLYLASHYEKLKGSPEDNEQKQLFVEQHKHYLDEIIEQISEFSKRVILADANLDKVLSAYNKHRDKPIREQAENIIHLFTLTNLGAPAAFKYFDTTIDRKRYTSTKEVLDATLIHQSITGLYETRIDLSQLGGDGGGGGPAPGGSGGTLNLEDEYRLYETSAEPEVSPGSTWLSDFPQAWAETGGMGLAVRQAPLIIPLKATSTPVSIKQYPMSQEAKLGIKPHIQRLLDQGILVPCQSPWNTPLLPVKKPGTNDYRPVQDLREVNKRVEDIHPTVPNPYNLLSGLPPSHRWYTVLDLKDAFFCLRLHPTSQPLFAFEWRDPGMGISGQLTWTRLPQGFKNSPTLFNEALHRDLADFRIQHPDLILLQYVDDILLAATSELDCQQGTRALLLTLGNLGYRASAKKAQLCQKQVKYLGYLLKEGQRWLTEARKETVMGQPTPKTPRQLREFLGKAGFCRLFIPGFAEMAAPLYPLTKPGTLFNWGPDQQKAYQEIKQALLTAPALGLPDLTKPFELFVDEKQGYAKGVLTQKLGPWRRPVAYLSKKLDPVAAGWPPCLRMVAAIAVLRKDAGKLTMGQPLVILAPHAVEALVKQPPDRWLSNARMTHYQAMLLDTDRVQFGPVVALNPATLLPLPEEGAPHDCLEILAETHGTRPDLTDQPIPDADHTWYTDGSSFLQEGQRKAGAAVTTETEVIWARALPAGTSAQRAELIALTQALKMAEGKRLNVYTDSRYAFATAHIHGEIYRRRGWLTSEGREIKNKSEILALLKALFLPKRLSIIHCLGHQKGDSAEARGNRLADQAAREAAIKTPPDTSTLLAGKRTADGSEFEKRTADGSEFESPKKKAKVE

SEQ ID NO: 1893 - protein, 2094 aa, synthetic construct
MPAAKRVKLDGGDKKYSIGLDIGTNSVGWAVITDEYKVPSKKFKVLGNTDRHSIKKNLIGALLFDSGETAEATRLKRTARRRYTRRKNRICYLQEIFSNEMAKVDDSFFHRLEESFLVEEDKKHERHPIFGNIVDEVAYHEKYPTIYHLRKKLVDSTDKADLRLIYLALAHMIKFRGHFLIEGDLNPDNSDVDKLFIQLVQTYNQLFEENPINASGVDAKAILSARLSKSRRLENLIAQLPGEKKNGLFGNLIALSLGLTPNFKSNFDLAEDAKLQLSKDTYDDDLDNLLAQIGDQYADLFLAAKNLSDAILLSDILRVNTEITKAPLSASMIKRYDEHHQDLTLLKALVRQQLPEKYKEIFFDQSKNGYAGYIDGGASQEEFYKFIKPILEKMDGTEELLVKLNREDLLRKQRTFDNGSIPHQIHLGELHAILRRQEDFYPFLKDNREKIEKILTFRIPYYVGPLARGNSRFAWMTRKSEETITPWNFEEVVDKGASAQSFIERMTNFDKNLPNEKVLPKHSLLYEYFTVYNELTKVKYVTEGMRKPAFLSGEQKKAIVDLLFKTNRKVTVKQLKEDYFKKIECFDSVEISGVEDRFNASLGTYHDLLKIIKDKDFLDNEENEDILEDIVLTLTLFEDREMIEERLKTYAHLFDDKVMKQLKRRRYTGWGRLSRKLINGIRDKQSGKTILDFLKSDGFANRNFMQLIHDDSLTFKEDIQKAQVSGQGDSLHEHIANLAGSPAIKKGILQTVKVVDELVKVMGRHKPENIVIEMARENQTTQKGQKNSRERMKRIEEGIKELGSQILKEHPVENTQLQNEKLYLYYLQNGRDMYVDQELDINRLSDYDVDHIVPQSFLKDDSIDNKVLTRSDKARGKSDNVPSEEVVKKMKNYWRQLLNAKLITQRKFDNLTKAERGGLSELDKAGFIKRQLVETRQITKHVAQILDSRMNTKYDENDKLIREVKVITLKSKLVSDFRKDFQFYKVREINNYHHAHDAYLNAVVGTALIKKYPKLESEFVYGDYKVYDVRKMIAKSEQEIGKATAKYFFYSNIMNFFKTEITLANGEIRKRPLIETNGETGEIVWDKGRDFATVRKVLSMPQVNIVKKTEVQTGGFSKESILPKRNSDKLIARKKDWDPKKYGGFDSPTVAYSVLVVAKVEKGKSKKLKSVKELLGITIMERSSFEKNPIDFLEAKGYKEVKKDLIIKLPKYSLFELENGRKRMLASAGELQKGNELALPSKYVNFLYLASHYEKLKGSPEDNEQKQLFVEQHKHYLDEIIEQISEFSKRVILADANLDKVLSAYNKHRDKPIREQAENIIHLFTLTNLGAPAAFKYFDTTIDRKRYTSTKEVLDATLIHQSITGLYETRIDLSQLGGDGGPAPGGGGSSGGTLNLEDEYRLYETSAEPEVSPGSTWLSDFPQAWAETGGMGLAVRQAPLIIPLKATSTPVSIKQYPMSQEAKLGIKPHIQRLLDQGILVPCQSPWNTPLLPVKKPGTNDYRPVQDLREVNKRVEDIHPTVPNPYNLLSGLPPSHRWYTVLDLKDAFFCLRLHPTSQPLFAFEWRDPGMGISGQLTWTRLPQGFKNSPTLFNEALHRDLADFRIQHPDLILLQYVDDILLAATSELDCQQGTRALLLTLGNLGYRASAKKAQLCQKQVKYLGYLLKEGQRWLTEARKETVMGQPTPKTPRQLREFLGKAGFCRLFIPGFAEMAAPLYPLTKPGTLFNWGPDQQKAYQEIKQALLTAPALGLPDLTKPFELFVDEKQGYAKGVLTQKLGPWRRPVAYLSKKLDPVAAGWPPCLRMVAAIAVLRKDAGKLTMGQPLVILAPHAVEALVKQPPDRWLSNARMTHYQAMLLDTDRVQFGPVVALNPATLLPLPEEGAPHDCLEILAETHGTRPDLTDQPIPDADHTWYTDGSSFLQEGQRKAGAAVTTETEVIWARALPAGTSAQRAELIALTQALKMAEGKRLNVYTDSRYAFATAHIHGEIYRRRGWLTSEGREIKNKSEILALLKALFLPKRLSIIHCLGHQKGDSAEARGNRLADQAAREAAIKTPPDTSTLLAGKRTADGSEFEKRTADGSEFESPKKKAKVE

SEQ ID NO: 1894 - protein, 2094 aa, synthetic construct
MPAAKRVKLDGGDKKYSIGLDIGTNSVGWAVITDEYKVPSKKFKVLGNTDRHSIKKNLIGALLFDSGETAEATRLKRTARRRYTRRKNRICYLQEIFSNEMAKVDDSFFHRLEESFLVEEDKKHERHPIFGNIVDEVAYHEKYPTIYHLRKKLVDSTDKADLRLIYLALAHMIKFRGHFLIEGDLNPDNSDVDKLFIQLVQTYNQLFEENPINASGVDAKAILSARLSKSRRLENLIAQLPGEKKNGLFGNLIALSLGLTPNFKSNFDLAEDAKLQLSKDTYDDDLDNLLAQIGDQYADLFLAAKNLSDAILLSDILRVNTEITKAPLSASMIKRYDEHHQDLTLLKALVRQQLPEKYKEIFFDQSKNGYAGYIDGGASQEEFYKFIKPILEKMDGTEELLVKLNREDLLRKQRTFDNGSIPHQIHLGELHAILRRQEDFYPFLKDNREKIEKILTFRIPYYVGPLARGNSRFAWMTRKSEETITPWNFEEVVDKGASAQSFIERMTNFDKNLPNEKVLPKHSLLYEYFTVYNELTKVKYVTEGMRKPAFLSGEQKKAIVDLLFKTNRKVTVKQLKEDYFKKIECFDSVEISGVEDRFNASLGTYHDLLKIIKDKDFLDNEENEDILEDIVLTLTLFEDREMIEERLKTYAHLFDDKVMKQLKRRRYTGWGRLSRKLINGIRDKQSGKTILDFLKSDGFANRNFMQLIHDDSLTFKEDIQKAQVSGQGDSLHEHIANLAGSPAIKKGILQTVKVVDELVKVMGRHKPENIVIEMARENQTTQKGQKNSRERMKRIEEGIKELGSQILKEHPVENTQLQNEKLYLYYLQNGRDMYVDQELDINRLSDYDVDHIVPQSFLKDDSIDNKVLTRSDKARGKSDNVPSEEVVKKMKNYWRQLLNAKLITQRKFDNLTKAERGGLSELDKAGFIKRQLVETRQITKHVAQILDSRMNTKYDENDKLIREVKVITLKSKLVSDFRKDFQFYKVREINNYHHAHDAYLNAVVGTALIKKYPKLESEFVYGDYKVYDVRKMIAKSEQEIGKATAKYFFYSNIMNFFKTEITLANGEIRKRPLIETNGETGEIVWDKGRDFATVRKVLSMPQVNIVKKTEVQTGGFSKESILPKRNSDKLIARKKDWDPKKYGGFDSPTVAYSVLVVAKVEKGKSKKLKSVKELLGITIMERSSFEKNPIDFLEAKGYKEVKKDLIIKLPKYSLFELENGRKRMLASAGELQKGNELALPSKYVNFLYLASHYEKLKGSPEDNEQKQLFVEQHKHYLDEIIEQISEFSKRVILADANLDKVLSAYNKHRDKPIREQAENIIHLFTLTNLGAPAAFKYFDTTIDRKRYTSTKEVLDATLIHQSITGLYETRIDLSQLGGDGGGGGGGSGSSGGTLNLEDEYRLYETSAEPEVSPGSTWLSDFPQAWAETGGMGLAVRQAPLIIPLKATSTPVSIKQYPMSQEAKLGIKPHIQRLLDQGILVPCQSPWNTPLLPVKKPGTNDYRPVQDLREVNKRVEDIHPTVPNPYNLLSGLPPSHRWYTVLDLKDAFFCLRLHPTSQPLFAFEWRDPGMGISGQLTWTRLPQGFKNSPTLFNEALHRDLADFRIQHPDLILLQYVDDILLAATSELDCQQGTRALLLTLGNLGYRASAKKAQLCQKQVKYLGYLLKEGQRWLTEARKETVMGQPTPKTPRQLREFLGKAGFCRLFIPGFAEMAAPLYPLTKPGTLFNWGPDQQKAYQEIKQALLTAPALGLPDLTKPFELFVDEKQGYAKGVLTQKLGPWRRPVAYLSKKLDPVAAGWPPCLRMVAAIAVLRKDAGKLTMGQPLVILAPHAVEALVKQPPDRWLSNARMTHYQAMLLDTDRVQFGPVVALNPATLLPLPEEGAPHDCLEILAETHGTRPDLTDQPIPDADHTWYTDGSSFLQEGQRKAGAAVTTETEVIWARALPAGTSAQRAELIALTQALKMAEGKRLNVYTDSRYAFATAHIHGEIYRRRGWLTSEGREIKNKSEILALLKALFLPKRLSIIHCLGHQKGDSAEARGNRLADQAAREAAIKTPPDTSTLLAGKRTADGSEFEKRTADGSEFESPKKKAKVE

SEQ ID NO: 1895 - protein, 2091 aa, synthetic construct
MPAAKRVKLDGGDKKYSIGLDIGTNSVGWAVITDEYKVPSKKFKVLGNTDRHSIKKNLIGALLFDSGETAEATRLKRTARRRYTRRKNRICYLQEIFSNEMAKVDDSFFHRLEESFLVEEDKKHERHPIFGNIVDEVAYHEKYPTIYHLRKKLVDSTDKADLRLIYLALAHMIKFRGHFLIEGDLNPDNSDVDKLFIQLVQTYNQLFEENPINASGVDAKAILSARLSKSRRLENLIAQLPGEKKNGLFGNLIALSLGLTPNFKSNFDLAEDAKLQLSKDTYDDDLDNLLAQIGDQYADLFLAAKNLSDAILLSDILRVNTEITKAPLSASMIKRYDEHHQDLTLLKALVRQQLPEKYKEIFFDQSKNGYAGYIDGGASQEEFYKFIKPILEKMDGTEELLVKLNREDLLRKQRTFDNGSIPHQIHLGELHAILRRQEDFYPFLKDNREKIEKILTFRIPYYVGPLARGNSRFAWMTRKSEETITPWNFEEVVDKGASAQSFIERMTNFDKNLPNEKVLPKHSLLYEYFTVYNELTKVKYVTEGMRKPAFLSGEQKKAIVDLLFKTNRKVTVKQLKEDYFKKIECFDSVEISGVEDRFNASLGTYHDLLKIIKDKDFLDNEENEDILEDIVLTLTLFEDREMIEERLKTYAHLFDDKVMKQLKRRRYTGWGRLSRKLINGIRDKQSGKTILDFLKSDGFANRNFMQLIHDDSLTFKEDIQKAQVSGQGDSLHEHIANLAGSPAIKKGILQTVKVVDELVKVMGRHKPENIVIEMARENQTTQKGQKNSRERMKRIEEGIKELGSQILKEHPVENTQLQNEKLYLYYLQNGRDMYVDQELDINRLSDYDVDHIVPQSFLKDDSIDNKVLTRSDKARGKSDNVPSEEVVKKMKNYWRQLLNAKLITQRKFDNLTKAERGGLSELDKAGFIKRQLVETRQITKHVAQILDSRMNTKYDENDKLIREVKVITLKSKLVSDFRKDFQFYKVREINNYHHAHDAYLNAVVGTALIKKYPKLESEFVYGDYKVYDVRKMIAKSEQEIGKATAKYFFYSNIMNFFKTEITLANGEIRKRPLIETNGETGEIVWDKGRDFATVRKVLSMPQVNIVKKTEVQTGGFSKESILPKRNSDKLIARKKDWDPKKYGGFDSPTVAYSVLVVAKVEKGKSKKLKSVKELLGITIMERSSFEKNPIDFLEAKGYKEVKKDLIIKLPKYSLFELENGRKRMLASAGELQKGNELALPSKYVNFLYLASHYEKLKGSPEDNEQKQLFVEQHKHYLDEIIEQISEFSKRVILADANLDKVLSAYNKHRDKPIREQAENIIHLFTLTNLGAPAAFKYFDTTIDRKRYTSTKEVLDATLIHQSITGLYETRIDLSQLGGDGGPAPGGGGGTLNLEDEYRLYETSAEPEVSPGSTWLSDFPQAWAETGGMGLAVRQAPLIIPLKATSTPVSIKQYPMSQEAKLGIKPHIQRLLDQGILVPCQSPWNTPLLPVKKPGTNDYRPVQDLREVNKRVEDIHPTVPNPYNLLSGLPPSHRWYTVLDLKDAFFCLRLHPTSQPLFAFEWRDPGMGISGQLTWTRLPQGFKNSPTLFNEALHRDLADFRIQHPDLILLQYVDDILLAATSELDCQQGTRALLLTLGNLGYRASAKKAQLCQKQVKYLGYLLKEGQRWLTEARKETVMGQPTPKTPRQLREFLGKAGFCRLFIPGFAEMAAPLYPLTKPGTLFNWGPDQQKAYQEIKQALLTAPALGLPDLTKPFELFVDEKQGYAKGVLTQKLGPWRRPVAYLSKKLDPVAAGWPPCLRMVAAIAVLRKDAGKLTMGQPLVILAPHAVEALVKQPPDRWLSNARMTHYQAMLLDTDRVQFGPVVALNPATLLPLPEEGAPHDCLEILAETHGTRPDLTDQPIPDADHTWYTDGSSFLQEGQRKAGAAVTTETEVIWARALPAGTSAQRAELIALTQALKMAEGKRLNVYTDSRYAFATAHIHGEIYRRRGWLTSEGREIKNKSEILALLKALFLPKRLSIIHCLGHQKGDSAEARGNRLADQAAREAAIKTPPDTSTLLAGKRTADGSEFEKRTADGSEFESPKKKAKVE

SEQ ID NO: 1896 - protein, 2115 aa, synthetic construct
MPAAKRVKLDGGDKKYSIGLDIGTNSVGWAVITDEYKVPSKKFKVLGNTDRHSIKKNLIGALLFDSGETAEATRLKRTARRRYTRRKNRICYLQEIFSNEMAKVDDSFFHRLEESFLVEEDKKHERHPIFGNIVDEVAYHEKYPTIYHLRKKLVDSTDKADLRLIYLALAHMIKFRGHFLIEGDLNPDNSDVDKLFIQLVQTYNQLFEENPINASGVDAKAILSARLSKSRRLENLIAQLPGEKKNGLFGNLIALSLGLTPNFKSNFDLAEDAKLQLSKDTYDDDLDNLLAQIGDQYADLFLAAKNLSDAILLSDILRVNTEITKAPLSASMIKRYDEHHQDLTLLKALVRQQLPEKYKEIFFDQSKNGYAGYIDGGASQEEFYKFIKPILEKMDGTEELLVKLNREDLLRKQRTFDNGSIPHQIHLGELHAILRRQEDFYPFLKDNREKIEKILTFRIPYYVGPLARGNSRFAWMTRKSEETITPWNFEEVVDKGASAQSFIERMTNFDKNLPNEKVLPKHSLLYEYFTVYNELTKVKYVTEGMRKPAFLSGEQKKAIVDLLFKTNRKVTVKQLKEDYFKKIECFDSVEISGVEDRFNASLGTYHDLLKIIKDKDFLDNEENEDILEDIVLTLTLFEDREMIEERLKTYAHLFDDKVMKQLKRRRYTGWGRLSRKLINGIRDKQSGKTILDFLKSDGFANRNFMQLIHDDSLTFKEDIQKAQVSGQGDSLHEHIANLAGSPAIKKGILQTVKVVDELVKVMGRHKPENIVIEMARENQTTQKGQKNSRERMKRIEEGIKELGSQILKEHPVENTQLQNEKLYLYYLQNGRDMYVDQELDINRLSDYDVDHIVPQSFLKDDSIDNKVLTRSDKARGKSDNVPSEEVVKKMKNYWRQLLNAKLITQRKFDNLTKAERGGLSELDKAGFIKRQLVETRQITKHVAQILDSRMNTKYDENDKLIREVKVITLKSKLVSDFRKDFQFYKVREINNYHHAHDAYLNAVVGTALIKKYPKLESEFVYGDYKVYDVRKMIAKSEQEIGKATAKYFFYSNIMNFFKTEITLANGEIRKRPLIETNGETGEIVWDKGRDFATVRKVLSMPQVNIVKKTEVQTGGFSKESILPKRNSDKLIARKKDWDPKKYGGFDSPTVAYSVLVVAKVEKGKSKKLKSVKELLGITIMERSSFEKNPIDFLEAKGYKEVKKDLIIKLPKYSLFELENGRKRMLASAGELQKGNELALPSKYVNFLYLASHYEKLKGSPEDNEQKQLFVEQHKHYLDEIIEQISEFSKRVILADANLDKVLSAYNKHRDKPIREQAENIIHLFTLTNLGAPAAFKYFDTTIDRKRYTSTKEVLDATLIHQSITGLYETRIDLSQLGGDGGEAAAKEAAAKEAAAKEAAAKEAAAKEAAAKGGTLNLEDEYRLYETSAEPEVSPGSTWLSDFPQAWAETGGMGLAVRQAPLIIPLKATSTPVSIKQYPMSQEAKLGIKPHIQRLLDQGILVPCQSPWNTPLLPVKKPGTNDYRPVQDLREVNKRVEDIHPTVPNPYNLLSGLPPSHRWYTVLDLKDAFFCLRLHPTSQPLFAFEWRDPGMGISGQLTWTRLPQGFKNSPTLFNEALHRDLADFRIQHPDLILLQYVDDILLAATSELDCQQGTRALLLTLGNLGYRASAKKAQLCQKQVKYLGYLLKEGQRWLTEARKETVMGQPTPKTPRQLREFLGKAGFCRLFIPGFAEMAAPLYPLTKPGTLFNWGPDQQKAYQEIKQALLTAPALGLPDLTKPFELFVDEKQGYAKGVLTQKLGPWRRPVAYLSKKLDPVAAGWPPCLRMVAAIAVLRKDAGKLTMGQPLVILAPHAVEALVKQPPDRWLSNARMTHYQAMLLDTDRVQFGPVVALNPATLLPLPEEGAPHDCLEILAETHGTRPDLTDQPIPDADHTWYTDGSSFLQEGQRKAGAAVTTETEVIWARALPAGTSAQRAELIALTQALKMAEGKRLNVYTDSRYAFATAHIHGEIYRRRGWLTSEGREIKNKSEILALLKALFLPKRLSIIHCLGHQKGDSAEARGNRLADQAAREAAIKTPPDTSTLLAGKRTADGSEFEKRTADGSEFESPKKKAKVE

SEQ ID NO: 1897 - protein, 2091 aa, synthetic construct
MPAAKRVKLDGGDKKYSIGLDIGTNSVGWAVITDEYKVPSKKFKVLGNTDRHSIKKNLIGALLFDSGETAEATRLKRTARRRYTRRKNRICYLQEIFSNEMAKVDDSFFHRLEESFLVEEDKKHERHPIFGNIVDEVAYHEKYPTIYHLRKKLVDSTDKADLRLIYLALAHMIKFRGHFLIEGDLNPDNSDVDKLFIQLVQTYNQLFEENPINASGVDAKAILSARLSKSRRLENLIAQLPGEKKNGLFGNLIALSLGLTPNFKSNFDLAEDAKLQLSKDTYDDDLDNLLAQIGDQYADLFLAAKNLSDAILLSDILRVNTEITKAPLSASMIKRYDEHHQDLTLLKALVRQQLPEKYKEIFFDQSKNGYAGYIDGGASQEEFYKFIKPILEKMDGTEELLVKLNREDLLRKQRTFDNGSIPHQIHLGELHAILRRQEDFYPFLKDNREKIEKILTFRIPYYVGPLARGNSRFAWMTRKSEETITPWNFEEVVDKGASAQSFIERMTNFDKNLPNEKVLPKHSLLYEYFTVYNELTKVKYVTEGMRKPAFLSGEQKKAIVDLLFKTNRKVTVKQLKEDYFKKIECFDSVEISGVEDRFNASLGTYHDLLKIIKDKDFLDNEENEDILEDIVLTLTLFEDREMIEERLKTYAHLFDDKVMKQLKRRRYTGWGRLSRKLINGIRDKQSGKTILDFLKSDGFANRNFMQLIHDDSLTFKEDIQKAQVSGQGDSLHEHIANLAGSPAIKKGILQTVKVVDELVKVMGRHKPENIVIEMARENQTTQKGQKNSRERMKRIEEGIKELGSQILKEHPVENTQLQNEKLYLYYLQNGRDMYVDQELDINRLSDYDVDHIVPQSFLKDDSIDNKVLTRSDKARGKSDNVPSEEVVKKMKNYWRQLLNAKLITQRKFDNLTKAERGGLSELDKAGFIKRQLVETRQITKHVAQILDSRMNTKYDENDKLIREVKVITLKSKLVSDFRKDFQFYKVREINNYHHAHDAYLNAVVGTALIKKYPKLESEFVYGDYKVYDVRKMIAKSEQEIGKATAKYFFYSNIMNFFKTEITLANGEIRKRPLIETNGETGEIVWDKGRDFATVRKVLSMPQVNIVKKTEVQTGGFSKESILPKRNSDKLIARKKDWDPKKYGGFDSPTVAYSVLVVAKVEKGKSKKLKSVKELLGITIMERSSFEKNPIDFLEAKGYKEVKKDLIIKLPKYSLFELENGRKRMLASAGELQKGNELALPSKYVNFLYLASHYEKLKGSPEDNEQKQLFVEQHKHYLDEIIEQISEFSKRVILADANLDKVLSAYNKHRDKPIREQAENIIHLFTLTNLGAPAAFKYFDTTIDRKRYTSTKEVLDATLIHQSITGLYETRIDLSQLGGDGGGGSGGSGGTLNLEDEYRLYETSAEPEVSPGSTWLSDFPQAWAETGGMGLAVRQAPLIIPLKATSTPVSIKQYPMSQEAKLGIKPHIQRLLDQGILVPCQSPWNTPLLPVKKPGTNDYRPVQDLREVNKRVEDIHPTVPNPYNLLSGLPPSHRWYTVLDLKDAFFCLRLHPTSQPLFAFEWRDPGMGISGQLTWTRLPQGFKNSPTLFNEALHRDLADFRIQHPDLILLQYVDDILLAATSELDCQQGTRALLLTLGNLGYRASAKKAQLCQKQVKYLGYLLKEGQRWLTEARKETVMGQPTPKTPRQLREFLGKAGFCRLFIPGFAEMAAPLYPLTKPGTLFNWGPDQQKAYQEIKQALLTAPALGLPDLTKPFELFVDEKQGYAKGVLTQKLGPWRRPVAYLSKKLDPVAAGWPPCLRMVAAIAVLRKDAGKLTMGQPLVILAPHAVEALVKQPPDRWLSNARMTHYQAMLLDTDRVQFGPVVALNPATLLPLPEEGAPHDCLEILAETHGTRPDLTDQPIPDADHTWYTDGSSFLQEGQRKAGAAVTTETEVIWARALPAGTSAQRAELIALTQALKMAEGKRLNVYTDSRYAFATAHIHGEIYRRRGWLTSEGREIKNKSEILALLKALFLPKRLSIIHCLGHQKGDSAEARGNRLADQAAREAAIKTPPDTSTLLAGKRTADGSEFEKRTADGSEFESPKKKAKVE

SEQ ID NO: 1898 - protein, 2093 aa, synthetic construct
MPAAKRVKLDGGDKKYSIGLDIGTNSVGWAVITDEYKVPSKKFKVLGNTDRHSIKKNLIGALLFDSGETAEATRLKRTARRRYTRRKNRICYLQEIFSNEMAKVDDSFFHRLEESFLVEEDKKHERHPIFGNIVDEVAYHEKYPTIYHLRKKLVDSTDKADLRLIYLALAHMIKFRGHFLIEGDLNPDNSDVDKLFIQLVQTYNQLFEENPINASGVDAKAILSARLSKSRRLENLIAQLPGEKKNGLFGNLIALSLGLTPNFKSNFDLAEDAKLQLSKDTYDDDLDNLLAQIGDQYADLFLAAKNLSDAILLSDILRVNTEITKAPLSASMIKRYDEHHQDLTLLKALVRQQLPEKYKEIFFDQSKNGYAGYIDGGASQEEFYKFIKPILEKMDGTEELLVKLNREDLLRKQRTFDNGSIPHQIHLGELHAILRRQEDFYPFLKDNREKIEKILTFRIPYYVGPLARGNSRFAWMTRKSEETITPWNFEEVVDKGASAQSFIERMTNFDKNLPNEKVLPKHSLLYEYFTVYNELTKVKYVTEGMRKPAFLSGEQKKAIVDLLFKTNRKVTVKQLKEDYFKKIECFDSVEISGVEDRFNASLGTYHDLLKIIKDKDFLDNEENEDILEDIVLTLTLFEDREMIEERLKTYAHLFDDKVMKQLKRRRYTGWGRLSRKLINGIRDKQSGKTILDFLKSDGFANRNFMQLIHDDSLTFKEDIQKAQVSGQGDSLHEHIANLAGSPAIKKGILQTVKVVDELVKVMGRHKPENIVIEMARENQTTQKGQKNSRERMKRIEEGIKELGSQILKEHPVENTQLQNEKLYLYYLQNGRDMYVDQELDINRLSDYDVDHIVPQSFLKDDSIDNKVLTRSDKARGKSDNVPSEEVVKKMKNYWRQLLNAKLITQRKFDNLTKAERGGLSELDKAGFIKRQLVETRQITKHVAQILDSRMNTKYDENDKLIREVKVITLKSKLVSDFRKDFQFYKVREINNYHHAHDAYLNAVVGTALIKKYPKLESEFVYGDYKVYDVRKMIAKSEQEIGKATAKYFFYSNIMNFFKTEITLANGEIRKRPLIETNGETGEIVWDKGRDFATVRKVLSMPQVNIVKKTEVQTGGFSKESILPKRNSDKLIARKKDWDPKKYGGFDSPTVAYSVLVVAKVEKGKSKKLKSVKELLGITIMERSSFEKNPIDFLEAKGYKEVKKDLIIKLPKYSLFELENGRKRMLASAGELQKGNELALPSKYVNFLYLASHYEKLKGSPEDNEQKQLFVEQHKHYLDEIIEQISEFSKRVILADANLDKVLSAYNKHRDKPIREQAENIIHLFTLTNLGAPAAFKYFDTTIDRKRYTSTKEVLDATLIHQSITGLYETRIDLSQLGGDGGEAAAKGSSGGTLNLEDEYRLYETSAEPEVSPGSTWLSDFPQAWAETGGMGLAVRQAPLIIPLKATSTPVSIKQYPMSQEAKLGIKPHIQRLLDQGILVPCQSPWNTPLLPVKKPGTNDYRPVQDLREVNKRVEDIHPTVPNPYNLLSGLPPSHRWYTVLDLKDAFFCLRLHPTSQPLFAFEWRDPGMGISGQLTWTRLPQGFKNSPTLFNEALHRDLADFRIQHPDLILLQYVDDILLAATSELDCQQGTRALLLTLGNLGYRASAKKAQLCQKQVKYLGYLLKEGQRWLTEARKETVMGQPTPKTPRQLREFLGKAGFCRLFIPGFAEMAAPLYPLTKPGTLFNWGPDQQKAYQEIKQALLTAPALGLPDLTKPFELFVDEKQGYAKGVLTQKLGPWRRPVAYLSKKLDPVAAGWPPCLRMVAAIAVLRKDAGKLTMGQPLVILAPHAVEALVKQPPDRWLSNARMTHYQAMLLDTDRVQFGPVVALNPATLLPLPEEGAPHDCLEILAETHGTRPDLTDQPIPDADHTWYTDGSSFLQEGQRKAGAAVTTETEVIWARALPAGTSAQRAELIALTQALKMAEGKRLNVYTDSRYAFATAHIHGEIYRRRGWLTSEGREIKNKSEILALLKALFLPKRLSIIHCLGHQKGDSAEARGNRLADQAAREAAIKTPPDTSTLLAGKRTADGSEFEKRTADGSEFESPKKKAKVE

SEQ ID NO: 1899 - protein, 2094 aa, synthetic construct
MPAAKRVKLDGGDKKYSIGLDIGTNSVGWAVITDEYKVPSKKFKVLGNTDRHSIKKNLIGALLFDSGETAEATRLKRTARRRYTRRKNRICYLQEIFSNEMAKVDDSFFHRLEESFLVEEDKKHERHPIFGNIVDEVAYHEKYPTIYHLRKKLVDSTDKADLRLIYLALAHMIKFRGHFLIEGDLNPDNSDVDKLFIQLVQTYNQLFEENPINASGVDAKAILSARLSKSRRLENLIAQLPGEKKNGLFGNLIALSLGLTPNFKSNFDLAEDAKLQLSKDTYDDDLDNLLAQIGDQYADLFLAAKNLSDAILLSDILRVNTEITKAPLSASMIKRYDEHHQDLTLLKALVRQQLPEKYKEIFFDQSKNGYAGYIDGGASQEEFYKFIKPILEKMDGTEELLVKLNREDLLRKQRTFDNGSIPHQIHLGELHAILRRQEDFYPFLKDNREKIEKILTFRIPYYVGPLARGNSRFAWMTRKSEETITPWNFEEVVDKGASAQSFIERMTNFDKNLPNEKVLPKHSLLYEYFTVYNELTKVKYVTEGMRKPAFLSGEQKKAIVDLLFKTNRKVTVKQLKEDYFKKIECFDSVEISGVEDRFNASLGTYHDLLKIIKDKDFLDNEENEDILEDIVLTLTLFEDREMIEERLKTYAHLFDDKVMKQLKRRRYTGWGRLSRKLINGIRDKQSGKTILDFLKSDGFANRNFMQLIHDDSLTFKEDIQKAQVSGQGDSLHEHIANLAGSPAIKKGILQTVKVVDELVKVMGRHKPENIVIEMARENQTTQKGQKNSRERMKRIEEGIKELGSQILKEHPVENTQLQNEKLYLYYLQNGRDMYVDQELDINRLSDYDVDHIVPQSFLKDDSIDNKVLTRSDKARGKSDNVPSEEVVKKMKNYWRQLLNAKLITQRKFDNLTKAERGGLSELDKAGFIKRQLVETRQITKHVAQILDSRMNTKYDENDKLIREVKVITLKSKLVSDFRKDFQFYKVREINNYHHAHDAYLNAVVGTALIKKYPKLESEFVYGDYKVYDVRKMIAKSEQEIGKATAKYFFYSNIMNFFKTEITLANGEIRKRPLIETNGETGEIVWDKGRDFATVRKVLSMPQVNIVKKTEVQTGGFSKESILPKRNSDKLIARKKDWDPKKYGGFDSPTVAYSVLVVAKVEKGKSKKLKSVKELLGITIMERSSFEKNPIDFLEAKGYKEVKKDLIIKLPKYSLFELENGRKRMLASAGELQKGNELALPSKYVNFLYLASHYEKLKGSPEDNEQKQLFVEQHKHYLDEIIEQISEFSKRVILADANLDKVLSAYNKHRDKPIREQAENIIHLFTLTNLGAPAAFKYFDTTIDRKRYTSTKEVLDATLIHQSITGLYETRIDLSQLGGDGGGGSPAPGGGGGTLNLEDEYRLYETSAEPEVSPGSTWLSDFPQAWAETGGMGLAVRQAPLIIPLKATSTPVSIKQYPMSQEAKLGIKPHIQRLLDQGILVPCQSPWNTPLLPVKKPGTNDYRPVQDLREVNKRVEDIHPTVPNPYNLLSGLPPSHRWYTVLDLKDAFFCLRLHPTSQPLFAFEWRDPGMGISGQLTWTRLPQGFKNSPTLFNEALHRDLADFRIQHPDLILLQYVDDILLAATSELDCQQGTRALLLTLGNLGYRASAKKAQLCQKQVKYLGYLLKEGQRWLTEARKETVMGQPTPKTPRQLREFLGKAGFCRLFIPGFAEMAAPLYPLTKPGTLFNWGPDQQKAYQEIKQALLTAPALGLPDLTKPFELFVDEKQGYAKGVLTQKLGPWRRPVAYLSKKLDPVAAGWPPCLRMVAAIAVLRKDAGKLTMGQPLVILAPHAVEALVKQPPDRWLSNARMTHYQAMLLDTDRVQFGPVVALNPATLLPLPEEGAPHDCLEILAETHGTRPDLTDQPIPDADHTWYTDGSSFLQEGQRKAGAAVTTETEVIWARALPAGTSAQRAELIALTQALKMAEGKRLNVYTDSRYAFATAHIHGEIYRRRGWLTSEGREIKNKSEILALLKALFLPKRLSIIHCLGHQKGDSAEARGNRLADQAAREAAIKTPPDTSTLLAGKRTADGSEFEKRTADGSEFESPKKKAKVE

SEQ ID NO: 1900 - protein, 2091 aa, synthetic construct
MPAAKRVKLDGGDKKYSIGLDIGTNSVGWAVITDEYKVPSKKFKVLGNTDRHSIKKNLIGALLFDSGETAEATRLKRTARRRYTRRKNRICYLQEIFSNEMAKVDDSFFHRLEESFLVEEDKKHERHPIFGNIVDEVAYHEKYPTIYHLRKKLVDSTDKADLRLIYLALAHMIKFRGHFLIEGDLNPDNSDVDKLFIQLVQTYNQLFEENPINASGVDAKAILSARLSKSRRLENLIAQLPGEKKNGLFGNLIALSLGLTPNFKSNFDLAEDAKLQLSKDTYDDDLDNLLAQIGDQYADLFLAAKNLSDAILLSDILRVNTEITKAPLSASMIKRYDEHHQDLTLLKALVRQQLPEKYKEIFFDQSKNGYAGYIDGGASQEEFYKFIKPILEKMDGTEELLVKLNREDLLRKQRTFDNGSIPHQIHLGELHAILRRQEDFYPFLKDNREKIEKILTFRIPYYVGPLARGNSRFAWMTRKSEETITPWNFEEVVDKGASAQSFIERMTNFDKNLPNEKVLPKHSLLYEYFTVYNELTKVKYVTEGMRKPAFLSGEQKKAIVDLLFKTNRKVTVKQLKEDYFKKIECFDSVEISGVEDRFNASLGTYHDLLKIIKDKDFLDNEENEDILEDIVLTLTLFEDREMIEERLKTYAHLFDDKVMKQLKRRRYTGWGRLSRKLINGIRDKQSGKTILDFLKSDGFANRNFMQLIHDDSLTFKEDIQKAQVSGQGDSLHEHIANLAGSPAIKKGILQTVKVVDELVKVMGRHKPENIVIEMARENQTTQKGQKNSRERMKRIEEGIKELGSQILKEHPVENTQLQNEKLYLYYLQNGRDMYVDQELDINRLSDYDVDHIVPQSFLKDDSIDNKVLTRSDKARGKSDNVPSEEVVKKMKNYWRQLLNAKLITQRKFDNLTKAERGGLSELDKAGFIKRQLVETRQITKHVAQILDSRMNTKYDENDKLIREVKVITLKSKLVSDFRKDFQFYKVREINNYHHAHDAYLNAVVGTALIKKYPKLESEFVYGDYKVYDVRKMIAKSEQEIGKATAKYFFYSNIMNFFKTEITLANGEIRKRPLIETNGETGEIVWDKGRDFATVRKVLSMPQVNIVKKTEVQTGGFSKESILPKRNSDKLIARKKDWDPKKYGGFDSPTVAYSVLVVAKVEKGKSKKLKSVKELLGITIMERSSFEKNPIDFLEAKGYKEVKKDLIIKLPKYSLFELENGRKRMLASAGELQKGNELALPSKYVNFLYLASHYEKLKGSPEDNEQKQLFVEQHKHYLDEIIEQISEFSKRVILADANLDKVLSAYNKHRDKPIREQAENIIHLFTLTNLGAPAAFKYFDTTIDRKRYTSTKEVLDATLIHQSITGLYETRIDLSQLGGDGGPAPGSSGGTLNLEDEYRLYETSAEPEVSPGSTWLSDFPQAWAETGGMGLAVRQAPLIIPLKATSTPVSIKQYPMSQEAKLGIKPHIQRLLDQGILVPCQSPWNTPLLPVKKPGTNDYRPVQDLREVNKRVEDIHPTVPNPYNLLSGLPPSHRWYTVLDLKDAFFCLRLHPTSQPLFAFEWRDPGMGISGQLTWTRLPQGFKNSPTLFNEALHRDLADFRIQHPDLILLQYVDDILLAATSELDCQQGTRALLLTLGNLGYRASAKKAQLCQKQVKYLGYLLKEGQRWLTEARKETVMGQPTPKTPRQLREFLGKAGFCRLFIPGFAEMAAPLYPLTKPGTLFNWGPDQQKAYQEIKQALLTAPALGLPDLTKPFELFVDEKQGYAKGVLTQKLGPWRRPVAYLSKKLDPVAAGWPPCLRMVAAIAVLRKDAGKLTMGQPLVILAPHAVEALVKQPPDRWLSNARMTHYQAMLLDTDRVQFGPVVALNPATLLPLPEEGAPHDCLEILAETHGTRPDLTDQPIPDADHTWYTDGSSFLQEGQRKAGAAVTTETEVIWARALPAGTSAQRAELIALTQALKMAEGKRLNVYTDSRYAFATAHIHGEIYRRRGWLTSEGREIKNKSEILALLKALFLPKRLSIIHCLGHQKGDSAEARGNRLADQAAREAAIKTPPDTSTLLAGKRTADGSEFEKRTADGSEFESPKKKAKVE

SEQ ID NO: 1901 - protein, 2096 aa, synthetic construct
MPAAKRVKLDGGDKKYSIGLDIGTNSVGWAVITDEYKVPSKKFKVLGNTDRHSIKKNLIGALLFDSGETAEATRLKRTARRRYTRRKNRICYLQEIFSNEMAKVDDSFFHRLEESFLVEEDKKHERHPIFGNIVDEVAYHEKYPTIYHLRKKLVDSTDKADLRLIYLALAHMIKFRGHFLIEGDLNPDNSDVDKLFIQLVQTYNQLFEENPINASGVDAKAILSARLSKSRRLENLIAQLPGEKKNGLFGNLIALSLGLTPNFKSNFDLAEDAKLQLSKDTYDDDLDNLLAQIGDQYADLFLAAKNLSDAILLSDILRVNTEITKAPLSASMIKRYDEHHQDLTLLKALVRQQLPEKYKEIFFDQSKNGYAGYIDGGASQEEFYKFIKPILEKMDGTEELLVKLNREDLLRKQRTFDNGSIPHQIHLGELHAILRRQEDFYPFLKDNREKIEKILTFRIPYYVGPLARGNSRFAWMTRKSEETITPWNFEEVVDKGASAQSFIERMTNFDKNLPNEKVLPKHSLLYEYFTVYNELTKVKYVTEGMRKPAFLSGEQKKAIVDLLFKTNRKVTVKQLKEDYFKKIECFDSVEISGVEDRFNASLGTYHDLLKIIKDKDFLDNEENEDILEDIVLTLTLFEDREMIEERLKTYAHLFDDKVMKQLKRRRYTGWGRLSRKLINGIRDKQSGKTILDFLKSDGFANRNFMQLIHDDSLTFKEDIQKAQVSGQGDSLHEHIANLAGSPAIKKGILQTVKVVDELVKVMGRHKPENIVIEMARENQTTQKGQKNSRERMKRIEEGIKELGSQILKEHPVENTQLQNEKLYLYYLQNGRDMYVDQELDINRLSDYDVDHIVPQSFLKDDSIDNKVLTRSDKARGKSDNVPSEEVVKKMKNYWRQLLNAKLITQRKFDNLTKAERGGLSELDKAGFIKRQLVETRQITKHVAQILDSRMNTKYDENDKLIREVKVITLKSKLVSDFRKDFQFYKVREINNYHHAHDAYLNAVVGTALIKKYPKLESEFVYGDYKVYDVRKMIAKSEQEIGKATAKYFFYSNIMNFFKTEITLANGEIRKRPLIETNGETGEIVWDKGRDFATVRKVLSMPQVNIVKKTEVQTGGFSKESILPKRNSDKLIARKKDWDPKKYGGFDSPTVAYSVLVVAKVEKGKSKKLKSVKELLGITIMERSSFEKNPIDFLEAKGYKEVKKDLIIKLPKYSLFELENGRKRMLASAGELQKGNELALPSKYVNFLYLASHYEKLKGSPEDNEQKQLFVEQHKHYLDEIIEQISEFSKRVILADANLDKVLSAYNKHRDKPIREQAENIIHLFTLTNLGAPAAFKYFDTTIDRKRYTSTKEVLDATLIHQSITGLYETRIDLSQLGGDGGGSSGGSEAAAKGGTLNLEDEYRLYETSAEPEVSPGSTWLSDFPQAWAETGGMGLAVRQAPLIIPLKATSTPVSIKQYPMSQEAKLGIKPHIQRLLDQGILVPCQSPWNTPLLPVKKPGTNDYRPVQDLREVNKRVEDIHPTVPNPYNLLSGLPPSHRWYTVLDLKDAFFCLRLHPTSQPLFAFEWRDPGMGISGQLTWTRLPQGFKNSPTLFNEALHRDLADFRIQHPDLILLQYVDDILLAATSELDCQQGTRALLLTLGNLGYRASAKKAQLCQKQVKYLGYLLKEGQRWLTEARKETVMGQPTPKTPRQLREFLGKAGFCRLFIPGFAEMAAPLYPLTKPGTLFNWGPDQQKAYQEIKQALLTAPALGLPDLTKPFELFVDEKQGYAKGVLTQKLGPWRRPVAYLSKKLDPVAAGWPPCLRMVAAIAVLRKDAGKLTMGQPLVILAPHAVEALVKQPPDRWLSNARMTHYQAMLLDTDRVQFGPVVALNPATLLPLPEEGAPHDCLEILAETHGTRPDLTDQPIPDADHTWYTDGSSFLQEGQRKAGAAVTTETEVIWARALPAGTSAQRAELIALTQALKMAEGKRLNVYTDSRYAFATAHIHGEIYRRRGWLTSEGREIKNKSEILALLKALFLPKRLSIIHCLGHQKGDSAEARGNRLADQAAREAAIKTPPDTSTLLAGKRTADGSEFEKRTADGSEFESPKKKAKVE

SEQ ID NO: 1902 - protein, 2094 aa, synthetic construct
MPAAKRVKLDGGDKKYSIGLDIGTNSVGWAVITDEYKVPSKKFKVLGNTDRHSIKKNLIGALLFDSGETAEATRLKRTARRRYTRRKNRICYLQEIFSNEMAKVDDSFFHRLEESFLVEEDKKHERHPIFGNIVDEVAYHEKYPTIYHLRKKLVDSTDKADLRLIYLALAHMIKFRGHFLIEGDLNPDNSDVDKLFIQLVQTYNQLFEENPINASGVDAKAILSARLSKSRRLENLIAQLPGEKKNGLFGNLIALSLGLTPNFKSNFDLAEDAKLQLSKDTYDDDLDNLLAQIGDQYADLFLAAKNLSDAILLSDILRVNTEITKAPLSASMIKRYDEHHQDLTLLKALVRQQLPEKYKEIFFDQSKNGYAGYIDGGASQEEFYKFIKPILEKMDGTEELLVKLNREDLLRKQRTFDNGSIPHQIHLGELHAILRRQEDFYPFLKDNREKIEKILTFRIPYYVGPLARGNSRFAWMTRKSEETITPWNFEEVVDKGASAQSFIERMTNFDKNLPNEKVLPKHSLLYEYFTVYNELTKVKYVTEGMRKPAFLSGEQKKAIVDLLFKTNRKVTVKQLKEDYFKKIECFDSVEISGVEDRFNASLGTYHDLLKIIKDKDFLDNEENEDILEDIVLTLTLFEDREMIEERLKTYAHLFDDKVMKQLKRRRYTGWGRLSRKLINGIRDKQSGKTILDFLKSDGFANRNFMQLIHDDSLTFKEDIQKAQVSGQGDSLHEHIANLAGSPAIKKGILQTVKVVDELVKVMGRHKPENIVIEMARENQTTQKGQKNSRERMKRIEEGIKELGSQILKEHPVENTQLQNEKLYLYYLQNGRDMYVDQELDINRLSDYDVDHIVPQSFLKDDSIDNKVLTRSDKARGKSDNVPSEEVVKKMKNYWRQLLNAKLITQRKFDNLTKAERGGLSELDKAGFIKRQLVETRQITKHVAQILDSRMNTKYDENDKLIREVKVITLKSKLVSDFRKDFQFYKVREINNYHHAHDAYLNAVVGTALIKKYPKLESEFVYGDYKVYDVRKMIAKSEQEIGKATAKYFFYSNIMNFFKTEITLANGEIRKRPLIETNGETGEIVWDKGRDFATVRKVLSMPQVNIVKKTEVQTGGFSKESILPKRNSDKLIARKKDWDPKKYGGFDSPTVAYSVLVVAKVEKGKSKKLKSVKELLGITIMERSSFEKNPIDFLEAKGYKEVKKDLIIKLPKYSLFELENGRKRMLASAGELQKGNELALPSKYVNFLYLASHYEKLKGSPEDNEQKQLFVEQHKHYLDEIIEQISEFSKRVILADANLDKVLSAYNKHRDKPIREQAENIIHLFTLTNLGAPAAFKYFDTTIDRKRYTSTKEVLDATLIHQSITGLYETRIDLSQLGGDGGPAPGGSGSSGGTLNLEDEYRLYETSAEPEVSPGSTWLSDFPQAWAETGGMGLAVRQAPLIIPLKATSTPVSIKQYPMSQEAKLGIKPHIQRLLDQGILVPCQSPWNTPLLPVKKPGTNDYRPVQDLREVNKRVEDIHPTVPNPYNLLSGLPPSHRWYTVLDLKDAFFCLRLHPTSQPLFAFEWRDPGMGISGQLTWTRLPQGFKNSPTLFNEALHRDLADFRIQHPDLILLQYVDDILLAATSELDCQQGTRALLLTLGNLGYRASAKKAQLCQKQVKYLGYLLKEGQRWLTEARKETVMGQPTPKTPRQLREFLGKAGFCRLFIPGFAEMAAPLYPLTKPGTLFNWGPDQQKAYQEIKQALLTAPALGLPDLTKPFELFVDEKQGYAKGVLTQKLGPWRRPVAYLSKKLDPVAAGWPPCLRMVAAIAVLRKDAGKLTMGQPLVILAPHAVEALVKQPPDRWLSNARMTHYQAMLLDTDRVQFGPVVALNPATLLPLPEEGAPHDCLEILAETHGTRPDLTDQPIPDADHTWYTDGSSFLQEGQRKAGAAVTTETEVIWARALPAGTSAQRAELIALTQALKMAEGKRLNVYTDSRYAFATAHIHGEIYRRRGWLTSEGREIKNKSEILALLKALFLPKRLSIIHCLGHQKGDSAEARGNRLADQAAREAAIKTPPDTSTLLAGKRTADGSEFEKRTADGSEFESPKKKAKVE

SEQ ID NO: 1903 - protein, 2094 aa, synthetic construct
MPAAKRVKLDGGDKKYSIGLDIGTNSVGWAVITDEYKVPSKKFKVLGNTDRHSIKKNLIGALLFDSGETAEATRLKRTARRRYTRRKNRICYLQEIFSNEMAKVDDSFFHRLEESFLVEEDKKHERHPIFGNIVDEVAYHEKYPTIYHLRKKLVDSTDKADLRLIYLALAHMIKFRGHFLIEGDLNPDNSDVDKLFIQLVQTYNQLFEENPINASGVDAKAILSARLSKSRRLENLIAQLPGEKKNGLFGNLIALSLGLTPNFKSNFDLAEDAKLQLSKDTYDDDLDNLLAQIGDQYADLFLAAKNLSDAILLSDILRVNTEITKAPLSASMIKRYDEHHQDLTLLKALVRQQLPEKYKEIFFDQSKNGYAGYIDGGASQEEFYKFIKPILEKMDGTEELLVKLNREDLLRKQRTFDNGSIPHQIHLGELHAILRRQEDFYPFLKDNREKIEKILTFRIPYYVGPLARGNSRFAWMTRKSEETITPWNFEEVVDKGASAQSFIERMTNFDKNLPNEKVLPKHSLLYEYFTVYNELTKVKYVTEGMRKPAFLSGEQKKAIVDLLFKTNRKVTVKQLKEDYFKKIECFDSVEISGVEDRFNASLGTYHDLLKIIKDKDFLDNEENEDILEDIVLTLTLFEDREMIEERLKTYAHLFDDKVMKQLKRRRYTGWGRLSRKLINGIRDKQSGKTILDFLKSDGFANRNFMQLIHDDSLTFKEDIQKAQVSGQGDSLHEHIANLAGSPAIKKGILQTVKVVDELVKVMGRHKPENIVIEMARENQTTQKGQKNSRERMKRIEEGIKELGSQILKEHPVENTQLQNEKLYLYYLQNGRDMYVDQELDINRLSDYDVDHIVPQSFLKDDSIDNKVLTRSDKARGKSDNVPSEEVVKKMKNYWRQLLNAKLITQRKFDNLTKAERGGLSELDKAGFIKRQLVETRQITKHVAQILDSRMNTKYDENDKLIREVKVITLKSKLVSDFRKDFQFYKVREINNYHHAHDAYLNAVVGTALIKKYPKLESEFVYGDYKVYDVRKMIAKSEQEIGKATAKYFFYSNIMNFFKTEITLANGEIRKRPLIETNGETGEIVWDKGRDFATVRKVLSMPQVNIVKKTEVQTGGFSKESILPKRNSDKLIARKKDWDPKKYGGFDSPTVAYSVLVVAKVEKGKSKKLKSVKELLGITIMERSSFEKNPIDFLEAKGYKEVKKDLIIKLPKYSLFELENGRKRMLASAGELQKGNELALPSKYVNFLYLASHYEKLKGSPEDNEQKQLFVEQHKHYLDEIIEQISEFSKRVILADANLDKVLSAYNKHRDKPIREQAENIIHLFTLTNLGAPAAFKYFDTTIDRKRYTSTKEVLDATLIHQSITGLYETRIDLSQLGGDGGGGSPAPGSSGGTLNLEDEYRLYETSAEPEVSPGSTWLSDFPQAWAETGGMGLAVRQAPLIIPLKATSTPVSIKQYPMSQEAKLGIKPHIQRLLDQGILVPCQSPWNTPLLPVKKPGTNDYRPVQDLREVNKRVEDIHPTVPNPYNLLSGLPPSHRWYTVLDLKDAFFCLRLHPTSQPLFAFEWRDPGMGISGQLTWTRLPQGFKNSPTLFNEALHRDLADFRIQHPDLILLQYVDDILLAATSELDCQQGTRALLLTLGNLGYRASAKKAQLCQKQVKYLGYLLKEGQRWLTEARKETVMGQPTPKTPRQLREFLGKAGFCRLFIPGFAEMAAPLYPLTKPGTLFNWGPDQQKAYQEIKQALLTAPALGLPDLTKPFELFVDEKQGYAKGVLTQKLGPWRRPVAYLSKKLDPVAAGWPPCLRMVAAIAVLRKDAGKLTMGQPLVILAPHAVEALVKQPPDRWLSNARMTHYQAMLLDTDRVQFGPVVALNPATLLPLPEEGAPHDCLEILAETHGTRPDLTDQPIPDADHTWYTDGSSFLQEGQRKAGAAVTTETEVIWARALPAGTSAQRAELIALTQALKMAEGKRLNVYTDSRYAFATAHIHGEIYRRRGWLTSEGREIKNKSEILALLKALFLPKRLSIIHCLGHQKGDSAEARGNRLADQAAREAAIKTPPDTSTLLAGKRTADGSEFEKRTADGSEFESPKKKAKVE

SEQ ID NO: 1904 - protein, 2091 aa, synthetic construct
MPAAKRVKLDGGDKKYSIGLDIGTNSVGWAVITDEYKVPSKKFKVLGNTDRHSIKKNLIGALLFDSGETAEATRLKRTARRRYTRRKNRICYLQEIFSNEMAKVDDSFFHRLEESFLVEEDKKHERHPIFGNIVDEVAYHEKYPTIYHLRKKLVDSTDKADLRLIYLALAHMIKFRGHFLIEGDLNPDNSDVDKLFIQLVQTYNQLFEENPINASGVDAKAILSARLSKSRRLENLIAQLPGEKKNGLFGNLIALSLGLTPNFKSNFDLAEDAKLQLSKDTYDDDLDNLLAQIGDQYADLFLAAKNLSDAILLSDILRVNTEITKAPLSASMIKRYDEHHQDLTLLKALVRQQLPEKYKEIFFDQSKNGYAGYIDGGASQEEFYKFIKPILEKMDGTEELLVKLNREDLLRKQRTFDNGSIPHQIHLGELHAILRRQEDFYPFLKDNREKIEKILTFRIPYYVGPLARGNSRFAWMTRKSEETITPWNFEEVVDKGASAQSFIERMTNFDKNLPNEKVLPKHSLLYEYFTVYNELTKVKYVTEGMRKPAFLSGEQKKAIVDLLFKTNRKVTVKQLKEDYFKKIECFDSVEISGVEDRFNASLGTYHDLLKIIKDKDFLDNEENEDILEDIVLTLTLFEDREMIEERLKTYAHLFDDKVMKQLKRRRYTGWGRLSRKLINGIRDKQSGKTILDFLKSDGFANRNFMQLIHDDSLTFKEDIQKAQVSGQGDSLHEHIANLAGSPAIKKGILQTVKVVDELVKVMGRHKPENIVIEMARENQTTQKGQKNSRERMKRIEEGIKELGSQILKEHPVENTQLQNEKLYLYYLQNGRDMYVDQELDINRLSDYDVDHIVPQSFLKDDSIDNKVLTRSDKARGKSDNVPSEEVVKKMKNYWRQLLNAKLITQRKFDNLTKAERGGLSELDKAGFIKRQLVETRQITKHVAQILDSRMNTKYDENDKLIREVKVITLKSKLVSDFRKDFQFYKVREINNYHHAHDAYLNAVVGTALIKKYPKLESEFVYGDYKVYDVRKMIAKSEQEIGKATAKYFFYSNIMNFFKTEITLANGEIRKRPLIETNGETGEIVWDKGRDFATVRKVLSMPQVNIVKKTEVQTGGFSKESILPKRNSDKLIARKKDWDPKKYGGFDSPTVAYSVLVVAKVEKGKSKKLKSVKELLGITIMERSSFEKNPIDFLEAKGYKEVKKDLIIKLPKYSLFELENGRKRMLASAGELQKGNELALPSKYVNFLYLASHYEKLKGSPEDNEQKQLFVEQHKHYLDEIIEQISEFSKRVILADANLDKVLSAYNKHRDKPIREQAENIIHLFTLTNLGAPAAFKYFDTTIDRKRYTSTKEVLDATLIHQSITGLYETRIDLSQLGGDGGGSSGGGGGTLNLEDEYRLYETSAEPEVSPGSTWLSDFPQAWAETGGMGLAVRQAPLIIPLKATSTPVSIKQYPMSQEAKLGIKPHIQRLLDQGILVPCQSPWNTPLLPVKKPGTNDYRPVQDLREVNKRVEDIHPTVPNPYNLLSGLPPSHRWYTVLDLKDAFFCLRLHPTSQPLFAFEWRDPGMGISGQLTWTRLPQGFKNSPTLFNEALHRDLADFRIQHPDLILLQYVDDILLAATSELDCQQGTRALLLTLGNLGYRASAKKAQLCQKQVKYLGYLLKEGQRWLTEARKETVMGQPTPKTPRQLREFLGKAGFCRLFIPGFAEMAAPLYPLTKPGTLFNWGPDQQKAYQEIKQALLTAPALGLPDLTKPFELFVDEKQGYAKGVLTQKLGPWRRPVAYLSKKLDPVAAGWPPCLRMVAAIAVLRKDAGKLTMGQPLVILAPHAVEALVKQPPDRWLSNARMTHYQAMLLDTDRVQFGPVVALNPATLLPLPEEGAPHDCLEILAETHGTRPDLTDQPIPDADHTWYTDGSSFLQEGQRKAGAAVTTETEVIWARALPAGTSAQRAELIALTQALKMAEGKRLNVYTDSRYAFATAHIHGEIYRRRGWLTSEGREIKNKSEILALLKALFLPKRLSIIHCLGHQKGDSAEARGNRLADQAAREAAIKTPPDTSTLLAGKRTADGSEFEKRTADGSEFESPKKKAKVE

SEQ ID NO: 1905 - protein, 2094 aa, synthetic construct
MPAAKRVKLDGGDKKYSIGLDIGTNSVGWAVITDEYKVPSKKFKVLGNTDRHSIKKNLIGALLFDSGETAEATRLKRTARRRYTRRKNRICYLQEIFSNEMAKVDDSFFHRLEESFLVEEDKKHERHPIFGNIVDEVAYHEKYPTIYHLRKKLVDSTDKADLRLIYLALAHMIKFRGHFLIEGDLNPDNSDVDKLFIQLVQTYNQLFEENPINASGVDAKAILSARLSKSRRLENLIAQLPGEKKNGLFGNLIALSLGLTPNFKSNFDLAEDAKLQLSKDTYDDDLDNLLAQIGDQYADLFLAAKNLSDAILLSDILRVNTEITKAPLSASMIKRYDEHHQDLTLLKALVRQQLPEKYKEIFFDQSKNGYAGYIDGGASQEEFYKFIKPILEKMDGTEELLVKLNREDLLRKQRTFDNGSIPHQIHLGELHAILRRQEDFYPFLKDNREKIEKILTFRIPYYVGPLARGNSRFAWMTRKSEETITPWNFEEVVDKGASAQSFIERMTNFDKNLPNEKVLPKHSLLYEYFTVYNELTKVKYVTEGMRKPAFLSGEQKKAIVDLLFKTNRKVTVKQLKEDYFKKIECFDSVEISGVEDRFNASLGTYHDLLKIIKDKDFLDNEENEDILEDIVLTLTLFEDREMIEERLKTYAHLFDDKVMKQLKRRRYTGWGRLSRKLINGIRDKQSGKTILDFLKSDGFANRNFMQLIHDDSLTFKEDIQKAQVSGQGDSLHEHIANLAGSPAIKKGILQTVKVVDELVKVMGRHKPENIVIEMARENQTTQKGQKNSRERMKRIEEGIKELGSQILKEHPVENTQLQNEKLYLYYLQNGRDMYVDQELDINRLSDYDVDHIVPQSFLKDDSIDNKVLTRSDKARGKSDNVPSEEVVKKMKNYWRQLLNAKLITQRKFDNLTKAERGGLSELDKAGFIKRQLVETRQITKHVAQILDSRMNTKYDENDKLIREVKVITLKSKLVSDFRKDFQFYKVREINNYHHAHDAYLNAVVGTALIKKYPKLESEFVYGDYKVYDVRKMIAKSEQEIGKATAKYFFYSNIMNFFKTEITLANGEIRKRPLIETNGETGEIVWDKGRDFATVRKVLSMPQVNIVKKTEVQTGGFSKESILPKRNSDKLIARKKDWDPKKYGGFDSPTVAYSVLVVAKVEKGKSKKLKSVKELLGITIMERSSFEKNPIDFLEAKGYKEVKKDLIIKLPKYSLFELENGRKRMLASAGELQKGNELALPSKYVNFLYLASHYEKLKGSPEDNEQKQLFVEQHKHYLDEIIEQISEFSKRVILADANLDKVLSAYNKHRDKPIREQAENIIHLFTLTNLGAPAAFKYFDTTIDRKRYTSTKEVLDATLIHQSITGLYETRIDLSQLGGDGGGGGGSSPAPGGTLNLEDEYRLYETSAEPEVSPGSTWLSDFPQAWAETGGMGLAVRQAPLIIPLKATSTPVSIKQYPMSQEAKLGIKPHIQRLLDQGILVPCQSPWNTPLLPVKKPGTNDYRPVQDLREVNKRVEDIHPTVPNPYNLLSGLPPSHRWYTVLDLKDAFFCLRLHPTSQPLFAFEWRDPGMGISGQLTWTRLPQGFKNSPTLFNEALHRDLADFRIQHPDLILLQYVDDILLAATSELDCQQGTRALLLTLGNLGYRASAKKAQLCQKQVKYLGYLLKEGQRWLTEARKETVMGQPTPKTPRQLREFLGKAGFCRLFIPGFAEMAAPLYPLTKPGTLFNWGPDQQKAYQEIKQALLTAPALGLPDLTKPFELFVDEKQGYAKGVLTQKLGPWRRPVAYLSKKLDPVAAGWPPCLRMVAAIAVLRKDAGKLTMGQPLVILAPHAVEALVKQPPDRWLSNARMTHYQAMLLDTDRVQFGPVVALNPATLLPLPEEGAPHDCLEILAETHGTRPDLTDQPIPDADHTWYTDGSSFLQEGQRKAGAAVTTETEVIWARALPAGTSAQRAELIALTQALKMAEGKRLNVYTDSRYAFATAHIHGEIYRRRGWLTSEGREIKNKSEILALLKALFLPKRLSIIHCLGHQKGDSAEARGNRLADQAAREAAIKTPPDTSTLLAGKRTADGSEFEKRTADGSEFESPKKKAKVE

SEQ ID NO: 1906 - protein, 2096 aa, synthetic construct
MPAAKRVKLDGGDKKYSIGLDIGTNSVGWAVITDEYKVPSKKFKVLGNTDRHSIKKNLIGALLFDSGETAEATRLKRTARRRYTRRKNRICYLQEIFSNEMAKVDDSFFHRLEESFLVEEDKKHERHPIFGNIVDEVAYHEKYPTIYHLRKKLVDSTDKADLRLIYLALAHMIKFRGHFLIEGDLNPDNSDVDKLFIQLVQTYNQLFEENPINASGVDAKAILSARLSKSRRLENLIAQLPGEKKNGLFGNLIALSLGLTPNFKSNFDLAEDAKLQLSKDTYDDDLDNLLAQIGDQYADLFLAAKNLSDAILLSDILRVNTEITKAPLSASMIKRYDEHHQDLTLLKALVRQQLPEKYKEIFFDQSKNGYAGYIDGGASQEEFYKFIKPILEKMDGTEELLVKLNREDLLRKQRTFDNGSIPHQIHLGELHAILRRQEDFYPFLKDNREKIEKILTFRIPYYVGPLARGNSRFAWMTRKSEETITPWNFEEVVDKGASAQSFIERMTNFDKNLPNEKVLPKHSLLYEYFTVYNELTKVKYVTEGMRKPAFLSGEQKKAIVDLLFKTNRKVTVKQLKEDYFKKIECFDSVEISGVEDRFNASLGTYHDLLKIIKDKDFLDNEENEDILEDIVLTLTLFEDREMIEERLKTYAHLFDDKVMKQLKRRRYTGWGRLSRKLINGIRDKQSGKTILDFLKSDGFANRNFMQLIHDDSLTFKEDIQKAQVSGQGDSLHEHIANLAGSPAIKKGILQTVKVVDELVKVMGRHKPENIVIEMARENQTTQKGQKNSRERMKRIEEGIKELGSQILKEHPVENTQLQNEKLYLYYLQNGRDMYVDQELDINRLSDYDVDHIVPQSFLKDDSIDNKVLTRSDKARGKSDNVPSEEVVKKMKNYWRQLLNAKLITQRKFDNLTKAERGGLSELDKAGFIKRQLVETRQITKHVAQILDSRMNTKYDENDKLIREVKVITLKSKLVSDFRKDFQFYKVREINNYHHAHDAYLNAVVGTALIKKYPKLESEFVYGDYKVYDVRKMIAKSEQEIGKATAKYFFYSNIMNFFKTEITLANGEIRKRPLIETNGETGEIVWDKGRDFATVRKVLSMPQVNIVKKTEVQTGGFSKESILPKRNSDKLIARKKDWDPKKYGGFDSPTVAYSVLVVAKVEKGKSKKLKSVKELLGITIMERSSFEKNPIDFLEAKGYKEVKKDLIIKLPKYSLFELENGRKRMLASAGELQKGNELALPSKYVNFLYLASHYEKLKGSPEDNEQKQLFVEQHKHYLDEIIEQISEFSKRVILADANLDKVLSAYNKHRDKPIREQAENIIHLFTLTNLGAPAAFKYFDTTIDRKRYTSTKEVLDATLIHQSITGLYETRIDLSQLGGDGGGGGGGSEAAAKGGTLNLEDEYRLYETSAEPEVSPGSTWLSDFPQAWAETGGMGLAVRQAPLIIPLKATSTPVSIKQYPMSQEAKLGIKPHIQRLLDQGILVPCQSPWNTPLLPVKKPGTNDYRPVQDLREVNKRVEDIHPTVPNPYNLLSGLPPSHRWYTVLDLKDAFFCLRLHPTSQPLFAFEWRDPGMGISGQLTWTRLPQGFKNSPTLFNEALHRDLADFRIQHPDLILLQYVDDILLAATSELDCQQGTRALLLTLGNLGYRASAKKAQLCQKQVKYLGYLLKEGQRWLTEARKETVMGQPTPKTPRQLREFLGKAGFCRLFIPGFAEMAAPLYPLTKPGTLFNWGPDQQKAYQEIKQALLTAPALGLPDLTKPFELFVDEKQGYAKGVLTQKLGPWRRPVAYLSKKLDPVAAGWPPCLRMVAAIAVLRKDAGKLTMGQPLVILAPHAVEALVKQPPDRWLSNARMTHYQAMLLDTDRVQFGPVVALNPATLLPLPEEGAPHDCLEILAETHGTRPDLTDQPIPDADHTWYTDGSSFLQEGQRKAGAAVTTETEVIWARALPAGTSAQRAELIALTQALKMAEGKRLNVYTDSRYAFATAHIHGEIYRRRGWLTSEGREIKNKSEILALLKALFLPKRLSIIHCLGHQKGDSAEARGNRLADQAAREAAIKTPPDTSTLLAGKRTADGSEFEKRTADGSEFESPKKKAKVE

SEQ ID NO: 1907 - protein, 2096 aa, synthetic construct
MPAAKRVKLDGGDKKYSIGLDIGTNSVGWAVITDEYKVPSKKFKVLGNTDRHSIKKNLIGALLFDSGETAEATRLKRTARRRYTRRKNRICYLQEIFSNEMAKVDDSFFHRLEESFLVEEDKKHERHPIFGNIVDEVAYHEKYPTIYHLRKKLVDSTDKADLRLIYLALAHMIKFRGHFLIEGDLNPDNSDVDKLFIQLVQTYNQLFEENPINASGVDAKAILSARLSKSRRLENLIAQLPGEKKNGLFGNLIALSLGLTPNFKSNFDLAEDAKLQLSKDTYDDDLDNLLAQIGDQYADLFLAAKNLSDAILLSDILRVNTEITKAPLSASMIKRYDEHHQDLTLLKALVRQQLPEKYKEIFFDQSKNGYAGYIDGGASQEEFYKFIKPILEKMDGTEELLVKLNREDLLRKQRTFDNGSIPHQIHLGELHAILRRQEDFYPFLKDNREKIEKILTFRIPYYVGPLARGNSRFAWMTRKSEETITPWNFEEVVDKGASAQSFIERMTNFDKNLPNEKVLPKHSLLYEYFTVYNELTKVKYVTEGMRKPAFLSGEQKKAIVDLLFKTNRKVTVKQLKEDYFKKIECFDSVEISGVEDRFNASLGTYHDLLKIIKDKDFLDNEENEDILEDIVLTLTLFEDREMIEERLKTYAHLFDDKVMKQLKRRRYTGWGRLSRKLINGIRDKQSGKTILDFLKSDGFANRNFMQLIHDDSLTFKEDIQKAQVSGQGDSLHEHIANLAGSPAIKKGILQTVKVVDELVKVMGRHKPENIVIEMARENQTTQKGQKNSRERMKRIEEGIKELGSQILKEHPVENTQLQNEKLYLYYLQNGRDMYVDQELDINRLSDYDVDHIVPQSFLKDDSIDNKVLTRSDKARGKSDNVPSEEVVKKMKNYWRQLLNAKLITQRKFDNLTKAERGGLSELDKAGFIKRQLVETRQITKHVAQILDSRMNTKYDENDKLIREVKVITLKSKLVSDFRKDFQFYKVREINNYHHAHDAYLNAVVGTALIKKYPKLESEFVYGDYKVYDVRKMIAKSEQEIGKATAKYFFYSNIMNFFKTEITLANGEIRKRPLIETNGETGEIVWDKGRDFATVRKVLSMPQVNIVKKTEVQTGGFSKESILPKRNSDKLIARKKDWDPKKYGGFDSPTVAYSVLVVAKVEKGKSKKLKSVKELLGITIMERSSFEKNPIDFLEAKGYKEVKKDLIIKLPKYSLFELENGRKRMLASAGELQKGNELALPSKYVNFLYLASHYEKLKGSPEDNEQKQLFVEQHKHYLDEIIEQISEFSKRVILADANLDKVLSAYNKHRDKPIREQAENIIHLFTLTNLGAPAAFKYFDTTIDRKRYTSTKEVLDATLIHQSITGLYETRIDLSQLGGDGGEAAAKGGSGGGGGTLNLEDEYRLYETSAEPEVSPGSTWLSDFPQAWAETGGMGLAVRQAPLIIPLKATSTPVSIKQYPMSQEAKLGIKPHIQRLLDQGILVPCQSPWNTPLLPVKKPGTNDYRPVQDLREVNKRVEDIHPTVPNPYNLLSGLPPSHRWYTVLDLKDAFFCLRLHPTSQPLFAFEWRDPGMGISGQLTWTRLPQGFKNSPTLFNEALHRDLADFRIQHPDLILLQYVDDILLAATSELDCQQGTRALLLTLGNLGYRASAKKAQLCQKQVKYLGYLLKEGQRWLTEARKETVMGQPTPKTPRQLREFLGKAGFCRLFIPGFAEMAAPLYPLTKPGTLFNWGPDQQKAYQEIKQALLTAPALGLPDLTKPFELFVDEKQGYAKGVLTQKLGPWRRPVAYLSKKLDPVAAGWPPCLRMVAAIAVLRKDAGKLTMGQPLVILAPHAVEALVKQPPDRWLSNARMTHYQAMLLDTDRVQFGPVVALNPATLLPLPEEGAPHDCLEILAETHGTRPDLTDQPIPDADHTWYTDGSSFLQEGQRKAGAAVTTETEVIWARALPAGTSAQRAELIALTQALKMAEGKRLNVYTDSRYAFATAHIHGEIYRRRGWLTSEGREIKNKSEILALLKALFLPKRLSIIHCLGHQKGDSAEARGNRLADQAAREAAIKTPPDTSTLLAGKRTADGSEFEKRTADGSEFESPKKKAKVE

SEQ ID NO: 1908 - protein, 2096 aa, synthetic construct
MPAAKRVKLDGGDKKYSIGLDIGTNSVGWAVITDEYKVPSKKFKVLGNTDRHSIKKNLIGALLFDSGETAEATRLKRTARRRYTRRKNRICYLQEIFSNEMAKVDDSFFHRLEESFLVEEDKKHERHPIFGNIVDEVAYHEKYPTIYHLRKKLVDSTDKADLRLIYLALAHMIKFRGHFLIEGDLNPDNSDVDKLFIQLVQTYNQLFEENPINASGVDAKAILSARLSKSRRLENLIAQLPGEKKNGLFGNLIALSLGLTPNFKSNFDLAEDAKLQLSKDTYDDDLDNLLAQIGDQYADLFLAAKNLSDAILLSDILRVNTEITKAPLSASMIKRYDEHHQDLTLLKALVRQQLPEKYKEIFFDQSKNGYAGYIDGGASQEEFYKFIKPILEKMDGTEELLVKLNREDLLRKQRTFDNGSIPHQIHLGELHAILRRQEDFYPFLKDNREKIEKILTFRIPYYVGPLARGNSRFAWMTRKSEETITPWNFEEVVDKGASAQSFIERMTNFDKNLPNEKVLPKHSLLYEYFTVYNELTKVKYVTEGMRKPAFLSGEQKKAIVDLLFKTNRKVTVKQLKEDYFKKIECFDSVEISGVEDRFNASLGTYHDLLKIIKDKDFLDNEENEDILEDIVLTLTLFEDREMIEERLKTYAHLFDDKVMKQLKRRRYTGWGRLSRKLINGIRDKQSGKTILDFLKSDGFANRNFMQLIHDDSLTFKEDIQKAQVSGQGDSLHEHIANLAGSPAIKKGILQTVKVVDELVKVMGRHKPENIVIEMARENQTTQKGQKNSRERMKRIEEGIKELGSQILKEHPVENTQLQNEKLYLYYLQNGRDMYVDQELDINRLSDYDVDHIVPQSFLKDDSIDNKVLTRSDKARGKSDNVPSEEVVKKMKNYWRQLLNAKLITQRKFDNLTKAERGGLSELDKAGFIKRQLVETRQITKHVAQILDSRMNTKYDENDKLIREVKVITLKSKLVSDFRKDFQFYKVREINNYHHAHDAYLNAVVGTALIKKYPKLESEFVYGDYKVYDVRKMIAKSEQEIGKATAKYFFYSNIMNFFKTEITLANGEIRKRPLIETNGETGEIVWDKGRDFATVRKVLSMPQVNIVKKTEVQTGGFSKESILPKRNSDKLIARKKDWDPKKYGGFDSPTVAYSVLVVAKVEKGKSKKLKSVKELLGITIMERSSFEKNPIDFLEAKGYKEVKKDLIIKLPKYSLFELENGRKRMLASAGELQKGNELALPSKYVNFLYLASHYEKLKGSPEDNEQKQLFVEQHKHYLDEIIEQISEFSKRVILADANLDKVLSAYNKHRDKPIREQAENIIHLFTLTNLGAPAAFKYFDTTIDRKRYTSTKEVLDATLIHQSITGLYETRIDLSQLGGDGGGGSPAPEAAAKGGTLNLEDEYRLYETSAEPEVSPGSTWLSDFPQAWAETGGMGLAVRQAPLIIPLKATSTPVSIKQYPMSQEAKLGIKPHIQRLLDQGILVPCQSPWNTPLLPVKKPGTNDYRPVQDLREVNKRVEDIHPTVPNPYNLLSGLPPSHRWYTVLDLKDAFFCLRLHPTSQPLFAFEWRDPGMGISGQLTWTRLPQGFKNSPTLFNEALHRDLADFRIQHPDLILLQYVDDILLAATSELDCQQGTRALLLTLGNLGYRASAKKAQLCQKQVKYLGYLLKEGQRWLTEARKETVMGQPTPKTPRQLREFLGKAGFCRLFIPGFAEMAAPLYPLTKPGTLFNWGPDQQKAYQEIKQALLTAPALGLPDLTKPFELFVDEKQGYAKGVLTQKLGPWRRPVAYLSKKLDPVAAGWPPCLRMVAAIAVLRKDAGKLTMGQPLVILAPHAVEALVKQPPDRWLSNARMTHYQAMLLDTDRVQFGPVVALNPATLLPLPEEGAPHDCLEILAETHGTRPDLTDQPIPDADHTWYTDGSSFLQEGQRKAGAAVTTETEVIWARALPAGTSAQRAELIALTQALKMAEGKRLNVYTDSRYAFATAHIHGEIYRRRGWLTSEGREIKNKSEILALLKALFLPKRLSIIHCLGHQKGDSAEARGNRLADQAAREAAIKTPPDTSTLLAGKRTADGSEFEKRTADGSEFESPKKKAKVE

SEQ ID NO: 1909 - protein, 2094 aa, synthetic construct
MPAAKRVKLDGGDKKYSIGLDIGTNSVGWAVITDEYKVPSKKFKVLGNTDRHSIKKNLIGALLFDSGETAEATRLKRTARRRYTRRKNRICYLQEIFSNEMAKVDDSFFHRLEESFLVEEDKKHERHPIFGNIVDEVAYHEKYPTIYHLRKKLVDSTDKADLRLIYLALAHMIKFRGHFLIEGDLNPDNSDVDKLFIQLVQTYNQLFEENPINASGVDAKAILSARLSKSRRLENLIAQLPGEKKNGLFGNLIALSLGLTPNFKSNFDLAEDAKLQLSKDTYDDDLDNLLAQIGDQYADLFLAAKNLSDAILLSDILRVNTEITKAPLSASMIKRYDEHHQDLTLLKALVRQQLPEKYKEIFFDQSKNGYAGYIDGGASQEEFYKFIKPILEKMDGTEELLVKLNREDLLRKQRTFDNGSIPHQIHLGELHAILRRQEDFYPFLKDNREKIEKILTFRIPYYVGPLARGNSRFAWMTRKSEETITPWNFEEVVDKGASAQSFIERMTNFDKNLPNEKVLPKHSLLYEYFTVYNELTKVKYVTEGMRKPAFLSGEQKKAIVDLLFKTNRKVTVKQLKEDYFKKIECFDSVEISGVEDRFNASLGTYHDLLKIIKDKDFLDNEENEDILEDIVLTLTLFEDREMIEERLKTYAHLFDDKVMKQLKRRRYTGWGRLSRKLINGIRDKQSGKTILDFLKSDGFANRNFMQLIHDDSLTFKEDIQKAQVSGQGDSLHEHIANLAGSPAIKKGILQTVKVVDELVKVMGRHKPENIVIEMARENQTTQKGQKNSRERMKRIEEGIKELGSQILKEHPVENTQLQNEKLYLYYLQNGRDMYVDQELDINRLSDYDVDHIVPQSFLKDDSIDNKVLTRSDKARGKSDNVPSEEVVKKMKNYWRQLLNAKLITQRKFDNLTKAERGGLSELDKAGFIKRQLVETRQITKHVAQILDSRMNTKYDENDKLIREVKVITLKSKLVSDFRKDFQFYKVREINNYHHAHDAYLNAVVGTALIKKYPKLESEFVYGDYKVYDVRKMIAKSEQEIGKATAKYFFYSNIMNFFKTEITLANGEIRKRPLIETNGETGEIVWDKGRDFATVRKVLSMPQVNIVKKTEVQTGGFSKESILPKRNSDKLIARKKDWDPKKYGGFDSPTVAYSVLVVAKVEKGKSKKLKSVKELLGITIMERSSFEKNPIDFLEAKGYKEVKKDLIIKLPKYSLFELENGRKRMLASAGELQKGNELALPSKYVNFLYLASHYEKLKGSPEDNEQKQLFVEQHKHYLDEIIEQISEFSKRVILADANLDKVLSAYNKHRDKPIREQAENIIHLFTLTNLGAPAAFKYFDTTIDRKRYTSTKEVLDATLIHQSITGLYETRIDLSQLGGDGGGSSGGGGGSGGTLNLEDEYRLYETSAEPEVSPGSTWLSDFPQAWAETGGMGLAVRQAPLIIPLKATSTPVSIKQYPMSQEAKLGIKPHIQRLLDQGILVPCQSPWNTPLLPVKKPGTNDYRPVQDLREVNKRVEDIHPTVPNPYNLLSGLPPSHRWYTVLDLKDAFFCLRLHPTSQPLFAFEWRDPGMGISGQLTWTRLPQGFKNSPTLFNEALHRDLADFRIQHPDLILLQYVDDILLAATSELDCQQGTRALLLTLGNLGYRASAKKAQLCQKQVKYLGYLLKEGQRWLTEARKETVMGQPTPKTPRQLREFLGKAGFCRLFIPGFAEMAAPLYPLTKPGTLFNWGPDQQKAYQEIKQALLTAPALGLPDLTKPFELFVDEKQGYAKGVLTQKLGPWRRPVAYLSKKLDPVAAGWPPCLRMVAAIAVLRKDAGKLTMGQPLVILAPHAVEALVKQPPDRWLSNARMTHYQAMLLDTDRVQFGPVVALNPATLLPLPEEGAPHDCLEILAETHGTRPDLTDQPIPDADHTWYTDGSSFLQEGQRKAGAAVTTETEVIWARALPAGTSAQRAELIALTQALKMAEGKRLNVYTDSRYAFATAHIHGEIYRRRGWLTSEGREIKNKSEILALLKALFLPKRLSIIHCLGHQKGDSAEARGNRLADQAAREAAIKTPPDTSTLLAGKRTADGSEFEKRTADGSEFESPKKKAKVE

SEQ ID NO: 1910 - protein, 2096 aa, synthetic construct
MPAAKRVKLDGGDKKYSIGLDIGTNSVGWAVITDEYKVPSKKFKVLGNTDRHSIKKNLIGALLFDSGETAEATRLKRTARRRYTRRKNRICYLQEIFSNEMAKVDDSFFHRLEESFLVEEDKKHERHPIFGNIVDEVAYHEKYPTIYHLRKKLVDSTDKADLRLIYLALAHMIKFRGHFLIEGDLNPDNSDVDKLFIQLVQTYNQLFEENPINASGVDAKAILSARLSKSRRLENLIAQLPGEKKNGLFGNLIALSLGLTPNFKSNFDLAEDAKLQLSKDTYDDDLDNLLAQIGDQYADLFLAAKNLSDAILLSDILRVNTEITKAPLSASMIKRYDEHHQDLTLLKALVRQQLPEKYKEIFFDQSKNGYAGYIDGGASQEEFYKFIKPILEKMDGTEELLVKLNREDLLRKQRTFDNGSIPHQIHLGELHAILRRQEDFYPFLKDNREKIEKILTFRIPYYVGPLARGNSRFAWMTRKSEETITPWNFEEVVDKGASAQSFIERMTNFDKNLPNEKVLPKHSLLYEYFTVYNELTKVKYVTEGMRKPAFLSGEQKKAIVDLLFKTNRKVTVKQLKEDYFKKIECFDSVEISGVEDRFNASLGTYHDLLKIIKDKDFLDNEENEDILEDIVLTLTLFEDREMIEERLKTYAHLFDDKVMKQLKRRRYTGWGRLSRKLINGIRDKQSGKTILDFLKSDGFANRNFMQLIHDDSLTFKEDIQKAQVSGQGDSLHEHIANLAGSPAIKKGILQTVKVVDELVKVMGRHKPENIVIEMARENQTTQKGQKNSRERMKRIEEGIKELGSQILKEHPVENTQLQNEKLYLYYLQNGRDMYVDQELDINRLSDYDVDHIVPQSFLKDDSIDNKVLTRSDKARGKSDNVPSEEVVKKMKNYWRQLLNAKLITQRKFDNLTKAERGGLSELDKAGFIKRQLVETRQITKHVAQILDSRMNTKYDENDKLIREVKVITLKSKLVSDFRKDFQFYKVREINNYHHAHDAYLNAVVGTALIKKYPKLESEFVYGDYKVYDVRKMIAKSEQEIGKATAKYFFYSNIMNFFKTEITLANGEIRKRPLIETNGETGEIVWDKGRDFATVRKVLSMPQVNIVKKTEVQTGGFSKESILPKRNSDKLIARKKDWDPKKYGGFDSPTVAYSVLVVAKVEKGKSKKLKSVKELLGITIMERSSFEKNPIDFLEAKGYKEVKKDLIIKLPKYSLFELENGRKRMLASAGELQKGNELALPSKYVNFLYLASHYEKLKGSPEDNEQKQLFVEQHKHYLDEIIEQISEFSKRVILADANLDKVLSAYNKHRDKPIREQAENIIHLFTLTNLGAPAAFKYFDTTIDRKRYTSTKEVLDATLIHQSITGLYETRIDLSQLGGDGGGSSEAAAKGGSGGTLNLEDEYRLYETSAEPEVSPGSTWLSDFPQAWAETGGMGLAVRQAPLIIPLKATSTPVSIKQYPMSQEAKLGIKPHIQRLLDQGILVPCQSPWNTPLLPVKKPGTNDYRPVQDLREVNKRVEDIHPTVPNPYNLLSGLPPSHRWYTVLDLKDAFFCLRLHPTSQPLFAFEWRDPGMGISGQLTWTRLPQGFKNSPTLFNEALHRDLADFRIQHPDLILLQYVDDILLAATSELDCQQGTRALLLTLGNLGYRASAKKAQLCQKQVKYLGYLLKEGQRWLTEARKETVMGQPTPKTPRQLREFLGKAGFCRLFIPGFAEMAAPLYPLTKPGTLFNWGPDQQKAYQEIKQALLTAPALGLPDLTKPFELFVDEKQGYAKGVLTQKLGPWRRPVAYLSKKLDPVAAGWPPCLRMVAAIAVLRKDAGKLTMGQPLVILAPHAVEALVKQPPDRWLSNARMTHYQAMLLDTDRVQFGPVVALNPATLLPLPEEGAPHDCLEILAETHGTRPDLTDQPIPDADHTWYTDGSSFLQEGQRKAGAAVTTETEVIWARALPAGTSAQRAELIALTQALKMAEGKRLNVYTDSRYAFATAHIHGEIYRRRGWLTSEGREIKNKSEILALLKALFLPKRLSIIHCLGHQKGDSAEARGNRLADQAAREAAIKTPPDTSTLLAGKRTADGSEFEKRTADGSEFESPKKKAKVE

SEQ ID NO: 1911 - protein, 2091 aa, synthetic construct
MPAAKRVKLDGGDKKYSIGLDIGTNSVGWAVITDEYKVPSKKFKVLGNTDRHSIKKNLIGALLFDSGETAEATRLKRTARRRYTRRKNRICYLQEIFSNEMAKVDDSFFHRLEESFLVEEDKKHERHPIFGNIVDEVAYHEKYPTIYHLRKKLVDSTDKADLRLIYLALAHMIKFRGHFLIEGDLNPDNSDVDKLFIQLVQTYNQLFEENPINASGVDAKAILSARLSKSRRLENLIAQLPGEKKNGLFGNLIALSLGLTPNFKSNFDLAEDAKLQLSKDTYDDDLDNLLAQIGDQYADLFLAAKNLSDAILLSDILRVNTEITKAPLSASMIKRYDEHHQDLTLLKALVRQQLPEKYKEIFFDQSKNGYAGYIDGGASQEEFYKFIKPILEKMDGTEELLVKLNREDLLRKQRTFDNGSIPHQIHLGELHAILRRQEDFYPFLKDNREKIEKILTFRIPYYVGPLARGNSRFAWMTRKSEETITPWNFEEVVDKGASAQSFIERMTNFDKNLPNEKVLPKHSLLYEYFTVYNELTKVKYVTEGMRKPAFLSGEQKKAIVDLLFKTNRKVTVKQLKEDYFKKIECFDSVEISGVEDRFNASLGTYHDLLKIIKDKDFLDNEENEDILEDIVLTLTLFEDREMIEERLKTYAHLFDDKVMKQLKRRRYTGWGRLSRKLINGIRDKQSGKTILDFLKSDGFANRNFMQLIHDDSLTFKEDIQKAQVSGQGDSLHEHIANLAGSPAIKKGILQTVKVVDELVKVMGRHKPENIVIEMARENQTTQKGQKNSRERMKRIEEGIKELGSQILKEHPVENTQLQNEKLYLYYLQNGRDMYVDQELDINRLSDYDVDHIVPQSFLKDDSIDNKVLTRSDKARGKSDNVPSEEVVKKMKNYWRQLLNAKLITQRKFDNLTKAERGGLSELDKAGFIKRQLVETRQITKHVAQILDSRMNTKYDENDKLIREVKVITLKSKLVSDFRKDFQFYKVREINNYHHAHDAYLNAVVGTALIKKYPKLESEFVYGDYKVYDVRKMIAKSEQEIGKATAKYFFYSNIMNFFKTEITLANGEIRKRPLIETNGETGEIVWDKGRDFATVRKVLSMPQVNIVKKTEVQTGGFSKESILPKRNSDKLIARKKDWDPKKYGGFDSPTVAYSVLVVAKVEKGKSKKLKSVKELLGITIMERSSFEKNPIDFLEAKGYKEVKKDLIIKLPKYSLFELENGRKRMLASAGELQKGNELALPSKYVNFLYLASHYEKLKGSPEDNEQKQLFVEQHKHYLDEIIEQISEFSKRVILADANLDKVLSAYNKHRDKPIREQAENIIHLFTLTNLGAPAAFKYFDTTIDRKRYTSTKEVLDATLIHQSITGLYETRIDLSQLGGDGGGGSGSSGGTLNLEDEYRLYETSAEPEVSPGSTWLSDFPQAWAETGGMGLAVRQAPLIIPLKATSTPVSIKQYPMSQEAKLGIKPHIQRLLDQGILVPCQSPWNTPLLPVKKPGTNDYRPVQDLREVNKRVEDIHPTVPNPYNLLSGLPPSHRWYTVLDLKDAFFCLRLHPTSQPLFAFEWRDPGMGISGQLTWTRLPQGFKNSPTLFNEALHRDLADFRIQHPDLILLQYVDDILLAATSELDCQQGTRALLLTLGNLGYRASAKKAQLCQKQVKYLGYLLKEGQRWLTEARKETVMGQPTPKTPRQLREFLGKAGFCRLFIPGFAEMAAPLYPLTKPGTLFNWGPDQQKAYQEIKQALLTAPALGLPDLTKPFELFVDEKQGYAKGVLTQKLGPWRRPVAYLSKKLDPVAAGWPPCLRMVAAIAVLRKDAGKLTMGQPLVILAPHAVEALVKQPPDRWLSNARMTHYQAMLLDTDRVQFGPVVALNPATLLPLPEEGAPHDCLEILAETHGTRPDLTDQPIPDADHTWYTDGSSFLQEGQRKAGAAVTTETEVIWARALPAGTSAQRAELIALTQALKMAEGKRLNVYTDSRYAFATAHIHGEIYRRRGWLTSEGREIKNKSEILALLKALFLPKRLSIIHCLGHQKGDSAEARGNRLADQAAREAAIKTPPDTSTLLAGKRTADGSEFEKRTADGSEFESPKKKAKVE

SEQ ID NO: 1912 - protein, 2096 aa, synthetic construct
MPAAKRVKLDGGDKKYSIGLDIGTNSVGWAVITDEYKVPSKKFKVLGNTDRHSIKKNLIGALLFDSGETAEATRLKRTARRRYTRRKNRICYLQEIFSNEMAKVDDSFFHRLEESFLVEEDKKHERHPIFGNIVDEVAYHEKYPTIYHLRKKLVDSTDKADLRLIYLALAHMIKFRGHFLIEGDLNPDNSDVDKLFIQLVQTYNQLFEENPINASGVDAKAILSARLSKSRRLENLIAQLPGEKKNGLFGNLIALSLGLTPNFKSNFDLAEDAKLQLSKDTYDDDLDNLLAQIGDQYADLFLAAKNLSDAILLSDILRVNTEITKAPLSASMIKRYDEHHQDLTLLKALVRQQLPEKYKEIFFDQSKNGYAGYIDGGASQEEFYKFIKPILEKMDGTEELLVKLNREDLLRKQRTFDNGSIPHQIHLGELHAILRRQEDFYPFLKDNREKIEKILTFRIPYYVGPLARGNSRFAWMTRKSEETITPWNFEEVVDKGASAQSFIERMTNFDKNLPNEKVLPKHSLLYEYFTVYNELTKVKYVTEGMRKPAFLSGEQKKAIVDLLFKTNRKVTVKQLKEDYFKKIECFDSVEISGVEDRFNASLGTYHDLLKIIKDKDFLDNEENEDILEDIVLTLTLFEDREMIEERLKTYAHLFDDKVMKQLKRRRYTGWGRLSRKLINGIRDKQSGKTILDFLKSDGFANRNFMQLIHDDSLTFKEDIQKAQVSGQGDSLHEHIANLAGSPAIKKGILQTVKVVDELVKVMGRHKPENIVIEMARENQTTQKGQKNSRERMKRIEEGIKELGSQILKEHPVENTQLQNEKLYLYYLQNGRDMYVDQELDINRLSDYDVDHIVPQSFLKDDSIDNKVLTRSDKARGKSDNVPSEEVVKKMKNYWRQLLNAKLITQRKFDNLTKAERGGLSELDKAGFIKRQLVETRQITKHVAQILDSRMNTKYDENDKLIREVKVITLKSKLVSDFRKDFQFYKVREINNYHHAHDAYLNAVVGTALIKKYPKLESEFVYGDYKVYDVRKMIAKSEQEIGKATAKYFFYSNIMNFFKTEITLANGEIRKRPLIETNGETGEIVWDKGRDFATVRKVLSMPQVNIVKKTEVQTGGFSKESILPKRNSDKLIARKKDWDPKKYGGFDSPTVAYSVLVVAKVEKGKSKKLKSVKELLGITIMERSSFEKNPIDFLEAKGYKEVKKDLIIKLPKYSLFELENGRKRMLASAGELQKGNELALPSKYVNFLYLASHYEKLKGSPEDNEQKQLFVEQHKHYLDEIIEQISEFSKRVILADANLDKVLSAYNKHRDKPIREQAENIIHLFTLTNLGAPAAFKYFDTTIDRKRYTSTKEVLDATLIHQSITGLYETRIDLSQLGGDGGPAPGSSEAAAKGGTLNLEDEYRLYETSAEPEVSPGSTWLSDFPQAWAETGGMGLAVRQAPLIIPLKATSTPVSIKQYPMSQEAKLGIKPHIQRLLDQGILVPCQSPWNTPLLPVKKPGTNDYRPVQDLREVNKRVEDIHPTVPNPYNLLSGLPPSHRWYTVLDLKDAFFCLRLHPTSQPLFAFEWRDPGMGISGQLTWTRLPQGFKNSPTLFNEALHRDLADFRIQHPDLILLQYVDDILLAATSELDCQQGTRALLLTLGNLGYRASAKKAQLCQKQVKYLGYLLKEGQRWLTEARKETVMGQPTPKTPRQLREFLGKAGFCRLFIPGFAEMAAPLYPLTKPGTLFNWGPDQQKAYQEIKQALLTAPALGLPDLTKPFELFVDEKQGYAKGVLTQKLGPWRRPVAYLSKKLDPVAAGWPPCLRMVAAIAVLRKDAGKLTMGQPLVILAPHAVEALVKQPPDRWLSNARMTHYQAMLLDTDRVQFGPVVALNPATLLPLPEEGAPHDCLEILAETHGTRPDLTDQPIPDADHTWYTDGSSFLQEGQRKAGAAVTTETEVIWARALPAGTSAQRAELIALTQALKMAEGKRLNVYTDSRYAFATAHIHGEIYRRRGWLTSEGREIKNKSEILALLKALFLPKRLSIIHCLGHQKGDSAEARGNRLADQAAREAAIKTPPDTSTLLAGKRTADGSEFEKRTADGSEFESPKKKAKVE

SEQ ID NO: 1913 - protein, 2096 aa, synthetic construct
MPAAKRVKLDGGDKKYSIGLDIGTNSVGWAVITDEYKVPSKKFKVLGNTDRHSIKKNLIGALLFDSGETAEATRLKRTARRRYTRRKNRICYLQEIFSNEMAKVDDSFFHRLEESFLVEEDKKHERHPIFGNIVDEVAYHEKYPTIYHLRKKLVDSTDKADLRLIYLALAHMIKFRGHFLIEGDLNPDNSDVDKLFIQLVQTYNQLFEENPINASGVDAKAILSARLSKSRRLENLIAQLPGEKKNGLFGNLIALSLGLTPNFKSNFDLAEDAKLQLSKDTYDDDLDNLLAQIGDQYADLFLAAKNLSDAILLSDILRVNTEITKAPLSASMIKRYDEHHQDLTLLKALVRQQLPEKYKEIFFDQSKNGYAGYIDGGASQEEFYKFIKPILEKMDGTEELLVKLNREDLLRKQRTFDNGSIPHQIHLGELHAILRRQEDFYPFLKDNREKIEKILTFRIPYYVGPLARGNSRFAWMTRKSEETITPWNFEEVVDKGASAQSFIERMTNFDKNLPNEKVLPKHSLLYEYFTVYNELTKVKYVTEGMRKPAFLSGEQKKAIVDLLFKTNRKVTVKQLKEDYFKKIECFDSVEISGVEDRFNASLGTYHDLLKIIKDKDFLDNEENEDILEDIVLTLTLFEDREMIEERLKTYAHLFDDKVMKQLKRRRYTGWGRLSRKLINGIRDKQSGKTILDFLKSDGFANRNFMQLIHDDSLTFKEDIQKAQVSGQGDSLHEHIANLAGSPAIKKGILQTVKVVDELVKVMGRHKPENIVIEMARENQTTQKGQKNSRERMKRIEEGIKELGSQILKEHPVENTQLQNEKLYLYYLQNGRDMYVDQELDINRLSDYDVDHIVPQSFLKDDSIDNKVLTRSDKARGKSDNVPSEEVVKKMKNYWRQLLNAKLITQRKFDNLTKAERGGLSELDKAGFIKRQLVETRQITKHVAQILDSRMNTKYDENDKLIREVKVITLKSKLVSDFRKDFQFYKVREINNYHHAHDAYLNAVVGTALIKKYPKLESEFVYGDYKVYDVRKMIAKSEQEIGKATAKYFFYSNIMNFFKTEITLANGEIRKRPLIETNGETGEIVWDKGRDFATVRKVLSMPQVNIVKKTEVQTGGFSKESILPKRNSDKLIARKKDWDPKKYGGFDSPTVAYSVLVVAKVEKGKSKKLKSVKELLGITIMERSSFEKNPIDFLEAKGYKEVKKDLIIKLPKYSLFELENGRKRMLASAGELQKGNELALPSKYVNFLYLASHYEKLKGSPEDNEQKQLFVEQHKHYLDEIIEQISEFSKRVILADANLDKVLSAYNKHRDKPIREQAENIIHLFTLTNLGAPAAFKYFDTTIDRKRYTSTKEVLDATLIHQSITGLYETRIDLSQLGGDGGEAAAKGSSGGSGGTLNLEDEYRLYETSAEPEVSPGSTWLSDFPQAWAETGGMGLAVRQAPLIIPLKATSTPVSIKQYPMSQEAKLGIKPHIQRLLDQGILVPCQSPWNTPLLPVKKPGTNDYRPVQDLREVNKRVEDIHPTVPNPYNLLSGLPPSHRWYTVLDLKDAFFCLRLHPTSQPLFAFEWRDPGMGISGQLTWTRLPQGFKNSPTLFNEALHRDLADFRIQHPDLILLQYVDDILLAATSELDCQQGTRALLLTLGNLGYRASAKKAQLCQKQVKYLGYLLKEGQRWLTEARKETVMGQPTPKTPRQLREFLGKAGFCRLFIPGFAEMAAPLYPLTKPGTLFNWGPDQQKAYQEIKQALLTAPALGLPDLTKPFELFVDEKQGYAKGVLTQKLGPWRRPVAYLSKKLDPVAAGWPPCLRMVAAIAVLRKDAGKLTMGQPLVILAPHAVEALVKQPPDRWLSNARMTHYQAMLLDTDRVQFGPVVALNPATLLPLPEEGAPHDCLEILAETHGTRPDLTDQPIPDADHTWYTDGSSFLQEGQRKAGAAVTTETEVIWARALPAGTSAQRAELIALTQALKMAEGKRLNVYTDSRYAFATAHIHGEIYRRRGWLTSEGREIKNKSEILALLKALFLPKRLSIIHCLGHQKGDSAEARGNRLADQAAREAAIKTPPDTSTLLAGKRTADGSEFEKRTADGSEFESPKKKAKVE

SEQ ID NO: 1914 - protein, 2091 aa, synthetic construct
MPAAKRVKLDGGDKKYSIGLDIGTNSVGWAVITDEYKVPSKKFKVLGNTDRHSIKKNLIGALLFDSGETAEATRLKRTARRRYTRRKNRICYLQEIFSNEMAKVDDSFFHRLEESFLVEEDKKHERHPIFGNIVDEVAYHEKYPTIYHLRKKLVDSTDKADLRLIYLALAHMIKFRGHFLIEGDLNPDNSDVDKLFIQLVQTYNQLFEENPINASGVDAKAILSARLSKSRRLENLIAQLPGEKKNGLFGNLIALSLGLTPNFKSNFDLAEDAKLQLSKDTYDDDLDNLLAQIGDQYADLFLAAKNLSDAILLSDILRVNTEITKAPLSASMIKRYDEHHQDLTLLKALVRQQLPEKYKEIFFDQSKNGYAGYIDGGASQEEFYKFIKPILEKMDGTEELLVKLNREDLLRKQRTFDNGSIPHQIHLGELHAILRRQEDFYPFLKDNREKIEKILTFRIPYYVGPLARGNSRFAWMTRKSEETITPWNFEEVVDKGASAQSFIERMTNFDKNLPNEKVLPKHSLLYEYFTVYNELTKVKYVTEGMRKPAFLSGEQKKAIVDLLFKTNRKVTVKQLKEDYFKKIECFDSVEISGVEDRFNASLGTYHDLLKIIKDKDFLDNEENEDILEDIVLTLTLFEDREMIEERLKTYAHLFDDKVMKQLKRRRYTGWGRLSRKLINGIRDKQSGKTILDFLKSDGFANRNFMQLIHDDSLTFKEDIQKAQVSGQGDSLHEHIANLAGSPAIKKGILQTVKVVDELVKVMGRHKPENIVIEMARENQTTQKGQKNSRERMKRIEEGIKELGSQILKEHPVENTQLQNEKLYLYYLQNGRDMYVDQELDINRLSDYDVDHIVPQSFLKDDSIDNKVLTRSDKARGKSDNVPSEEVVKKMKNYWRQLLNAKLITQRKFDNLTKAERGGLSELDKAGFIKRQLVETRQITKHVAQILDSRMNTKYDENDKLIREVKVITLKSKLVSDFRKDFQFYKVREINNYHHAHDAYLNAVVGTALIKKYPKLESEFVYGDYKVYDVRKMIAKSEQEIGKATAKYFFYSNIMNFFKTEITLANGEIRKRPLIETNGETGEIVWDKGRDFATVRKVLSMPQVNIVKKTEVQTGGFSKESILPKRNSDKLIARKKDWDPKKYGGFDSPTVAYSVLVVAKVEKGKSKKLKSVKELLGITIMERSSFEKNPIDFLEAKGYKEVKKDLIIKLPKYSLFELENGRKRMLASAGELQKGNELALPSKYVNFLYLASHYEKLKGSPEDNEQKQLFVEQHKHYLDEIIEQISEFSKRVILADANLDKVLSAYNKHRDKPIREQAENIIHLFTLTNLGAPAAFKYFDTTIDRKRYTSTKEVLDATLIHQSITGLYETRIDLSQLGGDGGGGSPAPGGTLNLEDEYRLYETSAEPEVSPGSTWLSDFPQAWAETGGMGLAVRQAPLIIPLKATSTPVSIKQYPMSQEAKLGIKPHIQRLLDQGILVPCQSPWNTPLLPVKKPGTNDYRPVQDLREVNKRVEDIHPTVPNPYNLLSGLPPSHRWYTVLDLKDAFFCLRLHPTSQPLFAFEWRDPGMGISGQLTWTRLPQGFKNSPTLFNEALHRDLADFRIQHPDLILLQYVDDILLAATSELDCQQGTRALLLTLGNLGYRASAKKAQLCQKQVKYLGYLLKEGQRWLTEARKETVMGQPTPKTPRQLREFLGKAGFCRLFIPGFAEMAAPLYPLTKPGTLFNWGPDQQKAYQEIKQALLTAPALGLPDLTKPFELFVDEKQGYAKGVLTQKLGPWRRPVAYLSKKLDPVAAGWPPCLRMVAAIAVLRKDAGKLTMGQPLVILAPHAVEALVKQPPDRWLSNARMTHYQAMLLDTDRVQFGPVVALNPATLLPLPEEGAPHDCLEILAETHGTRPDLTDQPIPDADHTWYTDGSSFLQEGQRKAGAAVTTETEVIWARALPAGTSAQRAELIALTQALKMAEGKRLNVYTDSRYAFATAHIHGEIYRRRGWLTSEGREIKNKSEILALLKALFLPKRLSIIHCLGHQKGDSAEARGNRLADQAAREAAIKTPPDTSTLLAGKRTADGSEFEKRTADGSEFESPKKKAKVE

SEQ ID NO: 1915 - protein, 2096 aa, synthetic construct
MPAAKRVKLDGGDKKYSIGLDIGTNSVGWAVITDEYKVPSKKFKVLGNTDRHSIKKNLIGALLFDSGETAEATRLKRTARRRYTRRKNRICYLQEIFSNEMAKVDDSFFHRLEESFLVEEDKKHERHPIFGNIVDEVAYHEKYPTIYHLRKKLVDSTDKADLRLIYLALAHMIKFRGHFLIEGDLNPDNSDVDKLFIQLVQTYNQLFEENPINASGVDAKAILSARLSKSRRLENLIAQLPGEKKNGLFGNLIALSLGLTPNFKSNFDLAEDAKLQLSKDTYDDDLDNLLAQIGDQYADLFLAAKNLSDAILLSDILRVNTEITKAPLSASMIKRYDEHHQDLTLLKALVRQQLPEKYKEIFFDQSKNGYAGYIDGGASQEEFYKFIKPILEKMDGTEELLVKLNREDLLRKQRTFDNGSIPHQIHLGELHAILRRQEDFYPFLKDNREKIEKILTFRIPYYVGPLARGNSRFAWMTRKSEETITPWNFEEVVDKGASAQSFIERMTNFDKNLPNEKVLPKHSLLYEYFTVYNELTKVKYVTEGMRKPAFLSGEQKKAIVDLLFKTNRKVTVKQLKEDYFKKIECFDSVEISGVEDRFNASLGTYHDLLKIIKDKDFLDNEENEDILEDIVLTLTLFEDREMIEERLKTYAHLFDDKVMKQLKRRRYTGWGRLSRKLINGIRDKQSGKTILDFLKSDGFANRNFMQLIHDDSLTFKEDIQKAQVSGQGDSLHEHIANLAGSPAIKKGILQTVKVVDELVKVMGRHKPENIVIEMARENQTTQKGQKNSRERMKRIEEGIKELGSQILKEHPVENTQLQNEKLYLYYLQNGRDMYVDQELDINRLSDYDVDHIVPQSFLKDDSIDNKVLTRSDKARGKSDNVPSEEVVKKMKNYWRQLLNAKLITQRKFDNLTKAERGGLSELDKAGFIKRQLVETRQITKHVAQILDSRMNTKYDENDKLIREVKVITLKSKLVSDFRKDFQFYKVREINNYHHAHDAYLNAVVGTALIKKYPKLESEFVYGDYKVYDVRKMIAKSEQEIGKATAKYFFYSNIMNFFKTEITLANGEIRKRPLIETNGETGEIVWDKGRDFATVRKVLSMPQVNIVKKTEVQTGGFSKESILPKRNSDKLIARKKDWDPKKYGGFDSPTVAYSVLVVAKVEKGKSKKLKSVKELLGITIMERSSFEKNPIDFLEAKGYKEVKKDLIIKLPKYSLFELENGRKRMLASAGELQKGNELALPSKYVNFLYLASHYEKLKGSPEDNEQKQLFVEQHKHYLDEIIEQISEFSKRVILADANLDKVLSAYNKHRDKPIREQAENIIHLFTLTNLGAPAAFKYFDTTIDRKRYTSTKEVLDATLIHQSITGLYETRIDLSQLGGDGGGGSEAAAKGGGGGTLNLEDEYRLYETSAEPEVSPGSTWLSDFPQAWAETGGMGLAVRQAPLIIPLKATSTPVSIKQYPMSQEAKLGIKPHIQRLLDQGILVPCQSPWNTPLLPVKKPGTNDYRPVQDLREVNKRVEDIHPTVPNPYNLLSGLPPSHRWYTVLDLKDAFFCLRLHPTSQPLFAFEWRDPGMGISGQLTWTRLPQGFKNSPTLFNEALHRDLADFRIQHPDLILLQYVDDILLAATSELDCQQGTRALLLTLGNLGYRASAKKAQLCQKQVKYLGYLLKEGQRWLTEARKETVMGQPTPKTPRQLREFLGKAGFCRLFIPGFAEMAAPLYPLTKPGTLFNWGPDQQKAYQEIKQALLTAPALGLPDLTKPFELFVDEKQGYAKGVLTQKLGPWRRPVAYLSKKLDPVAAGWPPCLRMVAAIAVLRKDAGKLTMGQPLVILAPHAVEALVKQPPDRWLSNARMTHYQAMLLDTDRVQFGPVVALNPATLLPLPEEGAPHDCLEILAETHGTRPDLTDQPIPDADHTWYTDGSSFLQEGQRKAGAAVTTETEVIWARALPAGTSAQRAELIALTQALKMAEGKRLNVYTDSRYAFATAHIHGEIYRRRGWLTSEGREIKNKSEILALLKALFLPKRLSIIHCLGHQKGDSAEARGNRLADQAAREAAIKTPPDTSTLLAGKRTADGSEFEKRTADGSEFESPKKKAKVE

SEQ ID NO: 1916 - protein, 2097 aa, synthetic construct
MPAAKRVKLDGGDKKYSIGLDIGTNSVGWAVITDEYKVPSKKFKVLGNTDRHSIKKNLIGALLFDSGETAEATRLKRTARRRYTRRKNRICYLQEIFSNEMAKVDDSFFHRLEESFLVEEDKKHERHPIFGNIVDEVAYHEKYPTIYHLRKKLVDSTDKADLRLIYLALAHMIKFRGHFLIEGDLNPDNSDVDKLFIQLVQTYNQLFEENPINASGVDAKAILSARLSKSRRLENLIAQLPGEKKNGLFGNLIALSLGLTPNFKSNFDLAEDAKLQLSKDTYDDDLDNLLAQIGDQYADLFLAAKNLSDAILLSDILRVNTEITKAPLSASMIKRYDEHHQDLTLLKALVRQQLPEKYKEIFFDQSKNGYAGYIDGGASQEEFYKFIKPILEKMDGTEELLVKLNREDLLRKQRTFDNGSIPHQIHLGELHAILRRQEDFYPFLKDNREKIEKILTFRIPYYVGPLARGNSRFAWMTRKSEETITPWNFEEVVDKGASAQSFIERMTNFDKNLPNEKVLPKHSLLYEYFTVYNELTKVKYVTEGMRKPAFLSGEQKKAIVDLLFKTNRKVTVKQLKEDYFKKIECFDSVEISGVEDRFNASLGTYHDLLKIIKDKDFLDNEENEDILEDIVLTLTLFEDREMIEERLKTYAHLFDDKVMKQLKRRRYTGWGRLSRKLINGIRDKQSGKTILDFLKSDGFANRNFMQLIHDDSLTFKEDIQKAQVSGQGDSLHEHIANLAGSPAIKKGILQTVKVVDELVKVMGRHKPENIVIEMARENQTTQKGQKNSRERMKRIEEGIKELGSQILKEHPVENTQLQNEKLYLYYLQNGRDMYVDQELDINRLSDYDVDHIVPQSFLKDDSIDNKVLTRSDKARGKSDNVPSEEVVKKMKNYWRQLLNAKLITQRKFDNLTKAERGGLSELDKAGFIKRQLVETRQITKHVAQILDSRMNTKYDENDKLIREVKVITLKSKLVSDFRKDFQFYKVREINNYHHAHDAYLNAVVGTALIKKYPKLESEFVYGDYKVYDVRKMIAKSEQEIGKATAKYFFYSNIMNFFKTEITLANGEIRKRPLIETNGETGEIVWDKGRDFATVRKVLSMPQVNIVKKTEVQTGGFSKESILPKRNSDKLIARKKDWDPKKYGGFDSPTVAYSVLVVAKVEKGKSKKLKSVKELLGITIMERSSFEKNPIDFLEAKGYKEVKKDLIIKLPKYSLFELENGRKRMLASAGELQKGNELALPSKYVNFLYLASHYEKLKGSPEDNEQKQLFVEQHKHYLDEIIEQISEFSKRVILADANLDKVLSAYNKHRDKPIREQAENIIHLFTLTNLGAPAAFKYFDTTIDRKRYTSTKEVLDATLIHQSITGLYETRIDLSQLGGDGGGGSGGSGGSGGSGGTLNLEDEYRLYETSAEPEVSPGSTWLSDFPQAWAETGGMGLAVRQAPLIIPLKATSTPVSIKQYPMSQEAKLGIKPHIQRLLDQGILVPCQSPWNTPLLPVKKPGTNDYRPVQDLREVNKRVEDIHPTVPNPYNLLSGLPPSHRWYTVLDLKDAFFCLRLHPTSQPLFAFEWRDPGMGISGQLTWTRLPQGFKNSPTLFNEALHRDLADFRIQHPDLILLQYVDDILLAATSELDCQQGTRALLLTLGNLGYRASAKKAQLCQKQVKYLGYLLKEGQRWLTEARKETVMGQPTPKTPRQLREFLGKAGFCRLFIPGFAEMAAPLYPLTKPGTLFNWGPDQQKAYQEIKQALLTAPALGLPDLTKPFELFVDEKQGYAKGVLTQKLGPWRRPVAYLSKKLDPVAAGWPPCLRMVAAIAVLRKDAGKLTMGQPLVILAPHAVEALVKQPPDRWLSNARMTHYQAMLLDTDRVQFGPVVALNPATLLPLPEEGAPHDCLEILAETHGTRPDLTDQPIPDADHTWYTDGSSFLQEGQRKAGAAVTTETEVIWARALPAGTSAQRAELIALTQALKMAEGKRLNVYTDSRYAFATAHIHGEIYRRRGWLTSEGREIKNKSEILALLKALFLPKRLSIIHCLGHQKGDSAEARGNRLADQAAREAAIKTPPDTSTLLAGKRTADGSEFEKRTADGSEFESPKKKAKVE

SEQ ID NO: 1917 - protein, 2090 aa, synthetic construct
MPAAKRVKLDGGDKKYSIGLDIGTNSVGWAVITDEYKVPSKKFKVLGNTDRHSIKKNLIGALLFDSGETAEATRLKRTARRRYTRRKNRICYLQEIFSNEMAKVDDSFFHRLEESFLVEEDKKHERHPIFGNIVDEVAYHEKYPTIYHLRKKLVDSTDKADLRLIYLALAHMIKFRGHFLIEGDLNPDNSDVDKLFIQLVQTYNQLFEENPINASGVDAKAILSARLSKSRRLENLIAQLPGEKKNGLFGNLIALSLGLTPNFKSNFDLAEDAKLQLSKDTYDDDLDNLLAQIGDQYADLFLAAKNLSDAILLSDILRVNTEITKAPLSASMIKRYDEHHQDLTLLKALVRQQLPEKYKEIFFDQSKNGYAGYIDGGASQEEFYKFIKPILEKMDGTEELLVKLNREDLLRKQRTFDNGSIPHQIHLGELHAILRRQEDFYPFLKDNREKIEKILTFRIPYYVGPLARGNSRFAWMTRKSEETITPWNFEEVVDKGASAQSFIERMTNFDKNLPNEKVLPKHSLLYEYFTVYNELTKVKYVTEGMRKPAFLSGEQKKAIVDLLFKTNRKVTVKQLKEDYFKKIECFDSVEISGVEDRFNASLGTYHDLLKIIKDKDFLDNEENEDILEDIVLTLTLFEDREMIEERLKTYAHLFDDKVMKQLKRRRYTGWGRLSRKLINGIRDKQSGKTILDFLKSDGFANRNFMQLIHDDSLTFKEDIQKAQVSGQGDSLHEHIANLAGSPAIKKGILQTVKVVDELVKVMGRHKPENIVIEMARENQTTQKGQKNSRERMKRIEEGIKELGSQILKEHPVENTQLQNEKLYLYYLQNGRDMYVDQELDINRLSDYDVDHIVPQSFLKDDSIDNKVLTRSDKARGKSDNVPSEEVVKKMKNYWRQLLNAKLITQRKFDNLTKAERGGLSELDKAGFIKRQLVETRQITKHVAQILDSRMNTKYDENDKLIREVKVITLKSKLVSDFRKDFQFYKVREINNYHHAHDAYLNAVVGTALIKKYPKLESEFVYGDYKVYDVRKMIAKSEQEIGKATAKYFFYSNIMNFFKTEITLANGEIRKRPLIETNGETGEIVWDKGRDFATVRKVLSMPQVNIVKKTEVQTGGFSKESILPKRNSDKLIARKKDWDPKKYGGFDSPTVAYSVLVVAKVEKGKSKKLKSVKELLGITIMERSSFEKNPIDFLEAKGYKEVKKDLIIKLPKYSLFELENGRKRMLASAGELQKGNELALPSKYVNFLYLASHYEKLKGSPEDNEQKQLFVEQHKHYLDEIIEQISEFSKRVILADANLDKVLSAYNKHRDKPIREQAENIIHLFTLTNLGAPAAFKYFDTTIDRKRYTSTKEVLDATLIHQSITGLYETRIDLSQLGGDGGGGGGGGGTLNLEDEYRLYETSAEPEVSPGSTWLSDFPQAWAETGGMGLAVRQAPLIIPLKATSTPVSIKQYPMSQEAKLGIKPHIQRLLDQGILVPCQSPWNTPLLPVKKPGTNDYRPVQDLREVNKRVEDIHPTVPNPYNLLSGLPPSHRWYTVLDLKDAFFCLRLHPTSQPLFAFEWRDPGMGISGQLTWTRLPQGFKNSPTLFNEALHRDLADFRIQHPDLILLQYVDDILLAATSELDCQQGTRALLLTLGNLGYRASAKKAQLCQKQVKYLGYLLKEGQRWLTEARKETVMGQPTPKTPRQLREFLGKAGFCRLFIPGFAEMAAPLYPLTKPGTLFNWGPDQQKAYQEIKQALLTAPALGLPDLTKPFELFVDEKQGYAKGVLTQKLGPWRRPVAYLSKKLDPVAAGWPPCLRMVAAIAVLRKDAGKLTMGQPLVILAPHAVEALVKQPPDRWLSNARMTHYQAMLLDTDRVQFGPVVALNPATLLPLPEEGAPHDCLEILAETHGTRPDLTDQPIPDADHTWYTDGSSFLQEGQRKAGAAVTTETEVIWARALPAGTSAQRAELIALTQALKMAEGKRLNVYTDSRYAFATAHIHGEIYRRRGWLTSEGREIKNKSEILALLKALFLPKRLSIIHCLGHQKGDSAEARGNRLADQAAREAAIKTPPDTSTLLAGKRTADGSEFEKRTADGSEFESPKKKAKVE

SEQ ID NO: 1918 - protein, 2131 aa, synthetic construct
MPAAKRVKLDGGDKKYSIGLDIGTNSVGWAVITDEYKVPSKKFKVLGNTDRHSIKKNLIGALLFDSGETAEATRLKRTARRRYTRRKNRICYLQEIFSNEMAKVDDSFFHRLEESFLVEEDKKHERHPIFGNIVDEVAYHEKYPTIYHLRKKLVDSTDKADLRLIYLALAHMIKFRGHFLIEGDLNPDNSDVDKLFIQLVQTYNQLFEENPINASGVDAKAILSARLSKSRRLENLIAQLPGEKKNGLFGNLIALSLGLTPNFKSNFDLAEDAKLQLSKDTYDDDLDNLLAQIGDQYADLFLAAKNLSDAILLSDILRVNTEITKAPLSASMIKRYDEHHQDLTLLKALVRQQLPEKYKEIFFDQSKNGYAGYIDGGASQEEFYKFIKPILEKMDGTEELLVKLNREDLLRKQRTFDNGSIPHQIHLGELHAILRRQEDFYPFLKDNREKIEKILTFRIPYYVGPLARGNSRFAWMTRKSEETITPWNFEEVVDKGASAQSFIERMTNFDKNLPNEKVLPKHSLLYEYFTVYNELTKVKYVTEGMRKPAFLSGEQKKAIVDLLFKTNRKVTVKQLKEDYFKKIECFDSVEISGVEDRFNASLGTYHDLLKIIKDKDFLDNEENEDILEDIVLTLTLFEDREMIEERLKTYAHLFDDKVMKQLKRRRYTGWGRLSRKLINGIRDKQSGKTILDFLKSDGFANRNFMQLIHDDSLTFKEDIQKAQVSGQGDSLHEHIANLAGSPAIKKGILQTVKVVDELVKVMGRHKPENIVIEMARENQTTQKGQKNSRERMKRIEEGIKELGSQILKEHPVENTQLQNEKLYLYYLQNGRDMYVDQELDINRLSDYDVDHIVPQSFLKDDSIDNKVLTRSDKARGKSDNVPSEEVVKKMKNYWRQLLNAKLITQRKFDNLTKAERGGLSELDKAGFIKRQLVETRQITKHVAQILDSRMNTKYDENDKLIREVKVITLKSKLVSDFRKDFQFYKVREINNYHHAHDAYLNAVVGTALIKKYPKLESEFVYGDYKVYDVRKMIAKSEQEIGKATAKYFFYSNIMNFFKTEITLANGEIRKRPLIETNGETGEIVWDKGRDFATVRKVLSMPQVNIVKKTEVQTGGFSKESILPKRNSDKLIARKKDWDPKKYGGFDSPTVAYSVLVVAKVEKGKSKKLKSVKELLGITIMERSSFEKNPIDFLEAKGYKEVKKDLIIKLPKYSLFELENGRKRMLASAGELQKGNELALPSKYVNFLYLASHYEKLKGSPEDNEQKQLFVEQHKHYLDEIIEQISEFSKRVILADANLDKVLSAYNKHRDKPIREQAENIIHLFTLTNLGAPAAFKYFDTTIDRKRYTSTKEVLDATLIHQSITGLYETRIDLSQLGGDGGAEAAAKEAAAKEAAAKEAAAKALEAEAAAKEAAAKEAAAKEAAAKAGGTLNLEDEYRLYETSAEPEVSPGSTWLSDFPQAWAETGGMGLAVRQAPLIIPLKATSTPVSIKQYPMSQEAKLGIKPHIQRLLDQGILVPCQSPWNTPLLPVKKPGTNDYRPVQDLREVNKRVEDIHPTVPNPYNLLSGLPPSHRWYTVLDLKDAFFCLRLHPTSQPLFAFEWRDPGMGISGQLTWTRLPQGFKNSPTLFNEALHRDLADFRIQHPDLILLQYVDDILLAATSELDCQQGTRALLLTLGNLGYRASAKKAQLCQKQVKYLGYLLKEGQRWLTEARKETVMGQPTPKTPRQLREFLGKAGFCRLFIPGFAEMAAPLYPLTKPGTLFNWGPDQQKAYQEIKQALLTAPALGLPDLTKPFELFVDEKQGYAKGVLTQKLGPWRRPVAYLSKKLDPVAAGWPPCLRMVAAIAVLRKDAGKLTMGQPLVILAPHAVEALVKQPPDRWLSNARMTHYQAMLLDTDRVQFGPVVALNPATLLPLPEEGAPHDCLEILAETHGTRPDLTDQPIPDADHTWYTDGSSFLQEGQRKAGAAVTTETEVIWARALPAGTSAQRAELIALTQALKMAEGKRLNVYTDSRYAFATAHIHGEIYRRRGWLTSEGREIKNKSEILALLKALFLPKRLSIIHCLGHQKGDSAEARGNRLADQAAREAAIKTPPDTSTLLAGKRTADGSEFEKRTADGSEFESPKKKAKVE

SEQ ID NO: 1919 - protein, 2096 aa, synthetic construct
MPAAKRVKLDGGDKKYSIGLDIGTNSVGWAVITDEYKVPSKKFKVLGNTDRHSIKKNLIGALLFDSGETAEATRLKRTARRRYTRRKNRICYLQEIFSNEMAKVDDSFFHRLEESFLVEEDKKHERHPIFGNIVDEVAYHEKYPTIYHLRKKLVDSTDKADLRLIYLALAHMIKFRGHFLIEGDLNPDNSDVDKLFIQLVQTYNQLFEENPINASGVDAKAILSARLSKSRRLENLIAQLPGEKKNGLFGNLIALSLGLTPNFKSNFDLAEDAKLQLSKDTYDDDLDNLLAQIGDQYADLFLAAKNLSDAILLSDILRVNTEITKAPLSASMIKRYDEHHQDLTLLKALVRQQLPEKYKEIFFDQSKNGYAGYIDGGASQEEFYKFIKPILEKMDGTEELLVKLNREDLLRKQRTFDNGSIPHQIHLGELHAILRRQEDFYPFLKDNREKIEKILTFRIPYYVGPLARGNSRFAWMTRKSEETITPWNFEEVVDKGASAQSFIERMTNFDKNLPNEKVLPKHSLLYEYFTVYNELTKVKYVTEGMRKPAFLSGEQKKAIVDLLFKTNRKVTVKQLKEDYFKKIECFDSVEISGVEDRFNASLGTYHDLLKIIKDKDFLDNEENEDILEDIVLTLTLFEDREMIEERLKTYAHLFDDKVMKQLKRRRYTGWGRLSRKLINGIRDKQSGKTILDFLKSDGFANRNFMQLIHDDSLTFKEDIQKAQVSGQGDSLHEHIANLAGSPAIKKGILQTVKVVDELVKVMGRHKPENIVIEMARENQTTQKGQKNSRERMKRIEEGIKELGSQILKEHPVENTQLQNEKLYLYYLQNGRDMYVDQELDINRLSDYDVDHIVPQSFLKDDSIDNKVLTRSDKARGKSDNVPSEEVVKKMKNYWRQLLNAKLITQRKFDNLTKAERGGLSELDKAGFIKRQLVETRQITKHVAQILDSRMNTKYDENDKLIREVKVITLKSKLVSDFRKDFQFYKVREINNYHHAHDAYLNAVVGTALIKKYPKLESEFVYGDYKVYDVRKMIAKSEQEIGKATAKYFFYSNIMNFFKTEITLANGEIRKRPLIETNGETGEIVWDKGRDFATVRKVLSMPQVNIVKKTEVQTGGFSKESILPKRNSDKLIARKKDWDPKKYGGFDSPTVAYSVLVVAKVEKGKSKKLKSVKELLGITIMERSSFEKNPIDFLEAKGYKEVKKDLIIKLPKYSLFELENGRKRMLASAGELQKGNELALPSKYVNFLYLASHYEKLKGSPEDNEQKQLFVEQHKHYLDEIIEQISEFSKRVILADANLDKVLSAYNKHRDKPIREQAENIIHLFTLTNLGAPAAFKYFDTTIDRKRYTSTKEVLDATLIHQSITGLYETRIDLSQLGGDGGPAPEAAAKGSSGGTLNLEDEYRLYETSAEPEVSPGSTWLSDFPQAWAETGGMGLAVRQAPLIIPLKATSTPVSIKQYPMSQEAKLGIKPHIQRLLDQGILVPCQSPWNTPLLPVKKPGTNDYRPVQDLREVNKRVEDIHPTVPNPYNLLSGLPPSHRWYTVLDLKDAFFCLRLHPTSQPLFAFEWRDPGMGISGQLTWTRLPQGFKNSPTLFNEALHRDLADFRIQHPDLILLQYVDDILLAATSELDCQQGTRALLLTLGNLGYRASAKKAQLCQKQVKYLGYLLKEGQRWLTEARKETVMGQPTPKTPRQLREFLGKAGFCRLFIPGFAEMAAPLYPLTKPGTLFNWGPDQQKAYQEIKQALLTAPALGLPDLTKPFELFVDEKQGYAKGVLTQKLGPWRRPVAYLSKKLDPVAAGWPPCLRMVAAIAVLRKDAGKLTMGQPLVILAPHAVEALVKQPPDRWLSNARMTHYQAMLLDTDRVQFGPVVALNPATLLPLPEEGAPHDCLEILAETHGTRPDLTDQPIPDADHTWYTDGSSFLQEGQRKAGAAVTTETEVIWARALPAGTSAQRAELIALTQALKMAEGKRLNVYTDSRYAFATAHIHGEIYRRRGWLTSEGREIKNKSEILALLKALFLPKRLSIIHCLGHQKGDSAEARGNRLADQAAREAAIKTPPDTSTLLAGKRTADGSEFEKRTADGSEFESPKKKAKVE

SEQ ID NO: 1920 - protein, 2096 aa, synthetic construct
MPAAKRVKLDGGDKKYSIGLDIGTNSVGWAVITDEYKVPSKKFKVLGNTDRHSIKKNLIGALLFDSGETAEATRLKRTARRRYTRRKNRICYLQEIFSNEMAKVDDSFFHRLEESFLVEEDKKHERHPIFGNIVDEVAYHEKYPTIYHLRKKLVDSTDKADLRLIYLALAHMIKFRGHFLIEGDLNPDNSDVDKLFIQLVQTYNQLFEENPINASGVDAKAILSARLSKSRRLENLIAQLPGEKKNGLFGNLIALSLGLTPNFKSNFDLAEDAKLQLSKDTYDDDLDNLLAQIGDQYADLFLAAKNLSDAILLSDILRVNTEITKAPLSASMIKRYDEHHQDLTLLKALVRQQLPEKYKEIFFDQSKNGYAGYIDGGASQEEFYKFIKPILEKMDGTEELLVKLNREDLLRKQRTFDNGSIPHQIHLGELHAILRRQEDFYPFLKDNREKIEKILTFRIPYYVGPLARGNSRFAWMTRKSEETITPWNFEEVVDKGASAQSFIERMTNFDKNLPNEKVLPKHSLLYEYFTVYNELTKVKYVTEGMRKPAFLSGEQKKAIVDLLFKTNRKVTVKQLKEDYFKKIECFDSVEISGVEDRFNASLGTYHDLLKIIKDKDFLDNEENEDILEDIVLTLTLFEDREMIEERLKTYAHLFDDKVMKQLKRRRYTGWGRLSRKLINGIRDKQSGKTILDFLKSDGFANRNFMQLIHDDSLTFKEDIQKAQVSGQGDSLHEHIANLAGSPAIKKGILQTVKVVDELVKVMGRHKPENIVIEMARENQTTQKGQKNSRERMKRIEEGIKELGSQILKEHPVENTQLQNEKLYLYYLQNGRDMYVDQELDINRLSDYDVDHIVPQSFLKDDSIDNKVLTRSDKARGKSDNVPSEEVVKKMKNYWRQLLNAKLITQRKFDNLTKAERGGLSELDKAGFIKRQLVETRQITKHVAQILDSRMNTKYDENDKLIREVKVITLKSKLVSDFRKDFQFYKVREINNYHHAHDAYLNAVVGTALIKKYPKLESEFVYGDYKVYDVRKMIAKSEQEIGKATAKYFFYSNIMNFFKTEITLANGEIRKRPLIETNGETGEIVWDKGRDFATVRKVLSMPQVNIVKKTEVQTGGFSKESILPKRNSDKLIARKKDWDPKKYGGFDSPTVAYSVLVVAKVEKGKSKKLKSVKELLGITIMERSSFEKNPIDFLEAKGYKEVKKDLIIKLPKYSLFELENGRKRMLASAGELQKGNELALPSKYVNFLYLASHYEKLKGSPEDNEQKQLFVEQHKHYLDEIIEQISEFSKRVILADANLDKVLSAYNKHRDKPIREQAENIIHLFTLTNLGAPAAFKYFDTTIDRKRYTSTKEVLDATLIHQSITGLYETRIDLSQLGGDGGGGGEAAAKGGSGGTLNLEDEYRLYETSAEPEVSPGSTWLSDFPQAWAETGGMGLAVRQAPLIIPLKATSTPVSIKQYPMSQEAKLGIKPHIQRLLDQGILVPCQSPWNTPLLPVKKPGTNDYRPVQDLREVNKRVEDIHPTVPNPYNLLSGLPPSHRWYTVLDLKDAFFCLRLHPTSQPLFAFEWRDPGMGISGQLTWTRLPQGFKNSPTLFNEALHRDLADFRIQHPDLILLQYVDDILLAATSELDCQQGTRALLLTLGNLGYRASAKKAQLCQKQVKYLGYLLKEGQRWLTEARKETVMGQPTPKTPRQLREFLGKAGFCRLFIPGFAEMAAPLYPLTKPGTLFNWGPDQQKAYQEIKQALLTAPALGLPDLTKPFELFVDEKQGYAKGVLTQKLGPWRRPVAYLSKKLDPVAAGWPPCLRMVAAIAVLRKDAGKLTMGQPLVILAPHAVEALVKQPPDRWLSNARMTHYQAMLLDTDRVQFGPVVALNPATLLPLPEEGAPHDCLEILAETHGTRPDLTDQPIPDADHTWYTDGSSFLQEGQRKAGAAVTTETEVIWARALPAGTSAQRAELIALTQALKMAEGKRLNVYTDSRYAFATAHIHGEIYRRRGWLTSEGREIKNKSEILALLKALFLPKRLSIIHCLGHQKGDSAEARGNRLADQAAREAAIKTPPDTSTLLAGKRTADGSEFEKRTADGSEFESPKKKAKVE

SEQ ID NO: 1921 - protein, 2096 aa, synthetic construct
MPAAKRVKLDGGDKKYSIGLDIGTNSVGWAVITDEYKVPSKKFKVLGNTDRHSIKKNLIGALLFDSGETAEATRLKRTARRRYTRRKNRICYLQEIFSNEMAKVDDSFFHRLEESFLVEEDKKHERHPIFGNIVDEVAYHEKYPTIYHLRKKLVDSTDKADLRLIYLALAHMIKFRGHFLIEGDLNPDNSDVDKLFIQLVQTYNQLFEENPINASGVDAKAILSARLSKSRRLENLIAQLPGEKKNGLFGNLIALSLGLTPNFKSNFDLAEDAKLQLSKDTYDDDLDNLLAQIGDQYADLFLAAKNLSDAILLSDILRVNTEITKAPLSASMIKRYDEHHQDLTLLKALVRQQLPEKYKEIFFDQSKNGYAGYIDGGASQEEFYKFIKPILEKMDGTEELLVKLNREDLLRKQRTFDNGSIPHQIHLGELHAILRRQEDFYPFLKDNREKIEKILTFRIPYYVGPLARGNSRFAWMTRKSEETITPWNFEEVVDKGASAQSFIERMTNFDKNLPNEKVLPKHSLLYEYFTVYNELTKVKYVTEGMRKPAFLSGEQKKAIVDLLFKTNRKVTVKQLKEDYFKKIECFDSVEISGVEDRFNASLGTYHDLLKIIKDKDFLDNEENEDILEDIVLTLTLFEDREMIEERLKTYAHLFDDKVMKQLKRRRYTGWGRLSRKLINGIRDKQSGKTILDFLKSDGFANRNFMQLIHDDSLTFKEDIQKAQVSGQGDSLHEHIANLAGSPAIKKGILQTVKVVDELVKVMGRHKPENIVIEMARENQTTQKGQKNSRERMKRIEEGIKELGSQILKEHPVENTQLQNEKLYLYYLQNGRDMYVDQELDINRLSDYDVDHIVPQSFLKDDSIDNKVLTRSDKARGKSDNVPSEEVVKKMKNYWRQLLNAKLITQRKFDNLTKAERGGLSELDKAGFIKRQLVETRQITKHVAQILDSRMNTKYDENDKLIREVKVITLKSKLVSDFRKDFQFYKVREINNYHHAHDAYLNAVVGTALIKKYPKLESEFVYGDYKVYDVRKMIAKSEQEIGKATAKYFFYSNIMNFFKTEITLANGEIRKRPLIETNGETGEIVWDKGRDFATVRKVLSMPQVNIVKKTEVQTGGFSKESILPKRNSDKLIARKKDWDPKKYGGFDSPTVAYSVLVVAKVEKGKSKKLKSVKELLGITIMERSSFEKNPIDFLEAKGYKEVKKDLIIKLPKYSLFELENGRKRMLASAGELQKGNELALPSKYVNFLYLASHYEKLKGSPEDNEQKQLFVEQHKHYLDEIIEQISEFSKRVILADANLDKVLSAYNKHRDKPIREQAENIIHLFTLTNLGAPAAFKYFDTTIDRKRYTSTKEVLDATLIHQSITGLYETRIDLSQLGGDGGEAAAKGSSGGGGGTLNLEDEYRLYETSAEPEVSPGSTWLSDFPQAWAETGGMGLAVRQAPLIIPLKATSTPVSIKQYPMSQEAKLGIKPHIQRLLDQGILVPCQSPWNTPLLPVKKPGTNDYRPVQDLREVNKRVEDIHPTVPNPYNLLSGLPPSHRWYTVLDLKDAFFCLRLHPTSQPLFAFEWRDPGMGISGQLTWTRLPQGFKNSPTLFNEALHRDLADFRIQHPDLILLQYVDDILLAATSELDCQQGTRALLLTLGNLGYRASAKKAQLCQKQVKYLGYLLKEGQRWLTEARKETVMGQPTPKTPRQLREFLGKAGFCRLFIPGFAEMAAPLYPLTKPGTLFNWGPDQQKAYQEIKQALLTAPALGLPDLTKPFELFVDEKQGYAKGVLTQKLGPWRRPVAYLSKKLDPVAAGWPPCLRMVAAIAVLRKDAGKLTMGQPLVILAPHAVEALVKQPPDRWLSNARMTHYQAMLLDTDRVQFGPVVALNPATLLPLPEEGAPHDCLEILAETHGTRPDLTDQPIPDADHTWYTDGSSFLQEGQRKAGAAVTTETEVIWARALPAGTSAQRAELIALTQALKMAEGKRLNVYTDSRYAFATAHIHGEIYRRRGWLTSEGREIKNKSEILALLKALFLPKRLSIIHCLGHQKGDSAEARGNRLADQAAREAAIKTPPDTSTLLAGKRTADGSEFEKRTADGSEFESPKKKAKVE

SEQ ID NO: 1922 - protein, 2093 aa, synthetic construct
MPAAKRVKLDGGDKKYSIGLDIGTNSVGWAVITDEYKVPSKKFKVLGNTDRHSIKKNLIGALLFDSGETAEATRLKRTARRRYTRRKNRICYLQEIFSNEMAKVDDSFFHRLEESFLVEEDKKHERHPIFGNIVDEVAYHEKYPTIYHLRKKLVDSTDKADLRLIYLALAHMIKFRGHFLIEGDLNPDNSDVDKLFIQLVQTYNQLFEENPINASGVDAKAILSARLSKSRRLENLIAQLPGEKKNGLFGNLIALSLGLTPNFKSNFDLAEDAKLQLSKDTYDDDLDNLLAQIGDQYADLFLAAKNLSDAILLSDILRVNTEITKAPLSASMIKRYDEHHQDLTLLKALVRQQLPEKYKEIFFDQSKNGYAGYIDGGASQEEFYKFIKPILEKMDGTEELLVKLNREDLLRKQRTFDNGSIPHQIHLGELHAILRRQEDFYPFLKDNREKIEKILTFRIPYYVGPLARGNSRFAWMTRKSEETITPWNFEEVVDKGASAQSFIERMTNFDKNLPNEKVLPKHSLLYEYFTVYNELTKVKYVTEGMRKPAFLSGEQKKAIVDLLFKTNRKVTVKQLKEDYFKKIECFDSVEISGVEDRFNASLGTYHDLLKIIKDKDFLDNEENEDILEDIVLTLTLFEDREMIEERLKTYAHLFDDKVMKQLKRRRYTGWGRLSRKLINGIRDKQSGKTILDFLKSDGFANRNFMQLIHDDSLTFKEDIQKAQVSGQGDSLHEHIANLAGSPAIKKGILQTVKVVDELVKVMGRHKPENIVIEMARENQTTQKGQKNSRERMKRIEEGIKELGSQILKEHPVENTQLQNEKLYLYYLQNGRDMYVDQELDINRLSDYDVDHIVPQSFLKDDSIDNKVLTRSDKARGKSDNVPSEEVVKKMKNYWRQLLNAKLITQRKFDNLTKAERGGLSELDKAGFIKRQLVETRQITKHVAQILDSRMNTKYDENDKLIREVKVITLKSKLVSDFRKDFQFYKVREINNYHHAHDAYLNAVVGTALIKKYPKLESEFVYGDYKVYDVRKMIAKSEQEIGKATAKYFFYSNIMNFFKTEITLANGEIRKRPLIETNGETGEIVWDKGRDFATVRKVLSMPQVNIVKKTEVQTGGFSKESILPKRNSDKLIARKKDWDPKKYGGFDSPTVAYSVLVVAKVEKGKSKKLKSVKELLGITIMERSSFEKNPIDFLEAKGYKEVKKDLIIKLPKYSLFELENGRKRMLASAGELQKGNELALPSKYVNFLYLASHYEKLKGSPEDNEQKQLFVEQHKHYLDEIIEQISEFSKRVILADANLDKVLSAYNKHRDKPIREQAENIIHLFTLTNLGAPAAFKYFDTTIDRKRYTSTKEVLDATLIHQSITGLYETRIDLSQLGGDGGGGSEAAAKGGTLNLEDEYRLYETSAEPEVSPGSTWLSDFPQAWAETGGMGLAVRQAPLIIPLKATSTPVSIKQYPMSQEAKLGIKPHIQRLLDQGILVPCQSPWNTPLLPVKKPGTNDYRPVQDLREVNKRVEDIHPTVPNPYNLLSGLPPSHRWYTVLDLKDAFFCLRLHPTSQPLFAFEWRDPGMGISGQLTWTRLPQGFKNSPTLFNEALHRDLADFRIQHPDLILLQYVDDILLAATSELDCQQGTRALLLTLGNLGYRASAKKAQLCQKQVKYLGYLLKEGQRWLTEARKETVMGQPTPKTPRQLREFLGKAGFCRLFIPGFAEMAAPLYPLTKPGTLFNWGPDQQKAYQEIKQALLTAPALGLPDLTKPFELFVDEKQGYAKGVLTQKLGPWRRPVAYLSKKLDPVAAGWPPCLRMVAAIAVLRKDAGKLTMGQPLVILAPHAVEALVKQPPDRWLSNARMTHYQAMLLDTDRVQFGPVVALNPATLLPLPEEGAPHDCLEILAETHGTRPDLTDQPIPDADHTWYTDGSSFLQEGQRKAGAAVTTETEVIWARALPAGTSAQRAELIALTQALKMAEGKRLNVYTDSRYAFATAHIHGEIYRRRGWLTSEGREIKNKSEILALLKALFLPKRLSIIHCLGHQKGDSAEARGNRLADQAAREAAIKTPPDTSTLLAGKRTADGSEFEKRTADGSEFESPKKKAKVE

SEQ ID NO: 1923 - protein, 2100 aa, synthetic construct
MPAAKRVKLDGGDKKYSIGLDIGTNSVGWAVITDEYKVPSKKFKVLGNTDRHSIKKNLIGALLFDSGETAEATRLKRTARRRYTRRKNRICYLQEIFSNEMAKVDDSFFHRLEESFLVEEDKKHERHPIFGNIVDEVAYHEKYPTIYHLRKKLVDSTDKADLRLIYLALAHMIKFRGHFLIEGDLNPDNSDVDKLFIQLVQTYNQLFEENPINASGVDAKAILSARLSKSRRLENLIAQLPGEKKNGLFGNLIALSLGLTPNFKSNFDLAEDAKLQLSKDTYDDDLDNLLAQIGDQYADLFLAAKNLSDAILLSDILRVNTEITKAPLSASMIKRYDEHHQDLTLLKALVRQQLPEKYKEIFFDQSKNGYAGYIDGGASQEEFYKFIKPILEKMDGTEELLVKLNREDLLRKQRTFDNGSIPHQIHLGELHAILRRQEDFYPFLKDNREKIEKILTFRIPYYVGPLARGNSRFAWMTRKSEETITPWNFEEVVDKGASAQSFIERMTNFDKNLPNEKVLPKHSLLYEYFTVYNELTKVKYVTEGMRKPAFLSGEQKKAIVDLLFKTNRKVTVKQLKEDYFKKIECFDSVEISGVEDRFNASLGTYHDLLKIIKDKDFLDNEENEDILEDIVLTLTLFEDREMIEERLKTYAHLFDDKVMKQLKRRRYTGWGRLSRKLINGIRDKQSGKTILDFLKSDGFANRNFMQLIHDDSLTFKEDIQKAQVSGQGDSLHEHIANLAGSPAIKKGILQTVKVVDELVKVMGRHKPENIVIEMARENQTTQKGQKNSRERMKRIEEGIKELGSQILKEHPVENTQLQNEKLYLYYLQNGRDMYVDQELDINRLSDYDVDHIVPQSFLKDDSIDNKVLTRSDKARGKSDNVPSEEVVKKMKNYWRQLLNAKLITQRKFDNLTKAERGGLSELDKAGFIKRQLVETRQITKHVAQILDSRMNTKYDENDKLIREVKVITLKSKLVSDFRKDFQFYKVREINNYHHAHDAYLNAVVGTALIKKYPKLESEFVYGDYKVYDVRKMIAKSEQEIGKATAKYFFYSNIMNFFKTEITLANGEIRKRPLIETNGETGEIVWDKGRDFATVRKVLSMPQVNIVKKTEVQTGGFSKESILPKRNSDKLIARKKDWDPKKYGGFDSPTVAYSVLVVAKVEKGKSKKLKSVKELLGITIMERSSFEKNPIDFLEAKGYKEVKKDLIIKLPKYSLFELENGRKRMLASAGELQKGNELALPSKYVNFLYLASHYEKLKGSPEDNEQKQLFVEQHKHYLDEIIEQISEFSKRVILADANLDKVLSAYNKHRDKPIREQAENIIHLFTLTNLGAPAAFKYFDTTIDRKRYTSTKEVLDATLIHQSITGLYETRIDLSQLGGDGGGSSGSSGSSGSSGSSGGTLNLEDEYRLYETSAEPEVSPGSTWLSDFPQAWAETGGMGLAVRQAPLIIPLKATSTPVSIKQYPMSQEAKLGIKPHIQRLLDQGILVPCQSPWNTPLLPVKKPGTNDYRPVQDLREVNKRVEDIHPTVPNPYNLLSGLPPSHRWYTVLDLKDAFFCLRLHPTSQPLFAFEWRDPGMGISGQLTWTRLPQGFKNSPTLFNEALHRDLADFRIQHPDLILLQYVDDILLAATSELDCQQGTRALLLTLGNLGYRASAKKAQLCQKQVKYLGYLLKEGQRWLTEARKETVMGQPTPKTPRQLREFLGKAGFCRLFIPGFAEMAAPLYPLTKPGTLFNWGPDQQKAYQEIKQALLTAPALGLPDLTKPFELFVDEKQGYAKGVLTQKLGPWRRPVAYLSKKLDPVAAGWPPCLRMVAAIAVLRKDAGKLTMGQPLVILAPHAVEALVKQPPDRWLSNARMTHYQAMLLDTDRVQFGPVVALNPATLLPLPEEGAPHDCLEILAETHGTRPDLTDQPIPDADHTWYTDGSSFLQEGQRKAGAAVTTETEVIWARALPAGTSAQRAELIALTQALKMAEGKRLNVYTDSRYAFATAHIHGEIYRRRGWLTSEGREIKNKSEILALLKALFLPKRLSIIHCLGHQKGDSAEARGNRLADQAAREAAIKTPPDTSTLLAGKRTADGSEFEKRTADGSEFESPKKKAKVE

SEQ ID NO: 1924 - protein, 2096 aa, synthetic construct
MPAAKRVKLDGGDKKYSIGLDIGTNSVGWAVITDEYKVPSKKFKVLGNTDRHSIKKNLIGALLFDSGETAEATRLKRTARRRYTRRKNRICYLQEIFSNEMAKVDDSFFHRLEESFLVEEDKKHERHPIFGNIVDEVAYHEKYPTIYHLRKKLVDSTDKADLRLIYLALAHMIKFRGHFLIEGDLNPDNSDVDKLFIQLVQTYNQLFEENPINASGVDAKAILSARLSKSRRLENLIAQLPGEKKNGLFGNLIALSLGLTPNFKSNFDLAEDAKLQLSKDTYDDDLDNLLAQIGDQYADLFLAAKNLSDAILLSDILRVNTEITKAPLSASMIKRYDEHHQDLTLLKALVRQQLPEKYKEIFFDQSKNGYAGYIDGGASQEEFYKFIKPILEKMDGTEELLVKLNREDLLRKQRTFDNGSIPHQIHLGELHAILRRQEDFYPFLKDNREKIEKILTFRIPYYVGPLARGNSRFAWMTRKSEETITPWNFEEVVDKGASAQSFIERMTNFDKNLPNEKVLPKHSLLYEYFTVYNELTKVKYVTEGMRKPAFLSGEQKKAIVDLLFKTNRKVTVKQLKEDYFKKIECFDSVEISGVEDRFNASLGTYHDLLKIIKDKDFLDNEENEDILEDIVLTLTLFEDREMIEERLKTYAHLFDDKVMKQLKRRRYTGWGRLSRKLINGIRDKQSGKTILDFLKSDGFANRNFMQLIHDDSLTFKEDIQKAQVSGQGDSLHEHIANLAGSPAIKKGILQTVKVVDELVKVMGRHKPENIVIEMARENQTTQKGQKNSRERMKRIEEGIKELGSQILKEHPVENTQLQNEKLYLYYLQNGRDMYVDQELDINRLSDYDVDHIVPQSFLKDDSIDNKVLTRSDKARGKSDNVPSEEVVKKMKNYWRQLLNAKLITQRKFDNLTKAERGGLSELDKAGFIKRQLVETRQITKHVAQILDSRMNTKYDENDKLIREVKVITLKSKLVSDFRKDFQFYKVREINNYHHAHDAYLNAVVGTALIKKYPKLESEFVYGDYKVYDVRKMIAKSEQEIGKATAKYFFYSNIMNFFKTEITLANGEIRKRPLIETNGETGEIVWDKGRDFATVRKVLSMPQVNIVKKTEVQTGGFSKESILPKRNSDKLIARKKDWDPKKYGGFDSPTVAYSVLVVAKVEKGKSKKLKSVKELLGITIMERSSFEKNPIDFLEAKGYKEVKKDLIIKLPKYSLFELENGRKRMLASAGELQKGNELALPSKYVNFLYLASHYEKLKGSPEDNEQKQLFVEQHKHYLDEIIEQISEFSKRVILADANLDKVLSAYNKHRDKPIREQAENIIHLFTLTNLGAPAAFKYFDTTIDRKRYTSTKEVLDATLIHQSITGLYETRIDLSQLGGDGGPAPAPAPAPAPGGTLNLEDEYRLYETSAEPEVSPGSTWLSDFPQAWAETGGMGLAVRQAPLIIPLKATSTPVSIKQYPMSQEAKLGIKPHIQRLLDQGILVPCQSPWNTPLLPVKKPGTNDYRPVQDLREVNKRVEDIHPTVPNPYNLLSGLPPSHRWYTVLDLKDAFFCLRLHPTSQPLFAFEWRDPGMGISGQLTWTRLPQGFKNSPTLFNEALHRDLADFRIQHPDLILLQYVDDILLAATSELDCQQGTRALLLTLGNLGYRASAKKAQLCQKQVKYLGYLLKEGQRWLTEARKETVMGQPTPKTPRQLREFLGKAGFCRLFIPGFAEMAAPLYPLTKPGTLFNWGPDQQKAYQEIKQALLTAPALGLPDLTKPFELFVDEKQGYAKGVLTQKLGPWRRPVAYLSKKLDPVAAGWPPCLRMVAAIAVLRKDAGKLTMGQPLVILAPHAVEALVKQPPDRWLSNARMTHYQAMLLDTDRVQFGPVVALNPATLLPLPEEGAPHDCLEILAETHGTRPDLTDQPIPDADHTWYTDGSSFLQEGQRKAGAAVTTETEVIWARALPAGTSAQRAELIALTQALKMAEGKRLNVYTDSRYAFATAHIHGEIYRRRGWLTSEGREIKNKSEILALLKALFLPKRLSIIHCLGHQKGDSAEARGNRLADQAAREAAIKTPPDTSTLLAGKRTADGSEFEKRTADGSEFESPKKKAKVE

SEQ ID NO: 1925 - protein, 2094 aa, synthetic construct
MPAAKRVKLDGGDKKYSIGLDIGTNSVGWAVITDEYKVPSKKFKVLGNTDRHSIKKNLIGALLFDSGETAEATRLKRTARRRYTRRKNRICYLQEIFSNEMAKVDDSFFHRLEESFLVEEDKKHERHPIFGNIVDEVAYHEKYPTIYHLRKKLVDSTDKADLRLIYLALAHMIKFRGHFLIEGDLNPDNSDVDKLFIQLVQTYNQLFEENPINASGVDAKAILSARLSKSRRLENLIAQLPGEKKNGLFGNLIALSLGLTPNFKSNFDLAEDAKLQLSKDTYDDDLDNLLAQIGDQYADLFLAAKNLSDAILLSDILRVNTEITKAPLSASMIKRYDEHHQDLTLLKALVRQQLPEKYKEIFFDQSKNGYAGYIDGGASQEEFYKFIKPILEKMDGTEELLVKLNREDLLRKQRTFDNGSIPHQIHLGELHAILRRQEDFYPFLKDNREKIEKILTFRIPYYVGPLARGNSRFAWMTRKSEETITPWNFEEVVDKGASAQSFIERMTNFDKNLPNEKVLPKHSLLYEYFTVYNELTKVKYVTEGMRKPAFLSGEQKKAIVDLLFKTNRKVTVKQLKEDYFKKIECFDSVEISGVEDRFNASLGTYHDLLKIIKDKDFLDNEENEDILEDIVLTLTLFEDREMIEERLKTYAHLFDDKVMKQLKRRRYTGWGRLSRKLINGIRDKQSGKTILDFLKSDGFANRNFMQLIHDDSLTFKEDIQKAQVSGQGDSLHEHIANLAGSPAIKKGILQTVKVVDELVKVMGRHKPENIVIEMARENQTTQKGQKNSRERMKRIEEGIKELGSQILKEHPVENTQLQNEKLYLYYLQNGRDMYVDQELDINRLSDYDVDHIVPQSFLKDDSIDNKVLTRSDKARGKSDNVPSEEVVKKMKNYWRQLLNAKLITQRKFDNLTKAERGGLSELDKAGFIKRQLVETRQITKHVAQILDSRMNTKYDENDKLIREVKVITLKSKLVSDFRKDFQFYKVREINNYHHAHDAYLNAVVGTALIKKYPKLESEFVYGDYKVYDVRKMIAKSEQEIGKATAKYFFYSNIMNFFKTEITLANGEIRKRPLIETNGETGEIVWDKGRDFATVRKVLSMPQVNIVKKTEVQTGGFSKESILPKRNSDKLIARKKDWDPKKYGGFDSPTVAYSVLVVAKVEKGKSKKLKSVKELLGITIMERSSFEKNPIDFLEAKGYKEVKKDLIIKLPKYSLFELENGRKRMLASAGELQKGNELALPSKYVNFLYLASHYEKLKGSPEDNEQKQLFVEQHKHYLDEIIEQISEFSKRVILADANLDKVLSAYNKHRDKPIREQAENIIHLFTLTNLGAPAAFKYFDTTIDRKRYTSTKEVLDATLIHQSITGLYETRIDLSQLGGDGGGSSGSSGSSGGTLNLEDEYRLYETSAEPEVSPGSTWLSDFPQAWAETGGMGLAVRQAPLIIPLKATSTPVSIKQYPMSQEAKLGIKPHIQRLLDQGILVPCQSPWNTPLLPVKKPGTNDYRPVQDLREVNKRVEDIHPTVPNPYNLLSGLPPSHRWYTVLDLKDAFFCLRLHPTSQPLFAFEWRDPGMGISGQLTWTRLPQGFKNSPTLFNEALHRDLADFRIQHPDLILLQYVDDILLAATSELDCQQGTRALLLTLGNLGYRASAKKAQLCQKQVKYLGYLLKEGQRWLTEARKETVMGQPTPKTPRQLREFLGKAGFCRLFIPGFAEMAAPLYPLTKPGTLFNWGPDQQKAYQEIKQALLTAPALGLPDLTKPFELFVDEKQGYAKGVLTQKLGPWRRPVAYLSKKLDPVAAGWPPCLRMVAAIAVLRKDAGKLTMGQPLVILAPHAVEALVKQPPDRWLSNARMTHYQAMLLDTDRVQFGPVVALNPATLLPLPEEGAPHDCLEILAETHGTRPDLTDQPIPDADHTWYTDGSSFLQEGQRKAGAAVTTETEVIWARALPAGTSAQRAELIALTQALKMAEGKRLNVYTDSRYAFATAHIHGEIYRRRGWLTSEGREIKNKSEILALLKALFLPKRLSIIHCLGHQKGDSAEARGNRLADQAAREAAIKTPPDTSTLLAGKRTADGSEFEKRTADGSEFESPKKKAKVE

SEQ ID NO: 1926 - protein, 2094 aa, synthetic construct
MPAAKRVKLDGGDKKYSIGLDIGTNSVGWAVITDEYKVPSKKFKVLGNTDRHSIKKNLIGALLFDSGETAEATRLKRTARRRYTRRKNRICYLQEIFSNEMAKVDDSFFHRLEESFLVEEDKKHERHPIFGNIVDEVAYHEKYPTIYHLRKKLVDSTDKADLRLIYLALAHMIKFRGHFLIEGDLNPDNSDVDKLFIQLVQTYNQLFEENPINASGVDAKAILSARLSKSRRLENLIAQLPGEKKNGLFGNLIALSLGLTPNFKSNFDLAEDAKLQLSKDTYDDDLDNLLAQIGDQYADLFLAAKNLSDAILLSDILRVNTEITKAPLSASMIKRYDEHHQDLTLLKALVRQQLPEKYKEIFFDQSKNGYAGYIDGGASQEEFYKFIKPILEKMDGTEELLVKLNREDLLRKQRTFDNGSIPHQIHLGELHAILRRQEDFYPFLKDNREKIEKILTFRIPYYVGPLARGNSRFAWMTRKSEETITPWNFEEVVDKGASAQSFIERMTNFDKNLPNEKVLPKHSLLYEYFTVYNELTKVKYVTEGMRKPAFLSGEQKKAIVDLLFKTNRKVTVKQLKEDYFKKIECFDSVEISGVEDRFNASLGTYHDLLKIIKDKDFLDNEENEDILEDIVLTLTLFEDREMIEERLKTYAHLFDDKVMKQLKRRRYTGWGRLSRKLINGIRDKQSGKTILDFLKSDGFANRNFMQLIHDDSLTFKEDIQKAQVSGQGDSLHEHIANLAGSPAIKKGILQTVKVVDELVKVMGRHKPENIVIEMARENQTTQKGQKNSRERMKRIEEGIKELGSQILKEHPVENTQLQNEKLYLYYLQNGRDMYVDQELDINRLSDYDVDHIVPQSFLKDDSIDNKVLTRSDKARGKSDNVPSEEVVKKMKNYWRQLLNAKLITQRKFDNLTKAERGGLSELDKAGFIKRQLVETRQITKHVAQILDSRMNTKYDENDKLIREVKVITLKSKLVSDFRKDFQFYKVREINNYHHAHDAYLNAVVGTALIKKYPKLESEFVYGDYKVYDVRKMIAKSEQEIGKATAKYFFYSNIMNFFKTEITLANGEIRKRPLIETNGETGEIVWDKGRDFATVRKVLSMPQVNIVKKTEVQTGGFSKESILPKRNSDKLIARKKDWDPKKYGGFDSPTVAYSVLVVAKVEKGKSKKLKSVKELLGITIMERSSFEKNPIDFLEAKGYKEVKKDLIIKLPKYSLFELENGRKRMLASAGELQKGNELALPSKYVNFLYLASHYEKLKGSPEDNEQKQLFVEQHKHYLDEIIEQISEFSKRVILADANLDKVLSAYNKHRDKPIREQAENIIHLFTLTNLGAPAAFKYFDTTIDRKRYTSTKEVLDATLIHQSITGLYETRIDLSQLGGDGGGSSGGSPAPGGTLNLEDEYRLYETSAEPEVSPGSTWLSDFPQAWAETGGMGLAVRQAPLIIPLKATSTPVSIKQYPMSQEAKLGIKPHIQRLLDQGILVPCQSPWNTPLLPVKKPGTNDYRPVQDLREVNKRVEDIHPTVPNPYNLLSGLPPSHRWYTVLDLKDAFFCLRLHPTSQPLFAFEWRDPGMGISGQLTWTRLPQGFKNSPTLFNEALHRDLADFRIQHPDLILLQYVDDILLAATSELDCQQGTRALLLTLGNLGYRASAKKAQLCQKQVKYLGYLLKEGQRWLTEARKETVMGQPTPKTPRQLREFLGKAGFCRLFIPGFAEMAAPLYPLTKPGTLFNWGPDQQKAYQEIKQALLTAPALGLPDLTKPFELFVDEKQGYAKGVLTQKLGPWRRPVAYLSKKLDPVAAGWPPCLRMVAAIAVLRKDAGKLTMGQPLVILAPHAVEALVKQPPDRWLSNARMTHYQAMLLDTDRVQFGPVVALNPATLLPLPEEGAPHDCLEILAETHGTRPDLTDQPIPDADHTWYTDGSSFLQEGQRKAGAAVTTETEVIWARALPAGTSAQRAELIALTQALKMAEGKRLNVYTDSRYAFATAHIHGEIYRRRGWLTSEGREIKNKSEILALLKALFLPKRLSIIHCLGHQKGDSAEARGNRLADQAAREAAIKTPPDTSTLLAGKRTADGSEFEKRTADGSEFESPKKKAKVE

SEQ ID NO: 1927 - protein, 2091 aa, synthetic construct
MPAAKRVKLDGGDKKYSIGLDIGTNSVGWAVITDEYKVPSKKFKVLGNTDRHSIKKNLIGALLFDSGETAEATRLKRTARRRYTRRKNRICYLQEIFSNEMAKVDDSFFHRLEESFLVEEDKKHERHPIFGNIVDEVAYHEKYPTIYHLRKKLVDSTDKADLRLIYLALAHMIKFRGHFLIEGDLNPDNSDVDKLFIQLVQTYNQLFEENPINASGVDAKAILSARLSKSRRLENLIAQLPGEKKNGLFGNLIALSLGLTPNFKSNFDLAEDAKLQLSKDTYDDDLDNLLAQIGDQYADLFLAAKNLSDAILLSDILRVNTEITKAPLSASMIKRYDEHHQDLTLLKALVRQQLPEKYKEIFFDQSKNGYAGYIDGGASQEEFYKFIKPILEKMDGTEELLVKLNREDLLRKQRTFDNGSIPHQIHLGELHAILRRQEDFYPFLKDNREKIEKILTFRIPYYVGPLARGNSRFAWMTRKSEETITPWNFEEVVDKGASAQSFIERMTNFDKNLPNEKVLPKHSLLYEYFTVYNELTKVKYVTEGMRKPAFLSGEQKKAIVDLLFKTNRKVTVKQLKEDYFKKIECFDSVEISGVEDRFNASLGTYHDLLKIIKDKDFLDNEENEDILEDIVLTLTLFEDREMIEERLKTYAHLFDDKVMKQLKRRRYTGWGRLSRKLINGIRDKQSGKTILDFLKSDGFANRNFMQLIHDDSLTFKEDIQKAQVSGQGDSLHEHIANLAGSPAIKKGILQTVKVVDELVKVMGRHKPENIVIEMARENQTTQKGQKNSRERMKRIEEGIKELGSQILKEHPVENTQLQNEKLYLYYLQNGRDMYVDQELDINRLSDYDVDHIVPQSFLKDDSIDNKVLTRSDKARGKSDNVPSEEVVKKMKNYWRQLLNAKLITQRKFDNLTKAERGGLSELDKAGFIKRQLVETRQITKHVAQILDSRMNTKYDENDKLIREVKVITLKSKLVSDFRKDFQFYKVREINNYHHAHDAYLNAVVGTALIKKYPKLESEFVYGDYKVYDVRKMIAKSEQEIGKATAKYFFYSNIMNFFKTEITLANGEIRKRPLIETNGETGEIVWDKGRDFATVRKVLSMPQVNIVKKTEVQTGGFSKESILPKRNSDKLIARKKDWDPKKYGGFDSPTVAYSVLVVAKVEKGKSKKLKSVKELLGITIMERSSFEKNPIDFLEAKGYKEVKKDLIIKLPKYSLFELENGRKRMLASAGELQKGNELALPSKYVNFLYLASHYEKLKGSPEDNEQKQLFVEQHKHYLDEIIEQISEFSKRVILADANLDKVLSAYNKHRDKPIREQAENIIHLFTLTNLGAPAAFKYFDTTIDRKRYTSTKEVLDATLIHQSITGLYETRIDLSQLGGDGGGSSGSSGGTLNLEDEYRLYETSAEPEVSPGSTWLSDFPQAWAETGGMGLAVRQAPLIIPLKATSTPVSIKQYPMSQEAKLGIKPHIQRLLDQGILVPCQSPWNTPLLPVKKPGTNDYRPVQDLREVNKRVEDIHPTVPNPYNLLSGLPPSHRWYTVLDLKDAFFCLRLHPTSQPLFAFEWRDPGMGISGQLTWTRLPQGFKNSPTLFNEALHRDLADFRIQHPDLILLQYVDDILLAATSELDCQQGTRALLLTLGNLGYRASAKKAQLCQKQVKYLGYLLKEGQRWLTEARKETVMGQPTPKTPRQLREFLGKAGFCRLFIPGFAEMAAPLYPLTKPGTLFNWGPDQQKAYQEIKQALLTAPALGLPDLTKPFELFVDEKQGYAKGVLTQKLGPWRRPVAYLSKKLDPVAAGWPPCLRMVAAIAVLRKDAGKLTMGQPLVILAPHAVEALVKQPPDRWLSNARMTHYQAMLLDTDRVQFGPVVALNPATLLPLPEEGAPHDCLEILAETHGTRPDLTDQPIPDADHTWYTDGSSFLQEGQRKAGAAVTTETEVIWARALPAGTSAQRAELIALTQALKMAEGKRLNVYTDSRYAFATAHIHGEIYRRRGWLTSEGREIKNKSEILALLKALFLPKRLSIIHCLGHQKGDSAEARGNRLADQAAREAAIKTPPDTSTLLAGKRTADGSEFEKRTADGSEFESPKKKAKVE

SEQ ID NO: 1928 - protein, 2091 aa, synthetic construct
MPAAKRVKLDGGDKKYSIGLDIGTNSVGWAVITDEYKVPSKKFKVLGNTDRHSIKKNLIGALLFDSGETAEATRLKRTARRRYTRRKNRICYLQEIFSNEMAKVDDSFFHRLEESFLVEEDKKHERHPIFGNIVDEVAYHEKYPTIYHLRKKLVDSTDKADLRLIYLALAHMIKFRGHFLIEGDLNPDNSDVDKLFIQLVQTYNQLFEENPINASGVDAKAILSARLSKSRRLENLIAQLPGEKKNGLFGNLIALSLGLTPNFKSNFDLAEDAKLQLSKDTYDDDLDNLLAQIGDQYADLFLAAKNLSDAILLSDILRVNTEITKAPLSASMIKRYDEHHQDLTLLKALVRQQLPEKYKEIFFDQSKNGYAGYIDGGASQEEFYKFIKPILEKMDGTEELLVKLNREDLLRKQRTFDNGSIPHQIHLGELHAILRRQEDFYPFLKDNREKIEKILTFRIPYYVGPLARGNSRFAWMTRKSEETITPWNFEEVVDKGASAQSFIERMTNFDKNLPNEKVLPKHSLLYEYFTVYNELTKVKYVTEGMRKPAFLSGEQKKAIVDLLFKTNRKVTVKQLKEDYFKKIECFDSVEISGVEDRFNASLGTYHDLLKIIKDKDFLDNEENEDILEDIVLTLTLFEDREMIEERLKTYAHLFDDKVMKQLKRRRYTGWGRLSRKLINGIRDKQSGKTILDFLKSDGFANRNFMQLIHDDSLTFKEDIQKAQVSGQGDSLHEHIANLAGSPAIKKGILQTVKVVDELVKVMGRHKPENIVIEMARENQTTQKGQKNSRERMKRIEEGIKELGSQILKEHPVENTQLQNEKLYLYYLQNGRDMYVDQELDINRLSDYDVDHIVPQSFLKDDSIDNKVLTRSDKARGKSDNVPSEEVVKKMKNYWRQLLNAKLITQRKFDNLTKAERGGLSELDKAGFIKRQLVETRQITKHVAQILDSRMNTKYDENDKLIREVKVITLKSKLVSDFRKDFQFYKVREINNYHHAHDAYLNAVVGTALIKKYPKLESEFVYGDYKVYDVRKMIAKSEQEIGKATAKYFFYSNIMNFFKTEITLANGEIRKRPLIETNGETGEIVWDKGRDFATVRKVLSMPQVNIVKKTEVQTGGFSKESILPKRNSDKLIARKKDWDPKKYGGFDSPTVAYSVLVVAKVEKGKSKKLKSVKELLGITIMERSSFEKNPIDFLEAKGYKEVKKDLIIKLPKYSLFELENGRKRMLASAGELQKGNELALPSKYVNFLYLASHYEKLKGSPEDNEQKQLFVEQHKHYLDEIIEQISEFSKRVILADANLDKVLSAYNKHRDKPIREQAENIIHLFTLTNLGAPAAFKYFDTTIDRKRYTSTKEVLDATLIHQSITGLYETRIDLSQLGGDGGGGGGGSGGTLNLEDEYRLYETSAEPEVSPGSTWLSDFPQAWAETGGMGLAVRQAPLIIPLKATSTPVSIKQYPMSQEAKLGIKPHIQRLLDQGILVPCQSPWNTPLLPVKKPGTNDYRPVQDLREVNKRVEDIHPTVPNPYNLLSGLPPSHRWYTVLDLKDAFFCLRLHPTSQPLFAFEWRDPGMGISGQLTWTRLPQGFKNSPTLFNEALHRDLADFRIQHPDLILLQYVDDILLAATSELDCQQGTRALLLTLGNLGYRASAKKAQLCQKQVKYLGYLLKEGQRWLTEARKETVMGQPTPKTPRQLREFLGKAGFCRLFIPGFAEMAAPLYPLTKPGTLFNWGPDQQKAYQEIKQALLTAPALGLPDLTKPFELFVDEKQGYAKGVLTQKLGPWRRPVAYLSKKLDPVAAGWPPCLRMVAAIAVLRKDAGKLTMGQPLVILAPHAVEALVKQPPDRWLSNARMTHYQAMLLDTDRVQFGPVVALNPATLLPLPEEGAPHDCLEILAETHGTRPDLTDQPIPDADHTWYTDGSSFLQEGQRKAGAAVTTETEVIWARALPAGTSAQRAELIALTQALKMAEGKRLNVYTDSRYAFATAHIHGEIYRRRGWLTSEGREIKNKSEILALLKALFLPKRLSIIHCLGHQKGDSAEARGNRLADQAAREAAIKTPPDTSTLLAGKRTADGSEFEKRTADGSEFESPKKKAKVE

SEQ ID NO: 1929 - protein, 2096 aa, synthetic construct
MPAAKRVKLDGGDKKYSIGLDIGTNSVGWAVITDEYKVPSKKFKVLGNTDRHSIKKNLIGALLFDSGETAEATRLKRTARRRYTRRKNRICYLQEIFSNEMAKVDDSFFHRLEESFLVEEDKKHERHPIFGNIVDEVAYHEKYPTIYHLRKKLVDSTDKADLRLIYLALAHMIKFRGHFLIEGDLNPDNSDVDKLFIQLVQTYNQLFEENPINASGVDAKAILSARLSKSRRLENLIAQLPGEKKNGLFGNLIALSLGLTPNFKSNFDLAEDAKLQLSKDTYDDDLDNLLAQIGDQYADLFLAAKNLSDAILLSDILRVNTEITKAPLSASMIKRYDEHHQDLTLLKALVRQQLPEKYKEIFFDQSKNGYAGYIDGGASQEEFYKFIKPILEKMDGTEELLVKLNREDLLRKQRTFDNGSIPHQIHLGELHAILRRQEDFYPFLKDNREKIEKILTFRIPYYVGPLARGNSRFAWMTRKSEETITPWNFEEVVDKGASAQSFIERMTNFDKNLPNEKVLPKHSLLYEYFTVYNELTKVKYVTEGMRKPAFLSGEQKKAIVDLLFKTNRKVTVKQLKEDYFKKIECFDSVEISGVEDRFNASLGTYHDLLKIIKDKDFLDNEENEDILEDIVLTLTLFEDREMIEERLKTYAHLFDDKVMKQLKRRRYTGWGRLSRKLINGIRDKQSGKTILDFLKSDGFANRNFMQLIHDDSLTFKEDIQKAQVSGQGDSLHEHIANLAGSPAIKKGILQTVKVVDELVKVMGRHKPENIVIEMARENQTTQKGQKNSRERMKRIEEGIKELGSQILKEHPVENTQLQNEKLYLYYLQNGRDMYVDQELDINRLSDYDVDHIVPQSFLKDDSIDNKVLTRSDKARGKSDNVPSEEVVKKMKNYWRQLLNAKLITQRKFDNLTKAERGGLSELDKAGFIKRQLVETRQITKHVAQILDSRMNTKYDENDKLIREVKVITLKSKLVSDFRKDFQFYKVREINNYHHAHDAYLNAVVGTALIKKYPKLESEFVYGDYKVYDVRKMIAKSEQEIGKATAKYFFYSNIMNFFKTEITLANGEIRKRPLIETNGETGEIVWDKGRDFATVRKVLSMPQVNIVKKTEVQTGGFSKESILPKRNSDKLIARKKDWDPKKYGGFDSPTVAYSVLVVAKVEKGKSKKLKSVKELLGITIMERSSFEKNPIDFLEAKGYKEVKKDLIIKLPKYSLFELENGRKRMLASAGELQKGNELALPSKYVNFLYLASHYEKLKGSPEDNEQKQLFVEQHKHYLDEIIEQISEFSKRVILADANLDKVLSAYNKHRDKPIREQAENIIHLFTLTNLGAPAAFKYFDTTIDRKRYTSTKEVLDATLIHQSITGLYETRIDLSQLGGDGGGGGPAPEAAAKGGTLNLEDEYRLYETSAEPEVSPGSTWLSDFPQAWAETGGMGLAVRQAPLIIPLKATSTPVSIKQYPMSQEAKLGIKPHIQRLLDQGILVPCQSPWNTPLLPVKKPGTNDYRPVQDLREVNKRVEDIHPTVPNPYNLLSGLPPSHRWYTVLDLKDAFFCLRLHPTSQPLFAFEWRDPGMGISGQLTWTRLPQGFKNSPTLFNEALHRDLADFRIQHPDLILLQYVDDILLAATSELDCQQGTRALLLTLGNLGYRASAKKAQLCQKQVKYLGYLLKEGQRWLTEARKETVMGQPTPKTPRQLREFLGKAGFCRLFIPGFAEMAAPLYPLTKPGTLFNWGPDQQKAYQEIKQALLTAPALGLPDLTKPFELFVDEKQGYAKGVLTQKLGPWRRPVAYLSKKLDPVAAGWPPCLRMVAAIAVLRKDAGKLTMGQPLVILAPHAVEALVKQPPDRWLSNARMTHYQAMLLDTDRVQFGPVVALNPATLLPLPEEGAPHDCLEILAETHGTRPDLTDQPIPDADHTWYTDGSSFLQEGQRKAGAAVTTETEVIWARALPAGTSAQRAELIALTQALKMAEGKRLNVYTDSRYAFATAHIHGEIYRRRGWLTSEGREIKNKSEILALLKALFLPKRLSIIHCLGHQKGDSAEARGNRLADQAAREAAIKTPPDTSTLLAGKRTADGSEFEKRTADGSEFESPKKKAKVE

SEQ ID NO: 1930 - protein, 2091 aa, synthetic construct
MPAAKRVKLDGGDKKYSIGLDIGTNSVGWAVITDEYKVPSKKFKVLGNTDRHSIKKNLIGALLFDSGETAEATRLKRTARRRYTRRKNRICYLQEIFSNEMAKVDDSFFHRLEESFLVEEDKKHERHPIFGNIVDEVAYHEKYPTIYHLRKKLVDSTDKADLRLIYLALAHMIKFRGHFLIEGDLNPDNSDVDKLFIQLVQTYNQLFEENPINASGVDAKAILSARLSKSRRLENLIAQLPGEKKNGLFGNLIALSLGLTPNFKSNFDLAEDAKLQLSKDTYDDDLDNLLAQIGDQYADLFLAAKNLSDAILLSDILRVNTEITKAPLSASMIKRYDEHHQDLTLLKALVRQQLPEKYKEIFFDQSKNGYAGYIDGGASQEEFYKFIKPILEKMDGTEELLVKLNREDLLRKQRTFDNGSIPHQIHLGELHAILRRQEDFYPFLKDNREKIEKILTFRIPYYVGPLARGNSRFAWMTRKSEETITPWNFEEVVDKGASAQSFIERMTNFDKNLPNEKVLPKHSLLYEYFTVYNELTKVKYVTEGMRKPAFLSGEQKKAIVDLLFKTNRKVTVKQLKEDYFKKIECFDSVEISGVEDRFNASLGTYHDLLKIIKDKDFLDNEENEDILEDIVLTLTLFEDREMIEERLKTYAHLFDDKVMKQLKRRRYTGWGRLSRKLINGIRDKQSGKTILDFLKSDGFANRNFMQLIHDDSLTFKEDIQKAQVSGQGDSLHEHIANLAGSPAIKKGILQTVKVVDELVKVMGRHKPENIVIEMARENQTTQKGQKNSRERMKRIEEGIKELGSQILKEHPVENTQLQNEKLYLYYLQNGRDMYVDQELDINRLSDYDVDHIVPQSFLKDDSIDNKVLTRSDKARGKSDNVPSEEVVKKMKNYWRQLLNAKLITQRKFDNLTKAERGGLSELDKAGFIKRQLVETRQITKHVAQILDSRMNTKYDENDKLIREVKVITLKSKLVSDFRKDFQFYKVREINNYHHAHDAYLNAVVGTALIKKYPKLESEFVYGDYKVYDVRKMIAKSEQEIGKATAKYFFYSNIMNFFKTEITLANGEIRKRPLIETNGETGEIVWDKGRDFATVRKVLSMPQVNIVKKTEVQTGGFSKESILPKRNSDKLIARKKDWDPKKYGGFDSPTVAYSVLVVAKVEKGKSKKLKSVKELLGITIMERSSFEKNPIDFLEAKGYKEVKKDLIIKLPKYSLFELENGRKRMLASAGELQKGNELALPSKYVNFLYLASHYEKLKGSPEDNEQKQLFVEQHKHYLDEIIEQISEFSKRVILADANLDKVLSAYNKHRDKPIREQAENIIHLFTLTNLGAPAAFKYFDTTIDRKRYTSTKEVLDATLIHQSITGLYETRIDLSQLGGDGGGGGGSSGGTLNLEDEYRLYETSAEPEVSPGSTWLSDFPQAWAETGGMGLAVRQAPLIIPLKATSTPVSIKQYPMSQEAKLGIKPHIQRLLDQGILVPCQSPWNTPLLPVKKPGTNDYRPVQDLREVNKRVEDIHPTVPNPYNLLSGLPPSHRWYTVLDLKDAFFCLRLHPTSQPLFAFEWRDPGMGISGQLTWTRLPQGFKNSPTLFNEALHRDLADFRIQHPDLILLQYVDDILLAATSELDCQQGTRALLLTLGNLGYRASAKKAQLCQKQVKYLGYLLKEGQRWLTEARKETVMGQPTPKTPRQLREFLGKAGFCRLFIPGFAEMAAPLYPLTKPGTLFNWGPDQQKAYQEIKQALLTAPALGLPDLTKPFELFVDEKQGYAKGVLTQKLGPWRRPVAYLSKKLDPVAAGWPPCLRMVAAIAVLRKDAGKLTMGQPLVILAPHAVEALVKQPPDRWLSNARMTHYQAMLLDTDRVQFGPVVALNPATLLPLPEEGAPHDCLEILAETHGTRPDLTDQPIPDADHTWYTDGSSFLQEGQRKAGAAVTTETEVIWARALPAGTSAQRAELIALTQALKMAEGKRLNVYTDSRYAFATAHIHGEIYRRRGWLTSEGREIKNKSEILALLKALFLPKRLSIIHCLGHQKGDSAEARGNRLADQAAREAAIKTPPDTSTLLAGKRTADGSEFEKRTADGSEFESPKKKAKVE

SEQ ID NO: 1931 - protein, 2091 aa, synthetic construct
MPAAKRVKLDGGDKKYSIGLDIGTNSVGWAVITDEYKVPSKKFKVLGNTDRHSIKKNLIGALLFDSGETAEATRLKRTARRRYTRRKNRICYLQEIFSNEMAKVDDSFFHRLEESFLVEEDKKHERHPIFGNIVDEVAYHEKYPTIYHLRKKLVDSTDKADLRLIYLALAHMIKFRGHFLIEGDLNPDNSDVDKLFIQLVQTYNQLFEENPINASGVDAKAILSARLSKSRRLENLIAQLPGEKKNGLFGNLIALSLGLTPNFKSNFDLAEDAKLQLSKDTYDDDLDNLLAQIGDQYADLFLAAKNLSDAILLSDILRVNTEITKAPLSASMIKRYDEHHQDLTLLKALVRQQLPEKYKEIFFDQSKNGYAGYIDGGASQEEFYKFIKPILEKMDGTEELLVKLNREDLLRKQRTFDNGSIPHQIHLGELHAILRRQEDFYPFLKDNREKIEKILTFRIPYYVGPLARGNSRFAWMTRKSEETITPWNFEEVVDKGASAQSFIERMTNFDKNLPNEKVLPKHSLLYEYFTVYNELTKVKYVTEGMRKPAFLSGEQKKAIVDLLFKTNRKVTVKQLKEDYFKKIECFDSVEISGVEDRFNASLGTYHDLLKIIKDKDFLDNEENEDILEDIVLTLTLFEDREMIEERLKTYAHLFDDKVMKQLKRRRYTGWGRLSRKLINGIRDKQSGKTILDFLKSDGFANRNFMQLIHDDSLTFKEDIQKAQVSGQGDSLHEHIANLAGSPAIKKGILQTVKVVDELVKVMGRHKPENIVIEMARENQTTQKGQKNSRERMKRIEEGIKELGSQILKEHPVENTQLQNEKLYLYYLQNGRDMYVDQELDINRLSDYDVDHIVPQSFLKDDSIDNKVLTRSDKARGKSDNVPSEEVVKKMKNYWRQLLNAKLITQRKFDNLTKAERGGLSELDKAGFIKRQLVETRQITKHVAQILDSRMNTKYDENDKLIREVKVITLKSKLVSDFRKDFQFYKVREINNYHHAHDAYLNAVVGTALIKKYPKLESEFVYGDYKVYDVRKMIAKSEQEIGKATAKYFFYSNIMNFFKTEITLANGEIRKRPLIETNGETGEIVWDKGRDFATVRKVLSMPQVNIVKKTEVQTGGFSKESILPKRNSDKLIARKKDWDPKKYGGFDSPTVAYSVLVVAKVEKGKSKKLKSVKELLGITIMERSSFEKNPIDFLEAKGYKEVKKDLIIKLPKYSLFELENGRKRMLASAGELQKGNELALPSKYVNFLYLASHYEKLKGSPEDNEQKQLFVEQHKHYLDEIIEQISEFSKRVILADANLDKVLSAYNKHRDKPIREQAENIIHLFTLTNLGAPAAFKYFDTTIDRKRYTSTKEVLDATLIHQSITGLYETRIDLSQLGGDGGGSSGGSGGTLNLEDEYRLYETSAEPEVSPGSTWLSDFPQAWAETGGMGLAVRQAPLIIPLKATSTPVSIKQYPMSQEAKLGIKPHIQRLLDQGILVPCQSPWNTPLLPVKKPGTNDYRPVQDLREVNKRVEDIHPTVPNPYNLLSGLPPSHRWYTVLDLKDAFFCLRLHPTSQPLFAFEWRDPGMGISGQLTWTRLPQGFKNSPTLFNEALHRDLADFRIQHPDLILLQYVDDILLAATSELDCQQGTRALLLTLGNLGYRASAKKAQLCQKQVKYLGYLLKEGQRWLTEARKETVMGQPTPKTPRQLREFLGKAGFCRLFIPGFAEMAAPLYPLTKPGTLFNWGPDQQKAYQEIKQALLTAPALGLPDLTKPFELFVDEKQGYAKGVLTQKLGPWRRPVAYLSKKLDPVAAGWPPCLRMVAAIAVLRKDAGKLTMGQPLVILAPHAVEALVKQPPDRWLSNARMTHYQAMLLDTDRVQFGPVVALNPATLLPLPEEGAPHDCLEILAETHGTRPDLTDQPIPDADHTWYTDGSSFLQEGQRKAGAAVTTETEVIWARALPAGTSAQRAELIALTQALKMAEGKRLNVYTDSRYAFATAHIHGEIYRRRGWLTSEGREIKNKSEILALLKALFLPKRLSIIHCLGHQKGDSAEARGNRLADQAAREAAIKTPPDTSTLLAGKRTADGSEFEKRTADGSEFESPKKKAKVE

SEQ ID NO: 1932 - protein, 2094 aa, synthetic construct
MPAAKRVKLDGGDKKYSIGLDIGTNSVGWAVITDEYKVPSKKFKVLGNTDRHSIKKNLIGALLFDSGETAEATRLKRTARRRYTRRKNRICYLQEIFSNEMAKVDDSFFHRLEESFLVEEDKKHERHPIFGNIVDEVAYHEKYPTIYHLRKKLVDSTDKADLRLIYLALAHMIKFRGHFLIEGDLNPDNSDVDKLFIQLVQTYNQLFEENPINASGVDAKAILSARLSKSRRLENLIAQLPGEKKNGLFGNLIALSLGLTPNFKSNFDLAEDAKLQLSKDTYDDDLDNLLAQIGDQYADLFLAAKNLSDAILLSDILRVNTEITKAPLSASMIKRYDEHHQDLTLLKALVRQQLPEKYKEIFFDQSKNGYAGYIDGGASQEEFYKFIKPILEKMDGTEELLVKLNREDLLRKQRTFDNGSIPHQIHLGELHAILRRQEDFYPFLKDNREKIEKILTFRIPYYVGPLARGNSRFAWMTRKSEETITPWNFEEVVDKGASAQSFIERMTNFDKNLPNEKVLPKHSLLYEYFTVYNELTKVKYVTEGMRKPAFLSGEQKKAIVDLLFKTNRKVTVKQLKEDYFKKIECFDSVEISGVEDRFNASLGTYHDLLKIIKDKDFLDNEENEDILEDIVLTLTLFEDREMIEERLKTYAHLFDDKVMKQLKRRRYTGWGRLSRKLINGIRDKQSGKTILDFLKSDGFANRNFMQLIHDDSLTFKEDIQKAQVSGQGDSLHEHIANLAGSPAIKKGILQTVKVVDELVKVMGRHKPENIVIEMARENQTTQKGQKNSRERMKRIEEGIKELGSQILKEHPVENTQLQNEKLYLYYLQNGRDMYVDQELDINRLSDYDVDHIVPQSFLKDDSIDNKVLTRSDKARGKSDNVPSEEVVKKMKNYWRQLLNAKLITQRKFDNLTKAERGGLSELDKAGFIKRQLVETRQITKHVAQILDSRMNTKYDENDKLIREVKVITLKSKLVSDFRKDFQFYKVREINNYHHAHDAYLNAVVGTALIKKYPKLESEFVYGDYKVYDVRKMIAKSEQEIGKATAKYFFYSNIMNFFKTEITLANGEIRKRPLIETNGETGEIVWDKGRDFATVRKVLSMPQVNIVKKTEVQTGGFSKESILPKRNSDKLIARKKDWDPKKYGGFDSPTVAYSVLVVAKVEKGKSKKLKSVKELLGITIMERSSFEKNPIDFLEAKGYKEVKKDLIIKLPKYSLFELENGRKRMLASAGELQKGNELALPSKYVNFLYLASHYEKLKGSPEDNEQKQLFVEQHKHYLDEIIEQISEFSKRVILADANLDKVLSAYNKHRDKPIREQAENIIHLFTLTNLGAPAAFKYFDTTIDRKRYTSTKEVLDATLIHQSITGLYETRIDLSQLGGDGGGSSGGSGGGGGTLNLEDEYRLYETSAEPEVSPGSTWLSDFPQAWAETGGMGLAVRQAPLIIPLKATSTPVSIKQYPMSQEAKLGIKPHIQRLLDQGILVPCQSPWNTPLLPVKKPGTNDYRPVQDLREVNKRVEDIHPTVPNPYNLLSGLPPSHRWYTVLDLKDAFFCLRLHPTSQPLFAFEWRDPGMGISGQLTWTRLPQGFKNSPTLFNEALHRDLADFRIQHPDLILLQYVDDILLAATSELDCQQGTRALLLTLGNLGYRASAKKAQLCQKQVKYLGYLLKEGQRWLTEARKETVMGQPTPKTPRQLREFLGKAGFCRLFIPGFAEMAAPLYPLTKPGTLFNWGPDQQKAYQEIKQALLTAPALGLPDLTKPFELFVDEKQGYAKGVLTQKLGPWRRPVAYLSKKLDPVAAGWPPCLRMVAAIAVLRKDAGKLTMGQPLVILAPHAVEALVKQPPDRWLSNARMTHYQAMLLDTDRVQFGPVVALNPATLLPLPEEGAPHDCLEILAETHGTRPDLTDQPIPDADHTWYTDGSSFLQEGQRKAGAAVTTETEVIWARALPAGTSAQRAELIALTQALKMAEGKRLNVYTDSRYAFATAHIHGEIYRRRGWLTSEGREIKNKSEILALLKALFLPKRLSIIHCLGHQKGDSAEARGNRLADQAAREAAIKTPPDTSTLLAGKRTADGSEFEKRTADGSEFESPKKKAKVE

SEQ ID NO: 1933 - protein, 2092 aa, synthetic construct
MPAAKRVKLDGGDKKYSIGLDIGTNSVGWAVITDEYKVPSKKFKVLGNTDRHSIKKNLIGALLFDSGETAEATRLKRTARRRYTRRKNRICYLQEIFSNEMAKVDDSFFHRLEESFLVEEDKKHERHPIFGNIVDEVAYHEKYPTIYHLRKKLVDSTDKADLRLIYLALAHMIKFRGHFLIEGDLNPDNSDVDKLFIQLVQTYNQLFEENPINASGVDAKAILSARLSKSRRLENLIAQLPGEKKNGLFGNLIALSLGLTPNFKSNFDLAEDAKLQLSKDTYDDDLDNLLAQIGDQYADLFLAAKNLSDAILLSDILRVNTEITKAPLSASMIKRYDEHHQDLTLLKALVRQQLPEKYKEIFFDQSKNGYAGYIDGGASQEEFYKFIKPILEKMDGTEELLVKLNREDLLRKQRTFDNGSIPHQIHLGELHAILRRQEDFYPFLKDNREKIEKILTFRIPYYVGPLARGNSRFAWMTRKSEETITPWNFEEVVDKGASAQSFIERMTNFDKNLPNEKVLPKHSLLYEYFTVYNELTKVKYVTEGMRKPAFLSGEQKKAIVDLLFKTNRKVTVKQLKEDYFKKIECFDSVEISGVEDRFNASLGTYHDLLKIIKDKDFLDNEENEDILEDIVLTLTLFEDREMIEERLKTYAHLFDDKVMKQLKRRRYTGWGRLSRKLINGIRDKQSGKTILDFLKSDGFANRNFMQLIHDDSLTFKEDIQKAQVSGQGDSLHEHIANLAGSPAIKKGILQTVKVVDELVKVMGRHKPENIVIEMARENQTTQKGQKNSRERMKRIEEGIKELGSQILKEHPVENTQLQNEKLYLYYLQNGRDMYVDQELDINRLSDYDVDHIVPQSFLKDDSIDNKVLTRSDKARGKSDNVPSEEVVKKMKNYWRQLLNAKLITQRKFDNLTKAERGGLSELDKAGFIKRQLVETRQITKHVAQILDSRMNTKYDENDKLIREVKVITLKSKLVSDFRKDFQFYKVREINNYHHAHDAYLNAVVGTALIKKYPKLESEFVYGDYKVYDVRKMIAKSEQEIGKATAKYFFYSNIMNFFKTEITLANGEIRKRPLIETNGETGEIVWDKGRDFATVRKVLSMPQVNIVKKTEVQTGGFSKESILPKRNSDKLIARKKDWDPKKYGGFDSPTVAYSVLVVAKVEKGKSKKLKSVKELLGITIMERSSFEKNPIDFLEAKGYKEVKKDLIIKLPKYSLFELENGRKRMLASAGELQKGNELALPSKYVNFLYLASHYEKLKGSPEDNEQKQLFVEQHKHYLDEIIEQISEFSKRVILADANLDKVLSAYNKHRDKPIREQAENIIHLFTLTNLGAPAAFKYFDTTIDRKRYTSTKEVLDATLIHQSITGLYETRIDLSQLGGDGGPAPAPAPGGTLNLEDEYRLYETSAEPEVSPGSTWLSDFPQAWAETGGMGLAVRQAPLIIPLKATSTPVSIKQYPMSQEAKLGIKPHIQRLLDQGILVPCQSPWNTPLLPVKKPGTNDYRPVQDLREVNKRVEDIHPTVPNPYNLLSGLPPSHRWYTVLDLKDAFFCLRLHPTSQPLFAFEWRDPGMGISGQLTWTRLPQGFKNSPTLFNEALHRDLADFRIQHPDLILLQYVDDILLAATSELDCQQGTRALLLTLGNLGYRASAKKAQLCQKQVKYLGYLLKEGQRWLTEARKETVMGQPTPKTPRQLREFLGKAGFCRLFIPGFAEMAAPLYPLTKPGTLFNWGPDQQKAYQEIKQALLTAPALGLPDLTKPFELFVDEKQGYAKGVLTQKLGPWRRPVAYLSKKLDPVAAGWPPCLRMVAAIAVLRKDAGKLTMGQPLVILAPHAVEALVKQPPDRWLSNARMTHYQAMLLDTDRVQFGPVVALNPATLLPLPEEGAPHDCLEILAETHGTRPDLTDQPIPDADHTWYTDGSSFLQEGQRKAGAAVTTETEVIWARALPAGTSAQRAELIALTQALKMAEGKRLNVYTDSRYAFATAHIHGEIYRRRGWLTSEGREIKNKSEILALLKALFLPKRLSIIHCLGHQKGDSAEARGNRLADQAAREAAIKTPPDTSTLLAGKRTADGSEFEKRTADGSEFESPKKKAKVE

SEQ ID NO: 1934 - protein, 2102 aa, synthetic construct
MPAAKRVKLDGGDKKYSIGLDIGTNSVGWAVITDEYKVPSKKFKVLGNTDRHSIKKNLIGALLFDSGETAEATRLKRTARRRYTRRKNRICYLQEIFSNEMAKVDDSFFHRLEESFLVEEDKKHERHPIFGNIVDEVAYHEKYPTIYHLRKKLVDSTDKADLRLIYLALAHMIKFRGHFLIEGDLNPDNSDVDKLFIQLVQTYNQLFEENPINASGVDAKAILSARLSKSRRLENLIAQLPGEKKNGLFGNLIALSLGLTPNFKSNFDLAEDAKLQLSKDTYDDDLDNLLAQIGDQYADLFLAAKNLSDAILLSDILRVNTEITKAPLSASMIKRYDEHHQDLTLLKALVRQQLPEKYKEIFFDQSKNGYAGYIDGGASQEEFYKFIKPILEKMDGTEELLVKLNREDLLRKQRTFDNGSIPHQIHLGELHAILRRQEDFYPFLKDNREKIEKILTFRIPYYVGPLARGNSRFAWMTRKSEETITPWNFEEVVDKGASAQSFIERMTNFDKNLPNEKVLPKHSLLYEYFTVYNELTKVKYVTEGMRKPAFLSGEQKKAIVDLLFKTNRKVTVKQLKEDYFKKIECFDSVEISGVEDRFNASLGTYHDLLKIIKDKDFLDNEENEDILEDIVLTLTLFEDREMIEERLKTYAHLFDDKVMKQLKRRRYTGWGRLSRKLINGIRDKQSGKTILDFLKSDGFANRNFMQLIHDDSLTFKEDIQKAQVSGQGDSLHEHIANLAGSPAIKKGILQTVKVVDELVKVMGRHKPENIVIEMARENQTTQKGQKNSRERMKRIEEGIKELGSQILKEHPVENTQLQNEKLYLYYLQNGRDMYVDQELDINRLSDYDVDHIVPQSFLKDDSIDNKVLTRSDKARGKSDNVPSEEVVKKMKNYWRQLLNAKLITQRKFDNLTKAERGGLSELDKAGFIKRQLVETRQITKHVAQILDSRMNTKYDENDKLIREVKVITLKSKLVSDFRKDFQFYKVREINNYHHAHDAYLNAVVGTALIKKYPKLESEFVYGDYKVYDVRKMIAKSEQEIGKATAKYFFYSNIMNFFKTEITLANGEIRKRPLIETNGETGEIVWDKGRDFATVRKVLSMPQVNIVKKTEVQTGGFSKESILPKRNSDKLIARKKDWDPKKYGGFDSPTVAYSVLVVAKVEKGKSKKLKSVKELLGITIMERSSFEKNPIDFLEAKGYKEVKKDLIIKLPKYSLFELENGRKRMLASAGELQKGNELALPSKYVNFLYLASHYEKLKGSPEDNEQKQLFVEQHKHYLDEIIEQISEFSKRVILADANLDKVLSAYNKHRDKPIREQAENIIHLFTLTNLGAPAAFKYFDTTIDRKRYTSTKEVLDATLIHQSITGLYETRIDLSQLGGDGGPAPAPAPAPAPGGTVSLQDEHRLFDIPVTTSLPDVWLQDFPQAWAETGGLGRAKCQAPIIIDLKPTAVPVSIKQYPMSLEAHMGIRQHIIKFLELGVLRPCRSPWNTPLLPVKKPGTQDYRPVQDLREINKRTVDIHPTVPNPYNLLSTLKPDYSWYTVLDLKDAFFCLPLAPQSQELFAFEWKDPERGISGQLTWTRLPQGFKNSPTLFNEALHRDLTDFRTQHPEVTLLQYVDDLLLAAPTKKACTQGTRHLLQELGEKGYRASAKKAQICQTKVTYLGYILSEGKRWLTPGRIETVARIPPPRNPREVREFLGKAGFCRLFIPGFAELAAPLYALTKPSTPFTWQTEHQLAFEALKKALLSAPALGLPDTSKPFTLFLDERQGIAKGVLTQKLGPWKRPVAYLSKKLDPVAAGWPPCLRIMAATAMLVKDSAKLTLGQPLTVITPHTLEAIVRQPPDRWITNARLTHYQALLLDTDRVQFGPPVTLNPATLLPVPENQPSPHDCRQVLAETHGTREDLKDQELPDADHTWYTDGSSYLDSGTRRAGAAVVDGHNTIWAQSLPPGTSAQKAELIALTKALELSKGKKANIYTDSRYAFATAHTHGSIYERRGWLTSEGKEIKNKAEIIALLKALFLPQEVAIIHCPGHQKGQDPVAVGNRQADRVARQAAMAEVLTLATEPDNTSHITAGKRTADGSEFEKRTADGSEFESPKKKAKVE

SEQ ID NO: 1935 - protein, 2102 aa, synthetic construct
MPAAKRVKLDGGDKKYSIGLDIGTNSVGWAVITDEYKVPSKKFKVLGNTDRHSIKKNLIGALLFDSGETAEATRLKRTARRRYTRRKNRICYLQEIFSNEMAKVDDSFFHRLEESFLVEEDKKHERHPIFGNIVDEVAYHEKYPTIYHLRKKLVDSTDKADLRLIYLALAHMIKFRGHFLIEGDLNPDNSDVDKLFIQLVQTYNQLFEENPINASGVDAKAILSARLSKSRRLENLIAQLPGEKKNGLFGNLIALSLGLTPNFKSNFDLAEDAKLQLSKDTYDDDLDNLLAQIGDQYADLFLAAKNLSDAILLSDILRVNTEITKAPLSASMIKRYDEHHQDLTLLKALVRQQLPEKYKEIFFDQSKNGYAGYIDGGASQEEFYKFIKPILEKMDGTEELLVKLNREDLLRKQRTFDNGSIPHQIHLGELHAILRRQEDFYPFLKDNREKIEKILTFRIPYYVGPLARGNSRFAWMTRKSEETITPWNFEEVVDKGASAQSFIERMTNFDKNLPNEKVLPKHSLLYEYFTVYNELTKVKYVTEGMRKPAFLSGEQKKAIVDLLFKTNRKVTVKQLKEDYFKKIECFDSVEISGVEDRFNASLGTYHDLLKIIKDKDFLDNEENEDILEDIVLTLTLFEDREMIEERLKTYAHLFDDKVMKQLKRRRYTGWGRLSRKLINGIRDKQSGKTILDFLKSDGFANRNFMQLIHDDSLTFKEDIQKAQVSGQGDSLHEHIANLAGSPAIKKGILQTVKVVDELVKVMGRHKPENIVIEMARENQTTQKGQKNSRERMKRIEEGIKELGSQILKEHPVENTQLQNEKLYLYYLQNGRDMYVDQELDINRLSDYDVDHIVPQSFLKDDSIDNKVLTRSDKARGKSDNVPSEEVVKKMKNYWRQLLNAKLITQRKFDNLTKAERGGLSELDKAGFIKRQLVETRQITKHVAQILDSRMNTKYDENDKLIREVKVITLKSKLVSDFRKDFQFYKVREINNYHHAHDAYLNAVVGTALIKKYPKLESEFVYGDYKVYDVRKMIAKSEQEIGKATAKYFFYSNIMNFFKTEITLANGEIRKRPLIETNGETGEIVWDKGRDFATVRKVLSMPQVNIVKKTEVQTGGFSKESILPKRNSDKLIARKKDWDPKKYGGFDSPTVAYSVLVVAKVEKGKSKKLKSVKELLGITIMERSSFEKNPIDFLEAKGYKEVKKDLIIKLPKYSLFELENGRKRMLASAGELQKGNELALPSKYVNFLYLASHYEKLKGSPEDNEQKQLFVEQHKHYLDEIIEQISEFSKRVILADANLDKVLSAYNKHRDKPIREQAENIIHLFTLTNLGAPAAFKYFDTTIDRKRYTSTKEVLDATLIHQSITGLYETRIDLSQLGGDGGEAAAKGGSGGGGGTVSLQDEHRLFDIPVTTSLPDVWLQDFPQAWAETGGLGRAKCQAPIIIDLKPTAVPVSIKQYPMSLEAHMGIRQHIIKFLELGVLRPCRSPWNTPLLPVKKPGTQDYRPVQDLREINKRTVDIHPTVPNPYNLLSTLKPDYSWYTVLDLKDAFFCLPLAPQSQELFAFEWKDPERGISGQLTWTRLPQGFKNSPTLFNEALHRDLTDFRTQHPEVTLLQYVDDLLLAAPTKKACTQGTRHLLQELGEKGYRASAKKAQICQTKVTYLGYILSEGKRWLTPGRIETVARIPPPRNPREVREFLGKAGFCRLFIPGFAELAAPLYALTKPSTPFTWQTEHQLAFEALKKALLSAPALGLPDTSKPFTLFLDERQGIAKGVLTQKLGPWKRPVAYLSKKLDPVAAGWPPCLRIMAATAMLVKDSAKLTLGQPLTVITPHTLEAIVRQPPDRWITNARLTHYQALLLDTDRVQFGPPVTLNPATLLPVPENQPSPHDCRQVLAETHGTREDLKDQELPDADHTWYTDGSSYLDSGTRRAGAAVVDGHNTIWAQSLPPGTSAQKAELIALTKALELSKGKKANIYTDSRYAFATAHTHGSIYERRGWLTSEGKEIKNKAEIIALLKALFLPQEVAIIHCPGHQKGQDPVAVGNRQADRVARQAAMAEVLTLATEPDNTSHITAGKRTADGSEFEKRTADGSEFESPKKKAKVE

SEQ ID NO: 1936 - protein, 2121 aa, synthetic construct
MPAAKRVKLDGGDKKYSIGLDIGTNSVGWAVITDEYKVPSKKFKVLGNTDRHSIKKNLIGALLFDSGETAEATRLKRTARRRYTRRKNRICYLQEIFSNEMAKVDDSFFHRLEESFLVEEDKKHERHPIFGNIVDEVAYHEKYPTIYHLRKKLVDSTDKADLRLIYLALAHMIKFRGHFLIEGDLNPDNSDVDKLFIQLVQTYNQLFEENPINASGVDAKAILSARLSKSRRLENLIAQLPGEKKNGLFGNLIALSLGLTPNFKSNFDLAEDAKLQLSKDTYDDDLDNLLAQIGDQYADLFLAAKNLSDAILLSDILRVNTEITKAPLSASMIKRYDEHHQDLTLLKALVRQQLPEKYKEIFFDQSKNGYAGYIDGGASQEEFYKFIKPILEKMDGTEELLVKLNREDLLRKQRTFDNGSIPHQIHLGELHAILRRQEDFYPFLKDNREKIEKILTFRIPYYVGPLARGNSRFAWMTRKSEETITPWNFEEVVDKGASAQSFIERMTNFDKNLPNEKVLPKHSLLYEYFTVYNELTKVKYVTEGMRKPAFLSGEQKKAIVDLLFKTNRKVTVKQLKEDYFKKIECFDSVEISGVEDRFNASLGTYHDLLKIIKDKDFLDNEENEDILEDIVLTLTLFEDREMIEERLKTYAHLFDDKVMKQLKRRRYTGWGRLSRKLINGIRDKQSGKTILDFLKSDGFANRNFMQLIHDDSLTFKEDIQKAQVSGQGDSLHEHIANLAGSPAIKKGILQTVKVVDELVKVMGRHKPENIVIEMARENQTTQKGQKNSRERMKRIEEGIKELGSQILKEHPVENTQLQNEKLYLYYLQNGRDMYVDQELDINRLSDYDVDHIVPQSFLKDDSIDNKVLTRSDKARGKSDNVPSEEVVKKMKNYWRQLLNAKLITQRKFDNLTKAERGGLSELDKAGFIKRQLVETRQITKHVAQILDSRMNTKYDENDKLIREVKVITLKSKLVSDFRKDFQFYKVREINNYHHAHDAYLNAVVGTALIKKYPKLESEFVYGDYKVYDVRKMIAKSEQEIGKATAKYFFYSNIMNFFKTEITLANGEIRKRPLIETNGETGEIVWDKGRDFATVRKVLSMPQVNIVKKTEVQTGGFSKESILPKRNSDKLIARKKDWDPKKYGGFDSPTVAYSVLVVAKVEKGKSKKLKSVKELLGITIMERSSFEKNPIDFLEAKGYKEVKKDLIIKLPKYSLFELENGRKRMLASAGELQKGNELALPSKYVNFLYLASHYEKLKGSPEDNEQKQLFVEQHKHYLDEIIEQISEFSKRVILADANLDKVLSAYNKHRDKPIREQAENIIHLFTLTNLGAPAAFKYFDTTIDRKRYTSTKEVLDATLIHQSITGLYETRIDLSQLGGDGGGGGGSGGGGSGGGGSGGGGSGGGGSGGGGSGGTVSLQDEHRLFDIPVTTSLPDVWLQDFPQAWAETGGLGRAKCQAPIIIDLKPTAVPVSIKQYPMSLEAHMGIRQHIIKFLELGVLRPCRSPWNTPLLPVKKPGTQDYRPVQDLREINKRTVDIHPTVPNPYNLLSTLKPDYSWYTVLDLKDAFFCLPLAPQSQELFAFEWKDPERGISGQLTWTRLPQGFKNSPTLFNEALHRDLTDFRTQHPEVTLLQYVDDLLLAAPTKKACTQGTRHLLQELGEKGYRASAKKAQICQTKVTYLGYILSEGKRWLTPGRIETVARIPPPRNPREVREFLGKAGFCRLFIPGFAELAAPLYALTKPSTPFTWQTEHQLAFEALKKALLSAPALGLPDTSKPFTLFLDERQGIAKGVLTQKLGPWKRPVAYLSKKLDPVAAGWPPCLRIMAATAMLVKDSAKLTLGQPLTVITPHTLEAIVRQPPDRWITNARLTHYQALLLDTDRVQFGPPVTLNPATLLPVPENQPSPHDCRQVLAETHGTREDLKDQELPDADHTWYTDGSSYLDSGTRRAGAAVVDGHNTIWAQSLPPGTSAQKAELIALTKALELSKGKKANIYTDSRYAFATAHTHGSIYERRGWLTSEGKEIKNKAEIIALLKALFLPQEVAIIHCPGHQKGQDPVAVGNRQADRVARQAAMAEVLTLATEPDNTSHITAGKRTADGSEFEKRTADGSEFESPKKKAKVE

SEQ ID NO: 1937 - protein, 2102 aa, synthetic construct
MPAAKRVKLDGGDKKYSIGLDIGTNSVGWAVITDEYKVPSKKFKVLGNTDRHSIKKNLIGALLFDSGETAEATRLKRTARRRYTRRKNRICYLQEIFSNEMAKVDDSFFHRLEESFLVEEDKKHERHPIFGNIVDEVAYHEKYPTIYHLRKKLVDSTDKADLRLIYLALAHMIKFRGHFLIEGDLNPDNSDVDKLFIQLVQTYNQLFEENPINASGVDAKAILSARLSKSRRLENLIAQLPGEKKNGLFGNLIALSLGLTPNFKSNFDLAEDAKLQLSKDTYDDDLDNLLAQIGDQYADLFLAAKNLSDAILLSDILRVNTEITKAPLSASMIKRYDEHHQDLTLLKALVRQQLPEKYKEIFFDQSKNGYAGYIDGGASQEEFYKFIKPILEKMDGTEELLVKLNREDLLRKQRTFDNGSIPHQIHLGELHAILRRQEDFYPFLKDNREKIEKILTFRIPYYVGPLARGNSRFAWMTRKSEETITPWNFEEVVDKGASAQSFIERMTNFDKNLPNEKVLPKHSLLYEYFTVYNELTKVKYVTEGMRKPAFLSGEQKKAIVDLLFKTNRKVTVKQLKEDYFKKIECFDSVEISGVEDRFNASLGTYHDLLKIIKDKDFLDNEENEDILEDIVLTLTLFEDREMIEERLKTYAHLFDDKVMKQLKRRRYTGWGRLSRKLINGIRDKQSGKTILDFLKSDGFANRNFMQLIHDDSLTFKEDIQKAQVSGQGDSLHEHIANLAGSPAIKKGILQTVKVVDELVKVMGRHKPENIVIEMARENQTTQKGQKNSRERMKRIEEGIKELGSQILKEHPVENTQLQNEKLYLYYLQNGRDMYVDQELDINRLSDYDVDHIVPQSFLKDDSIDNKVLTRSDKARGKSDNVPSEEVVKKMKNYWRQLLNAKLITQRKFDNLTKAERGGLSELDKAGFIKRQLVETRQITKHVAQILDSRMNTKYDENDKLIREVKVITLKSKLVSDFRKDFQFYKVREINNYHHAHDAYLNAVVGTALIKKYPKLESEFVYGDYKVYDVRKMIAKSEQEIGKATAKYFFYSNIMNFFKTEITLANGEIRKRPLIETNGETGEIVWDKGRDFATVRKVLSMPQVNIVKKTEVQTGGFSKESILPKRNSDKLIARKKDWDPKKYGGFDSPTVAYSVLVVAKVEKGKSKKLKSVKELLGITIMERSSFEKNPIDFLEAKGYKEVKKDLIIKLPKYSLFELENGRKRMLASAGELQKGNELALPSKYVNFLYLASHYEKLKGSPEDNEQKQLFVEQHKHYLDEIIEQISEFSKRVILADANLDKVLSAYNKHRDKPIREQAENIIHLFTLTNLGAPAAFKYFDTTIDRKRYTSTKEVLDATLIHQSITGLYETRIDLSQLGGDGGGGGGGSEAAAKGGTVSLQDEHRLFDIPVTTSLPDVWLQDFPQAWAETGGLGRAKCQAPIIIDLKPTAVPVSIKQYPMSLEAHMGIRQHIIKFLELGVLRPCRSPWNTPLLPVKKPGTQDYRPVQDLREINKRTVDIHPTVPNPYNLLSTLKPDYSWYTVLDLKDAFFCLPLAPQSQELFAFEWKDPERGISGQLTWTRLPQGFKNSPTLFNEALHRDLTDFRTQHPEVTLLQYVDDLLLAAPTKKACTQGTRHLLQELGEKGYRASAKKAQICQTKVTYLGYILSEGKRWLTPGRIETVARIPPPRNPREVREFLGKAGFCRLFIPGFAELAAPLYALTKPSTPFTWQTEHQLAFEALKKALLSAPALGLPDTSKPFTLFLDERQGIAKGVLTQKLGPWKRPVAYLSKKLDPVAAGWPPCLRIMAATAMLVKDSAKLTLGQPLTVITPHTLEAIVRQPPDRWITNARLTHYQALLLDTDRVQFGPPVTLNPATLLPVPENQPSPHDCRQVLAETHGTREDLKDQELPDADHTWYTDGSSYLDSGTRRAGAAVVDGHNTIWAQSLPPGTSAQKAELIALTKALELSKGKKANIYTDSRYAFATAHTHGSIYERRGWLTSEGKEIKNKAEIIALLKALFLPQEVAIIHCPGHQKGQDPVAVGNRQADRVARQAAMAEVLTLATEPDNTSHITAGKRTADGSEFEKRTADGSEFESPKKKAKVE

SEQ ID NO: 1938 - protein, 2102 aa, synthetic construct
MPAAKRVKLDGGDKKYSIGLDIGTNSVGWAVITDEYKVPSKKFKVLGNTDRHSIKKNLIGALLFDSGETAEATRLKRTARRRYTRRKNRICYLQEIFSNEMAKVDDSFFHRLEESFLVEEDKKHERHPIFGNIVDEVAYHEKYPTIYHLRKKLVDSTDKADLRLIYLALAHMIKFRGHFLIEGDLNPDNSDVDKLFIQLVQTYNQLFEENPINASGVDAKAILSARLSKSRRLENLIAQLPGEKKNGLFGNLIALSLGLTPNFKSNFDLAEDAKLQLSKDTYDDDLDNLLAQIGDQYADLFLAAKNLSDAILLSDILRVNTEITKAPLSASMIKRYDEHHQDLTLLKALVRQQLPEKYKEIFFDQSKNGYAGYIDGGASQEEFYKFIKPILEKMDGTEELLVKLNREDLLRKQRTFDNGSIPHQIHLGELHAILRRQEDFYPFLKDNREKIEKILTFRIPYYVGPLARGNSRFAWMTRKSEETITPWNFEEVVDKGASAQSFIERMTNFDKNLPNEKVLPKHSLLYEYFTVYNELTKVKYVTEGMRKPAFLSGEQKKAIVDLLFKTNRKVTVKQLKEDYFKKIECFDSVEISGVEDRFNASLGTYHDLLKIIKDKDFLDNEENEDILEDIVLTLTLFEDREMIEERLKTYAHLFDDKVMKQLKRRRYTGWGRLSRKLINGIRDKQSGKTILDFLKSDGFANRNFMQLIHDDSLTFKEDIQKAQVSGQGDSLHEHIANLAGSPAIKKGILQTVKVVDELVKVMGRHKPENIVIEMARENQTTQKGQKNSRERMKRIEEGIKELGSQILKEHPVENTQLQNEKLYLYYLQNGRDMYVDQELDINRLSDYDVDHIVPQSFLKDDSIDNKVLTRSDKARGKSDNVPSEEVVKKMKNYWRQLLNAKLITQRKFDNLTKAERGGLSELDKAGFIKRQLVETRQITKHVAQILDSRMNTKYDENDKLIREVKVITLKSKLVSDFRKDFQFYKVREINNYHHAHDAYLNAVVGTALIKKYPKLESEFVYGDYKVYDVRKMIAKSEQEIGKATAKYFFYSNIMNFFKTEITLANGEIRKRPLIETNGETGEIVWDKGRDFATVRKVLSMPQVNIVKKTEVQTGGFSKESILPKRNSDKLIARKKDWDPKKYGGFDSPTVAYSVLVVAKVEKGKSKKLKSVKELLGITIMERSSFEKNPIDFLEAKGYKEVKKDLIIKLPKYSLFELENGRKRMLASAGELQKGNELALPSKYVNFLYLASHYEKLKGSPEDNEQKQLFVEQHKHYLDEIIEQISEFSKRVILADANLDKVLSAYNKHRDKPIREQAENIIHLFTLTNLGAPAAFKYFDTTIDRKRYTSTKEVLDATLIHQSITGLYETRIDLSQLGGDGGGGGPAPEAAAKGGTVSLQDEHRLFDIPVTTSLPDVWLQDFPQAWAETGGLGRAKCQAPIIIDLKPTAVPVSIKQYPMSLEAHMGIRQHIIKFLELGVLRPCRSPWNTPLLPVKKPGTQDYRPVQDLREINKRTVDIHPTVPNPYNLLSTLKPDYSWYTVLDLKDAFFCLPLAPQSQELFAFEWKDPERGISGQLTWTRLPQGFKNSPTLFNEALHRDLTDFRTQHPEVTLLQYVDDLLLAAPTKKACTQGTRHLLQELGEKGYRASAKKAQICQTKVTYLGYILSEGKRWLTPGRIETVARIPPPRNPREVREFLGKAGFCRLFIPGFAELAAPLYALTKPSTPFTWQTEHQLAFEALKKALLSAPALGLPDTSKPFTLFLDERQGIAKGVLTQKLGPWKRPVAYLSKKLDPVAAGWPPCLRIMAATAMLVKDSAKLTLGQPLTVITPHTLEAIVRQPPDRWITNARLTHYQALLLDTDRVQFGPPVTLNPATLLPVPENQPSPHDCRQVLAETHGTREDLKDQELPDADHTWYTDGSSYLDSGTRRAGAAVVDGHNTIWAQSLPPGTSAQKAELIALTKALELSKGKKANIYTDSRYAFATAHTHGSIYERRGWLTSEGKEIKNKAEIIALLKALFLPQEVAIIHCPGHQKGQDPVAVGNRQADRVARQAAMAEVLTLATEPDNTSHITAGKRTADGSEFEKRTADGSEFESPKKKAKVE

SEQ ID NO: 1939 - protein, 2102 aa, synthetic construct
MPAAKRVKLDGGDKKYSIGLDIGTNSVGWAVITDEYKVPSKKFKVLGNTDRHSIKKNLIGALLFDSGETAEATRLKRTARRRYTRRKNRICYLQEIFSNEMAKVDDSFFHRLEESFLVEEDKKHERHPIFGNIVDEVAYHEKYPTIYHLRKKLVDSTDKADLRLIYLALAHMIKFRGHFLIEGDLNPDNSDVDKLFIQLVQTYNQLFEENPINASGVDAKAILSARLSKSRRLENLIAQLPGEKKNGLFGNLIALSLGLTPNFKSNFDLAEDAKLQLSKDTYDDDLDNLLAQIGDQYADLFLAAKNLSDAILLSDILRVNTEITKAPLSASMIKRYDEHHQDLTLLKALVRQQLPEKYKEIFFDQSKNGYAGYIDGGASQEEFYKFIKPILEKMDGTEELLVKLNREDLLRKQRTFDNGSIPHQIHLGELHAILRRQEDFYPFLKDNREKIEKILTFRIPYYVGPLARGNSRFAWMTRKSEETITPWNFEEVVDKGASAQSFIERMTNFDKNLPNEKVLPKHSLLYEYFTVYNELTKVKYVTEGMRKPAFLSGEQKKAIVDLLFKTNRKVTVKQLKEDYFKKIECFDSVEISGVEDRFNASLGTYHDLLKIIKDKDFLDNEENEDILEDIVLTLTLFEDREMIEERLKTYAHLFDDKVMKQLKRRRYTGWGRLSRKLINGIRDKQSGKTILDFLKSDGFANRNFMQLIHDDSLTFKEDIQKAQVSGQGDSLHEHIANLAGSPAIKKGILQTVKVVDELVKVMGRHKPENIVIEMARENQTTQKGQKNSRERMKRIEEGIKELGSQILKEHPVENTQLQNEKLYLYYLQNGRDMYVDQELDINRLSDYDVDHIVPQSFLKDDSIDNKVLTRSDKARGKSDNVPSEEVVKKMKNYWRQLLNAKLITQRKFDNLTKAERGGLSELDKAGFIKRQLVETRQITKHVAQILDSRMNTKYDENDKLIREVKVITLKSKLVSDFRKDFQFYKVREINNYHHAHDAYLNAVVGTALIKKYPKLESEFVYGDYKVYDVRKMIAKSEQEIGKATAKYFFYSNIMNFFKTEITLANGEIRKRPLIETNGETGEIVWDKGRDFATVRKVLSMPQVNIVKKTEVQTGGFSKESILPKRNSDKLIARKKDWDPKKYGGFDSPTVAYSVLVVAKVEKGKSKKLKSVKELLGITIMERSSFEKNPIDFLEAKGYKEVKKDLIIKLPKYSLFELENGRKRMLASAGELQKGNELALPSKYVNFLYLASHYEKLKGSPEDNEQKQLFVEQHKHYLDEIIEQISEFSKRVILADANLDKVLSAYNKHRDKPIREQAENIIHLFTLTNLGAPAAFKYFDTTIDRKRYTSTKEVLDATLIHQSITGLYETRIDLSQLGGDGGPAPGGSEAAAKGGTVSLQDEHRLFDIPVTTSLPDVWLQDFPQAWAETGGLGRAKCQAPIIIDLKPTAVPVSIKQYPMSLEAHMGIRQHIIKFLELGVLRPCRSPWNTPLLPVKKPGTQDYRPVQDLREINKRTVDIHPTVPNPYNLLSTLKPDYSWYTVLDLKDAFFCLPLAPQSQELFAFEWKDPERGISGQLTWTRLPQGFKNSPTLFNEALHRDLTDFRTQHPEVTLLQYVDDLLLAAPTKKACTQGTRHLLQELGEKGYRASAKKAQICQTKVTYLGYILSEGKRWLTPGRIETVARIPPPRNPREVREFLGKAGFCRLFIPGFAELAAPLYALTKPSTPFTWQTEHQLAFEALKKALLSAPALGLPDTSKPFTLFLDERQGIAKGVLTQKLGPWKRPVAYLSKKLDPVAAGWPPCLRIMAATAMLVKDSAKLTLGQPLTVITPHTLEAIVRQPPDRWITNARLTHYQALLLDTDRVQFGPPVTLNPATLLPVPENQPSPHDCRQVLAETHGTREDLKDQELPDADHTWYTDGSSYLDSGTRRAGAAVVDGHNTIWAQSLPPGTSAQKAELIALTKALELSKGKKANIYTDSRYAFATAHTHGSIYERRGWLTSEGKEIKNKAEIIALLKALFLPQEVAIIHCPGHQKGQDPVAVGNRQADRVARQAAMAEVLTLATEPDNTSHITAGKRTADGSEFEKRTADGSEFESPKKKAKVE

SEQ ID NO: 1940 - protein, 2097 aa, synthetic construct
MPAAKRVKLDGGDKKYSIGLDIGTNSVGWAVITDEYKVPSKKFKVLGNTDRHSIKKNLIGALLFDSGETAEATRLKRTARRRYTRRKNRICYLQEIFSNEMAKVDDSFFHRLEESFLVEEDKKHERHPIFGNIVDEVAYHEKYPTIYHLRKKLVDSTDKADLRLIYLALAHMIKFRGHFLIEGDLNPDNSDVDKLFIQLVQTYNQLFEENPINASGVDAKAILSARLSKSRRLENLIAQLPGEKKNGLFGNLIALSLGLTPNFKSNFDLAEDAKLQLSKDTYDDDLDNLLAQIGDQYADLFLAAKNLSDAILLSDILRVNTEITKAPLSASMIKRYDEHHQDLTLLKALVRQQLPEKYKEIFFDQSKNGYAGYIDGGASQEEFYKFIKPILEKMDGTEELLVKLNREDLLRKQRTFDNGSIPHQIHLGELHAILRRQEDFYPFLKDNREKIEKILTFRIPYYVGPLARGNSRFAWMTRKSEETITPWNFEEVVDKGASAQSFIERMTNFDKNLPNEKVLPKHSLLYEYFTVYNELTKVKYVTEGMRKPAFLSGEQKKAIVDLLFKTNRKVTVKQLKEDYFKKIECFDSVEISGVEDRFNASLGTYHDLLKIIKDKDFLDNEENEDILEDIVLTLTLFEDREMIEERLKTYAHLFDDKVMKQLKRRRYTGWGRLSRKLINGIRDKQSGKTILDFLKSDGFANRNFMQLIHDDSLTFKEDIQKAQVSGQGDSLHEHIANLAGSPAIKKGILQTVKVVDELVKVMGRHKPENIVIEMARENQTTQKGQKNSRERMKRIEEGIKELGSQILKEHPVENTQLQNEKLYLYYLQNGRDMYVDQELDINRLSDYDVDHIVPQSFLKDDSIDNKVLTRSDKARGKSDNVPSEEVVKKMKNYWRQLLNAKLITQRKFDNLTKAERGGLSELDKAGFIKRQLVETRQITKHVAQILDSRMNTKYDENDKLIREVKVITLKSKLVSDFRKDFQFYKVREINNYHHAHDAYLNAVVGTALIKKYPKLESEFVYGDYKVYDVRKMIAKSEQEIGKATAKYFFYSNIMNFFKTEITLANGEIRKRPLIETNGETGEIVWDKGRDFATVRKVLSMPQVNIVKKTEVQTGGFSKESILPKRNSDKLIARKKDWDPKKYGGFDSPTVAYSVLVVAKVEKGKSKKLKSVKELLGITIMERSSFEKNPIDFLEAKGYKEVKKDLIIKLPKYSLFELENGRKRMLASAGELQKGNELALPSKYVNFLYLASHYEKLKGSPEDNEQKQLFVEQHKHYLDEIIEQISEFSKRVILADANLDKVLSAYNKHRDKPIREQAENIIHLFTLTNLGAPAAFKYFDTTIDRKRYTSTKEVLDATLIHQSITGLYETRIDLSQLGGDGGGGSGGGGGTVSLQDEHRLFDIPVTTSLPDVWLQDFPQAWAETGGLGRAKCQAPIIIDLKPTAVPVSIKQYPMSLEAHMGIRQHIIKFLELGVLRPCRSPWNTPLLPVKKPGTQDYRPVQDLREINKRTVDIHPTVPNPYNLLSTLKPDYSWYTVLDLKDAFFCLPLAPQSQELFAFEWKDPERGISGQLTWTRLPQGFKNSPTLFNEALHRDLTDFRTQHPEVTLLQYVDDLLLAAPTKKACTQGTRHLLQELGEKGYRASAKKAQICQTKVTYLGYILSEGKRWLTPGRIETVARIPPPRNPREVREFLGKAGFCRLFIPGFAELAAPLYALTKPSTPFTWQTEHQLAFEALKKALLSAPALGLPDTSKPFTLFLDERQGIAKGVLTQKLGPWKRPVAYLSKKLDPVAAGWPPCLRIMAATAMLVKDSAKLTLGQPLTVITPHTLEAIVRQPPDRWITNARLTHYQALLLDTDRVQFGPPVTLNPATLLPVPENQPSPHDCRQVLAETHGTREDLKDQELPDADHTWYTDGSSYLDSGTRRAGAAVVDGHNTIWAQSLPPGTSAQKAELIALTKALELSKGKKANIYTDSRYAFATAHTHGSIYERRGWLTSEGKEIKNKAEIIALLKALFLPQEVAIIHCPGHQKGQDPVAVGNRQADRVARQAAMAEVLTLATEPDNTSHITAGKRTADGSEFEKRTADGSEFESPKKKAKVE

SEQ ID NO: 1941 - protein, 2111 aa, synthetic construct
MPAAKRVKLDGGDKKYSIGLDIGTNSVGWAVITDEYKVPSKKFKVLGNTDRHSIKKNLIGALLFDSGETAEATRLKRTARRRYTRRKNRICYLQEIFSNEMAKVDDSFFHRLEESFLVEEDKKHERHPIFGNIVDEVAYHEKYPTIYHLRKKLVDSTDKADLRLIYLALAHMIKFRGHFLIEGDLNPDNSDVDKLFIQLVQTYNQLFEENPINASGVDAKAILSARLSKSRRLENLIAQLPGEKKNGLFGNLIALSLGLTPNFKSNFDLAEDAKLQLSKDTYDDDLDNLLAQIGDQYADLFLAAKNLSDAILLSDILRVNTEITKAPLSASMIKRYDEHHQDLTLLKALVRQQLPEKYKEIFFDQSKNGYAGYIDGGASQEEFYKFIKPILEKMDGTEELLVKLNREDLLRKQRTFDNGSIPHQIHLGELHAILRRQEDFYPFLKDNREKIEKILTFRIPYYVGPLARGNSRFAWMTRKSEETITPWNFEEVVDKGASAQSFIERMTNFDKNLPNEKVLPKHSLLYEYFTVYNELTKVKYVTEGMRKPAFLSGEQKKAIVDLLFKTNRKVTVKQLKEDYFKKIECFDSVEISGVEDRFNASLGTYHDLLKIIKDKDFLDNEENEDILEDIVLTLTLFEDREMIEERLKTYAHLFDDKVMKQLKRRRYTGWGRLSRKLINGIRDKQSGKTILDFLKSDGFANRNFMQLIHDDSLTFKEDIQKAQVSGQGDSLHEHIANLAGSPAIKKGILQTVKVVDELVKVMGRHKPENIVIEMARENQTTQKGQKNSRERMKRIEEGIKELGSQILKEHPVENTQLQNEKLYLYYLQNGRDMYVDQELDINRLSDYDVDHIVPQSFLKDDSIDNKVLTRSDKARGKSDNVPSEEVVKKMKNYWRQLLNAKLITQRKFDNLTKAERGGLSELDKAGFIKRQLVETRQITKHVAQILDSRMNTKYDENDKLIREVKVITLKSKLVSDFRKDFQFYKVREINNYHHAHDAYLNAVVGTALIKKYPKLESEFVYGDYKVYDVRKMIAKSEQEIGKATAKYFFYSNIMNFFKTEITLANGEIRKRPLIETNGETGEIVWDKGRDFATVRKVLSMPQVNIVKKTEVQTGGFSKESILPKRNSDKLIARKKDWDPKKYGGFDSPTVAYSVLVVAKVEKGKSKKLKSVKELLGITIMERSSFEKNPIDFLEAKGYKEVKKDLIIKLPKYSLFELENGRKRMLASAGELQKGNELALPSKYVNFLYLASHYEKLKGSPEDNEQKQLFVEQHKHYLDEIIEQISEFSKRVILADANLDKVLSAYNKHRDKPIREQAENIIHLFTLTNLGAPAAFKYFDTTIDRKRYTSTKEVLDATLIHQSITGLYETRIDLSQLGGDGGEAAAKEAAAKEAAAKEAAAKGGTVSLQDEHRLFDIPVTTSLPDVWLQDFPQAWAETGGLGRAKCQAPIIIDLKPTAVPVSIKQYPMSLEAHMGIRQHIIKFLELGVLRPCRSPWNTPLLPVKKPGTQDYRPVQDLREINKRTVDIHPTVPNPYNLLSTLKPDYSWYTVLDLKDAFFCLPLAPQSQELFAFEWKDPERGISGQLTWTRLPQGFKNSPTLFNEALHRDLTDFRTQHPEVTLLQYVDDLLLAAPTKKACTQGTRHLLQELGEKGYRASAKKAQICQTKVTYLGYILSEGKRWLTPGRIETVARIPPPRNPREVREFLGKAGFCRLFIPGFAELAAPLYALTKPSTPFTWQTEHQLAFEALKKALLSAPALGLPDTSKPFTLFLDERQGIAKGVLTQKLGPWKRPVAYLSKKLDPVAAGWPPCLRIMAATAMLVKDSAKLTLGQPLTVITPHTLEAIVRQPPDRWITNARLTHYQALLLDTDRVQFGPPVTLNPATLLPVPENQPSPHDCRQVLAETHGTREDLKDQELPDADHTWYTDGSSYLDSGTRRAGAAVVDGHNTIWAQSLPPGTSAQKAELIALTKALELSKGKKANIYTDSRYAFATAHTHGSIYERRGWLTSEGKEIKNKAEIIALLKALFLPQEVAIIHCPGHQKGQDPVAVGNRQADRVARQAAMAEVLTLATEPDNTSHITAGKRTADGSEFEKRTADGSEFESPKKKAKVE

SEQ ID NO: 1942 - protein, 2100 aa, synthetic construct
MPAAKRVKLDGGDKKYSIGLDIGTNSVGWAVITDEYKVPSKKFKVLGNTDRHSIKKNLIGALLFDSGETAEATRLKRTARRRYTRRKNRICYLQEIFSNEMAKVDDSFFHRLEESFLVEEDKKHERHPIFGNIVDEVAYHEKYPTIYHLRKKLVDSTDKADLRLIYLALAHMIKFRGHFLIEGDLNPDNSDVDKLFIQLVQTYNQLFEENPINASGVDAKAILSARLSKSRRLENLIAQLPGEKKNGLFGNLIALSLGLTPNFKSNFDLAEDAKLQLSKDTYDDDLDNLLAQIGDQYADLFLAAKNLSDAILLSDILRVNTEITKAPLSASMIKRYDEHHQDLTLLKALVRQQLPEKYKEIFFDQSKNGYAGYIDGGASQEEFYKFIKPILEKMDGTEELLVKLNREDLLRKQRTFDNGSIPHQIHLGELHAILRRQEDFYPFLKDNREKIEKILTFRIPYYVGPLARGNSRFAWMTRKSEETITPWNFEEVVDKGASAQSFIERMTNFDKNLPNEKVLPKHSLLYEYFTVYNELTKVKYVTEGMRKPAFLSGEQKKAIVDLLFKTNRKVTVKQLKEDYFKKIECFDSVEISGVEDRFNASLGTYHDLLKIIKDKDFLDNEENEDILEDIVLTLTLFEDREMIEERLKTYAHLFDDKVMKQLKRRRYTGWGRLSRKLINGIRDKQSGKTILDFLKSDGFANRNFMQLIHDDSLTFKEDIQKAQVSGQGDSLHEHIANLAGSPAIKKGILQTVKVVDELVKVMGRHKPENIVIEMARENQTTQKGQKNSRERMKRIEEGIKELGSQILKEHPVENTQLQNEKLYLYYLQNGRDMYVDQELDINRLSDYDVDHIVPQSFLKDDSIDNKVLTRSDKARGKSDNVPSEEVVKKMKNYWRQLLNAKLITQRKFDNLTKAERGGLSELDKAGFIKRQLVETRQITKHVAQILDSRMNTKYDENDKLIREVKVITLKSKLVSDFRKDFQFYKVREINNYHHAHDAYLNAVVGTALIKKYPKLESEFVYGDYKVYDVRKMIAKSEQEIGKATAKYFFYSNIMNFFKTEITLANGEIRKRPLIETNGETGEIVWDKGRDFATVRKVLSMPQVNIVKKTEVQTGGFSKESILPKRNSDKLIARKKDWDPKKYGGFDSPTVAYSVLVVAKVEKGKSKKLKSVKELLGITIMERSSFEKNPIDFLEAKGYKEVKKDLIIKLPKYSLFELENGRKRMLASAGELQKGNELALPSKYVNFLYLASHYEKLKGSPEDNEQKQLFVEQHKHYLDEIIEQISEFSKRVILADANLDKVLSAYNKHRDKPIREQAENIIHLFTLTNLGAPAAFKYFDTTIDRKRYTSTKEVLDATLIHQSITGLYETRIDLSQLGGDGGGGSGGGPAPGGTVSLQDEHRLFDIPVTTSLPDVWLQDFPQAWAETGGLGRAKCQAPIIIDLKPTAVPVSIKQYPMSLEAHMGIRQHIIKFLELGVLRPCRSPWNTPLLPVKKPGTQDYRPVQDLREINKRTVDIHPTVPNPYNLLSTLKPDYSWYTVLDLKDAFFCLPLAPQSQELFAFEWKDPERGISGQLTWTRLPQGFKNSPTLFNEALHRDLTDFRTQHPEVTLLQYVDDLLLAAPTKKACTQGTRHLLQELGEKGYRASAKKAQICQTKVTYLGYILSEGKRWLTPGRIETVARIPPPRNPREVREFLGKAGFCRLFIPGFAELAAPLYALTKPSTPFTWQTEHQLAFEALKKALLSAPALGLPDTSKPFTLFLDERQGIAKGVLTQKLGPWKRPVAYLSKKLDPVAAGWPPCLRIMAATAMLVKDSAKLTLGQPLTVITPHTLEAIVRQPPDRWITNARLTHYQALLLDTDRVQFGPPVTLNPATLLPVPENQPSPHDCRQVLAETHGTREDLKDQELPDADHTWYTDGSSYLDSGTRRAGAAVVDGHNTIWAQSLPPGTSAQKAELIALTKALELSKGKKANIYTDSRYAFATAHTHGSIYERRGWLTSEGKEIKNKAEIIALLKALFLPQEVAIIHCPGHQKGQDPVAVGNRQADRVARQAAMAEVLTLATEPDNTSHITAGKRTADGSEFEKRTADGSEFESPKKKAKVE

SEQ ID NO: 1943 - protein, 2102 aa, synthetic construct
MPAAKRVKLDGGDKKYSIGLDIGTNSVGWAVITDEYKVPSKKFKVLGNTDRHSIKKNLIGALLFDSGETAEATRLKRTARRRYTRRKNRICYLQEIFSNEMAKVDDSFFHRLEESFLVEEDKKHERHPIFGNIVDEVAYHEKYPTIYHLRKKLVDSTDKADLRLIYLALAHMIKFRGHFLIEGDLNPDNSDVDKLFIQLVQTYNQLFEENPINASGVDAKAILSARLSKSRRLENLIAQLPGEKKNGLFGNLIALSLGLTPNFKSNFDLAEDAKLQLSKDTYDDDLDNLLAQIGDQYADLFLAAKNLSDAILLSDILRVNTEITKAPLSASMIKRYDEHHQDLTLLKALVRQQLPEKYKEIFFDQSKNGYAGYIDGGASQEEFYKFIKPILEKMDGTEELLVKLNREDLLRKQRTFDNGSIPHQIHLGELHAILRRQEDFYPFLKDNREKIEKILTFRIPYYVGPLARGNSRFAWMTRKSEETITPWNFEEVVDKGASAQSFIERMTNFDKNLPNEKVLPKHSLLYEYFTVYNELTKVKYVTEGMRKPAFLSGEQKKAIVDLLFKTNRKVTVKQLKEDYFKKIECFDSVEISGVEDRFNASLGTYHDLLKIIKDKDFLDNEENEDILEDIVLTLTLFEDREMIEERLKTYAHLFDDKVMKQLKRRRYTGWGRLSRKLINGIRDKQSGKTILDFLKSDGFANRNFMQLIHDDSLTFKEDIQKAQVSGQGDSLHEHIANLAGSPAIKKGILQTVKVVDELVKVMGRHKPENIVIEMARENQTTQKGQKNSRERMKRIEEGIKELGSQILKEHPVENTQLQNEKLYLYYLQNGRDMYVDQELDINRLSDYDVDHIVPQSFLKDDSIDNKVLTRSDKARGKSDNVPSEEVVKKMKNYWRQLLNAKLITQRKFDNLTKAERGGLSELDKAGFIKRQLVETRQITKHVAQILDSRMNTKYDENDKLIREVKVITLKSKLVSDFRKDFQFYKVREINNYHHAHDAYLNAVVGTALIKKYPKLESEFVYGDYKVYDVRKMIAKSEQEIGKATAKYFFYSNIMNFFKTEITLANGEIRKRPLIETNGETGEIVWDKGRDFATVRKVLSMPQVNIVKKTEVQTGGFSKESILPKRNSDKLIARKKDWDPKKYGGFDSPTVAYSVLVVAKVEKGKSKKLKSVKELLGITIMERSSFEKNPIDFLEAKGYKEVKKDLIIKLPKYSLFELENGRKRMLASAGELQKGNELALPSKYVNFLYLASHYEKLKGSPEDNEQKQLFVEQHKHYLDEIIEQISEFSKRVILADANLDKVLSAYNKHRDKPIREQAENIIHLFTLTNLGAPAAFKYFDTTIDRKRYTSTKEVLDATLIHQSITGLYETRIDLSQLGGDGGGGGEAAAKGGSGGTVSLQDEHRLFDIPVTTSLPDVWLQDFPQAWAETGGLGRAKCQAPIIIDLKPTAVPVSIKQYPMSLEAHMGIRQHIIKFLELGVLRPCRSPWNTPLLPVKKPGTQDYRPVQDLREINKRTVDIHPTVPNPYNLLSTLKPDYSWYTVLDLKDAFFCLPLAPQSQELFAFEWKDPERGISGQLTWTRLPQGFKNSPTLFNEALHRDLTDFRTQHPEVTLLQYVDDLLLAAPTKKACTQGTRHLLQELGEKGYRASAKKAQICQTKVTYLGYILSEGKRWLTPGRIETVARIPPPRNPREVREFLGKAGFCRLFIPGFAELAAPLYALTKPSTPFTWQTEHQLAFEALKKALLSAPALGLPDTSKPFTLFLDERQGIAKGVLTQKLGPWKRPVAYLSKKLDPVAAGWPPCLRIMAATAMLVKDSAKLTLGQPLTVITPHTLEAIVRQPPDRWITNARLTHYQALLLDTDRVQFGPPVTLNPATLLPVPENQPSPHDCRQVLAETHGTREDLKDQELPDADHTWYTDGSSYLDSGTRRAGAAVVDGHNTIWAQSLPPGTSAQKAELIALTKALELSKGKKANIYTDSRYAFATAHTHGSIYERRGWLTSEGKEIKNKAEIIALLKALFLPQEVAIIHCPGHQKGQDPVAVGNRQADRVARQAAMAEVLTLATEPDNTSHITAGKRTADGSEFEKRTADGSEFESPKKKAKVE

SEQ ID NO: 1944 - protein, 2116 aa, synthetic construct
MPAAKRVKLDGGDKKYSIGLDIGTNSVGWAVITDEYKVPSKKFKVLGNTDRHSIKKNLIGALLFDSGETAEATRLKRTARRRYTRRKNRICYLQEIFSNEMAKVDDSFFHRLEESFLVEEDKKHERHPIFGNIVDEVAYHEKYPTIYHLRKKLVDSTDKADLRLIYLALAHMIKFRGHFLIEGDLNPDNSDVDKLFIQLVQTYNQLFEENPINASGVDAKAILSARLSKSRRLENLIAQLPGEKKNGLFGNLIALSLGLTPNFKSNFDLAEDAKLQLSKDTYDDDLDNLLAQIGDQYADLFLAAKNLSDAILLSDILRVNTEITKAPLSASMIKRYDEHHQDLTLLKALVRQQLPEKYKEIFFDQSKNGYAGYIDGGASQEEFYKFIKPILEKMDGTEELLVKLNREDLLRKQRTFDNGSIPHQIHLGELHAILRRQEDFYPFLKDNREKIEKILTFRIPYYVGPLARGNSRFAWMTRKSEETITPWNFEEVVDKGASAQSFIERMTNFDKNLPNEKVLPKHSLLYEYFTVYNELTKVKYVTEGMRKPAFLSGEQKKAIVDLLFKTNRKVTVKQLKEDYFKKIECFDSVEISGVEDRFNASLGTYHDLLKIIKDKDFLDNEENEDILEDIVLTLTLFEDREMIEERLKTYAHLFDDKVMKQLKRRRYTGWGRLSRKLINGIRDKQSGKTILDFLKSDGFANRNFMQLIHDDSLTFKEDIQKAQVSGQGDSLHEHIANLAGSPAIKKGILQTVKVVDELVKVMGRHKPENIVIEMARENQTTQKGQKNSRERMKRIEEGIKELGSQILKEHPVENTQLQNEKLYLYYLQNGRDMYVDQELDINRLSDYDVDHIVPQSFLKDDSIDNKVLTRSDKARGKSDNVPSEEVVKKMKNYWRQLLNAKLITQRKFDNLTKAERGGLSELDKAGFIKRQLVETRQITKHVAQILDSRMNTKYDENDKLIREVKVITLKSKLVSDFRKDFQFYKVREINNYHHAHDAYLNAVVGTALIKKYPKLESEFVYGDYKVYDVRKMIAKSEQEIGKATAKYFFYSNIMNFFKTEITLANGEIRKRPLIETNGETGEIVWDKGRDFATVRKVLSMPQVNIVKKTEVQTGGFSKESILPKRNSDKLIARKKDWDPKKYGGFDSPTVAYSVLVVAKVEKGKSKKLKSVKELLGITIMERSSFEKNPIDFLEAKGYKEVKKDLIIKLPKYSLFELENGRKRMLASAGELQKGNELALPSKYVNFLYLASHYEKLKGSPEDNEQKQLFVEQHKHYLDEIIEQISEFSKRVILADANLDKVLSAYNKHRDKPIREQAENIIHLFTLTNLGAPAAFKYFDTTIDRKRYTSTKEVLDATLIHQSITGLYETRIDLSQLGGDGGGGGGSGGGGSGGGGSGGGGSGGGGSGGTVSLQDEHRLFDIPVTTSLPDVWLQDFPQAWAETGGLGRAKCQAPIIIDLKPTAVPVSIKQYPMSLEAHMGIRQHIIKFLELGVLRPCRSPWNTPLLPVKKPGTQDYRPVQDLREINKRTVDIHPTVPNPYNLLSTLKPDYSWYTVLDLKDAFFCLPLAPQSQELFAFEWKDPERGISGQLTWTRLPQGFKNSPTLFNEALHRDLTDFRTQHPEVTLLQYVDDLLLAAPTKKACTQGTRHLLQELGEKGYRASAKKAQICQTKVTYLGYILSEGKRWLTPGRIETVARIPPPRNPREVREFLGKAGFCRLFIPGFAELAAPLYALTKPSTPFTWQTEHQLAFEALKKALLSAPALGLPDTSKPFTLFLDERQGIAKGVLTQKLGPWKRPVAYLSKKLDPVAAGWPPCLRIMAATAMLVKDSAKLTLGQPLTVITPHTLEAIVRQPPDRWITNARLTHYQALLLDTDRVQFGPPVTLNPATLLPVPENQPSPHDCRQVLAETHGTREDLKDQELPDADHTWYTDGSSYLDSGTRRAGAAVVDGHNTIWAQSLPPGTSAQKAELIALTKALELSKGKKANIYTDSRYAFATAHTHGSIYERRGWLTSEGKEIKNKAEIIALLKALFLPQEVAIIHCPGHQKGQDPVAVGNRQADRVARQAAMAEVLTLATEPDNTSHITAGKRTADGSEFEKRTADGSEFESPKKKAKVE

SEQ ID NO: 1945 - protein, 2096 aa, synthetic construct
MPAAKRVKLDGGDKKYSIGLDIGTNSVGWAVITDEYKVPSKKFKVLGNTDRHSIKKNLIGALLFDSGETAEATRLKRTARRRYTRRKNRICYLQEIFSNEMAKVDDSFFHRLEESFLVEEDKKHERHPIFGNIVDEVAYHEKYPTIYHLRKKLVDSTDKADLRLIYLALAHMIKFRGHFLIEGDLNPDNSDVDKLFIQLVQTYNQLFEENPINASGVDAKAILSARLSKSRRLENLIAQLPGEKKNGLFGNLIALSLGLTPNFKSNFDLAEDAKLQLSKDTYDDDLDNLLAQIGDQYADLFLAAKNLSDAILLSDILRVNTEITKAPLSASMIKRYDEHHQDLTLLKALVRQQLPEKYKEIFFDQSKNGYAGYIDGGASQEEFYKFIKPILEKMDGTEELLVKLNREDLLRKQRTFDNGSIPHQIHLGELHAILRRQEDFYPFLKDNREKIEKILTFRIPYYVGPLARGNSRFAWMTRKSEETITPWNFEEVVDKGASAQSFIERMTNFDKNLPNEKVLPKHSLLYEYFTVYNELTKVKYVTEGMRKPAFLSGEQKKAIVDLLFKTNRKVTVKQLKEDYFKKIECFDSVEISGVEDRFNASLGTYHDLLKIIKDKDFLDNEENEDILEDIVLTLTLFEDREMIEERLKTYAHLFDDKVMKQLKRRRYTGWGRLSRKLINGIRDKQSGKTILDFLKSDGFANRNFMQLIHDDSLTFKEDIQKAQVSGQGDSLHEHIANLAGSPAIKKGILQTVKVVDELVKVMGRHKPENIVIEMARENQTTQKGQKNSRERMKRIEEGIKELGSQILKEHPVENTQLQNEKLYLYYLQNGRDMYVDQELDINRLSDYDVDHIVPQSFLKDDSIDNKVLTRSDKARGKSDNVPSEEVVKKMKNYWRQLLNAKLITQRKFDNLTKAERGGLSELDKAGFIKRQLVETRQITKHVAQILDSRMNTKYDENDKLIREVKVITLKSKLVSDFRKDFQFYKVREINNYHHAHDAYLNAVVGTALIKKYPKLESEFVYGDYKVYDVRKMIAKSEQEIGKATAKYFFYSNIMNFFKTEITLANGEIRKRPLIETNGETGEIVWDKGRDFATVRKVLSMPQVNIVKKTEVQTGGFSKESILPKRNSDKLIARKKDWDPKKYGGFDSPTVAYSVLVVAKVEKGKSKKLKSVKELLGITIMERSSFEKNPIDFLEAKGYKEVKKDLIIKLPKYSLFELENGRKRMLASAGELQKGNELALPSKYVNFLYLASHYEKLKGSPEDNEQKQLFVEQHKHYLDEIIEQISEFSKRVILADANLDKVLSAYNKHRDKPIREQAENIIHLFTLTNLGAPAAFKYFDTTIDRKRYTSTKEVLDATLIHQSITGLYETRIDLSQLGGDGGPAPAPGGTVSLQDEHRLFDIPVTTSLPDVWLQDFPQAWAETGGLGRAKCQAPIIIDLKPTAVPVSIKQYPMSLEAHMGIRQHIIKFLELGVLRPCRSPWNTPLLPVKKPGTQDYRPVQDLREINKRTVDIHPTVPNPYNLLSTLKPDYSWYTVLDLKDAFFCLPLAPQSQELFAFEWKDPERGISGQLTWTRLPQGFKNSPTLFNEALHRDLTDFRTQHPEVTLLQYVDDLLLAAPTKKACTQGTRHLLQELGEKGYRASAKKAQICQTKVTYLGYILSEGKRWLTPGRIETVARIPPPRNPREVREFLGKAGFCRLFIPGFAELAAPLYALTKPSTPFTWQTEHQLAFEALKKALLSAPALGLPDTSKPFTLFLDERQGIAKGVLTQKLGPWKRPVAYLSKKLDPVAAGWPPCLRIMAATAMLVKDSAKLTLGQPLTVITPHTLEAIVRQPPDRWITNARLTHYQALLLDTDRVQFGPPVTLNPATLLPVPENQPSPHDCRQVLAETHGTREDLKDQELPDADHTWYTDGSSYLDSGTRRAGAAVVDGHNTIWAQSLPPGTSAQKAELIALTKALELSKGKKANIYTDSRYAFATAHTHGSIYERRGWLTSEGKEIKNKAEIIALLKALFLPQEVAIIHCPGHQKGQDPVAVGNRQADRVARQAAMAEVLTLATEPDNTSHITAGKRTADGSEFEKRTADGSEFESPKKKAKVE

SEQ ID NO: 1946 - protein, 2116 aa, synthetic construct
MPAAKRVKLDGGDKKYSIGLDIGTNSVGWAVITDEYKVPSKKFKVLGNTDRHSIKKNLIGALLFDSGETAEATRLKRTARRRYTRRKNRICYLQEIFSNEMAKVDDSFFHRLEESFLVEEDKKHERHPIFGNIVDEVAYHEKYPTIYHLRKKLVDSTDKADLRLIYLALAHMIKFRGHFLIEGDLNPDNSDVDKLFIQLVQTYNQLFEENPINASGVDAKAILSARLSKSRRLENLIAQLPGEKKNGLFGNLIALSLGLTPNFKSNFDLAEDAKLQLSKDTYDDDLDNLLAQIGDQYADLFLAAKNLSDAILLSDILRVNTEITKAPLSASMIKRYDEHHQDLTLLKALVRQQLPEKYKEIFFDQSKNGYAGYIDGGASQEEFYKFIKPILEKMDGTEELLVKLNREDLLRKQRTFDNGSIPHQIHLGELHAILRRQEDFYPFLKDNREKIEKILTFRIPYYVGPLARGNSRFAWMTRKSEETITPWNFEEVVDKGASAQSFIERMTNFDKNLPNEKVLPKHSLLYEYFTVYNELTKVKYVTEGMRKPAFLSGEQKKAIVDLLFKTNRKVTVKQLKEDYFKKIECFDSVEISGVEDRFNASLGTYHDLLKIIKDKDFLDNEENEDILEDIVLTLTLFEDREMIEERLKTYAHLFDDKVMKQLKRRRYTGWGRLSRKLINGIRDKQSGKTILDFLKSDGFANRNFMQLIHDDSLTFKEDIQKAQVSGQGDSLHEHIANLAGSPAIKKGILQTVKVVDELVKVMGRHKPENIVIEMARENQTTQKGQKNSRERMKRIEEGIKELGSQILKEHPVENTQLQNEKLYLYYLQNGRDMYVDQELDINRLSDYDVDHIVPQSFLKDDSIDNKVLTRSDKARGKSDNVPSEEVVKKMKNYWRQLLNAKLITQRKFDNLTKAERGGLSELDKAGFIKRQLVETRQITKHVAQILDSRMNTKYDENDKLIREVKVITLKSKLVSDFRKDFQFYKVREINNYHHAHDAYLNAVVGTALIKKYPKLESEFVYGDYKVYDVRKMIAKSEQEIGKATAKYFFYSNIMNFFKTEITLANGEIRKRPLIETNGETGEIVWDKGRDFATVRKVLSMPQVNIVKKTEVQTGGFSKESILPKRNSDKLIARKKDWDPKKYGGFDSPTVAYSVLVVAKVEKGKSKKLKSVKELLGITIMERSSFEKNPIDFLEAKGYKEVKKDLIIKLPKYSLFELENGRKRMLASAGELQKGNELALPSKYVNFLYLASHYEKLKGSPEDNEQKQLFVEQHKHYLDEIIEQISEFSKRVILADANLDKVLSAYNKHRDKPIREQAENIIHLFTLTNLGAPAAFKYFDTTIDRKRYTSTKEVLDATLIHQSITGLYETRIDLSQLGGDGGEAAAKEAAAKEAAAKEAAAKEAAAKGGTVSLQDEHRLFDIPVTTSLPDVWLQDFPQAWAETGGLGRAKCQAPIIIDLKPTAVPVSIKQYPMSLEAHMGIRQHIIKFLELGVLRPCRSPWNTPLLPVKKPGTQDYRPVQDLREINKRTVDIHPTVPNPYNLLSTLKPDYSWYTVLDLKDAFFCLPLAPQSQELFAFEWKDPERGISGQLTWTRLPQGFKNSPTLFNEALHRDLTDFRTQHPEVTLLQYVDDLLLAAPTKKACTQGTRHLLQELGEKGYRASAKKAQICQTKVTYLGYILSEGKRWLTPGRIETVARIPPPRNPREVREFLGKAGFCRLFIPGFAELAAPLYALTKPSTPFTWQTEHQLAFEALKKALLSAPALGLPDTSKPFTLFLDERQGIAKGVLTQKLGPWKRPVAYLSKKLDPVAAGWPPCLRIMAATAMLVKDSAKLTLGQPLTVITPHTLEAIVRQPPDRWITNARLTHYQALLLDTDRVQFGPPVTLNPATLLPVPENQPSPHDCRQVLAETHGTREDLKDQELPDADHTWYTDGSSYLDSGTRRAGAAVVDGHNTIWAQSLPPGTSAQKAELIALTKALELSKGKKANIYTDSRYAFATAHTHGSIYERRGWLTSEGKEIKNKAEIIALLKALFLPQEVAIIHCPGHQKGQDPVAVGNRQADRVARQAAMAEVLTLATEPDNTSHITAGKRTADGSEFEKRTADGSEFESPKKKAKVE

SEQ ID NO: 1947 - protein, 2106 aa, synthetic construct
MPAAKRVKLDGGDKKYSIGLDIGTNSVGWAVITDEYKVPSKKFKVLGNTDRHSIKKNLIGALLFDSGETAEATRLKRTARRRYTRRKNRICYLQEIFSNEMAKVDDSFFHRLEESFLVEEDKKHERHPIFGNIVDEVAYHEKYPTIYHLRKKLVDSTDKADLRLIYLALAHMIKFRGHFLIEGDLNPDNSDVDKLFIQLVQTYNQLFEENPINASGVDAKAILSARLSKSRRLENLIAQLPGEKKNGLFGNLIALSLGLTPNFKSNFDLAEDAKLQLSKDTYDDDLDNLLAQIGDQYADLFLAAKNLSDAILLSDILRVNTEITKAPLSASMIKRYDEHHQDLTLLKALVRQQLPEKYKEIFFDQSKNGYAGYIDGGASQEEFYKFIKPILEKMDGTEELLVKLNREDLLRKQRTFDNGSIPHQIHLGELHAILRRQEDFYPFLKDNREKIEKILTFRIPYYVGPLARGNSRFAWMTRKSEETITPWNFEEVVDKGASAQSFIERMTNFDKNLPNEKVLPKHSLLYEYFTVYNELTKVKYVTEGMRKPAFLSGEQKKAIVDLLFKTNRKVTVKQLKEDYFKKIECFDSVEISGVEDRFNASLGTYHDLLKIIKDKDFLDNEENEDILEDIVLTLTLFEDREMIEERLKTYAHLFDDKVMKQLKRRRYTGWGRLSRKLINGIRDKQSGKTILDFLKSDGFANRNFMQLIHDDSLTFKEDIQKAQVSGQGDSLHEHIANLAGSPAIKKGILQTVKVVDELVKVMGRHKPENIVIEMARENQTTQKGQKNSRERMKRIEEGIKELGSQILKEHPVENTQLQNEKLYLYYLQNGRDMYVDQELDINRLSDYDVDHIVPQSFLKDDSIDNKVLTRSDKARGKSDNVPSEEVVKKMKNYWRQLLNAKLITQRKFDNLTKAERGGLSELDKAGFIKRQLVETRQITKHVAQILDSRMNTKYDENDKLIREVKVITLKSKLVSDFRKDFQFYKVREINNYHHAHDAYLNAVVGTALIKKYPKLESEFVYGDYKVYDVRKMIAKSEQEIGKATAKYFFYSNIMNFFKTEITLANGEIRKRPLIETNGETGEIVWDKGRDFATVRKVLSMPQVNIVKKTEVQTGGFSKESILPKRNSDKLIARKKDWDPKKYGGFDSPTVAYSVLVVAKVEKGKSKKLKSVKELLGITIMERSSFEKNPIDFLEAKGYKEVKKDLIIKLPKYSLFELENGRKRMLASAGELQKGNELALPSKYVNFLYLASHYEKLKGSPEDNEQKQLFVEQHKHYLDEIIEQISEFSKRVILADANLDKVLSAYNKHRDKPIREQAENIIHLFTLTNLGAPAAFKYFDTTIDRKRYTSTKEVLDATLIHQSITGLYETRIDLSQLGGDGGEAAAKGGGGSEAAAKGGTVSLQDEHRLFDIPVTTSLPDVWLQDFPQAWAETGGLGRAKCQAPIIIDLKPTAVPVSIKQYPMSLEAHMGIRQHIIKFLELGVLRPCRSPWNTPLLPVKKPGTQDYRPVQDLREINKRTVDIHPTVPNPYNLLSTLKPDYSWYTVLDLKDAFFCLPLAPQSQELFAFEWKDPERGISGQLTWTRLPQGFKNSPTLFNEALHRDLTDFRTQHPEVTLLQYVDDLLLAAPTKKACTQGTRHLLQELGEKGYRASAKKAQICQTKVTYLGYILSEGKRWLTPGRIETVARIPPPRNPREVREFLGKAGFCRLFIPGFAELAAPLYALTKPSTPFTWQTEHQLAFEALKKALLSAPALGLPDTSKPFTLFLDERQGIAKGVLTQKLGPWKRPVAYLSKKLDPVAAGWPPCLRIMAATAMLVKDSAKLTLGQPLTVITPHTLEAIVRQPPDRWITNARLTHYQALLLDTDRVQFGPPVTLNPATLLPVPENQPSPHDCRQVLAETHGTREDLKDQELPDADHTWYTDGSSYLDSGTRRAGAAVVDGHNTIWAQSLPPGTSAQKAELIALTKALELSKGKKANIYTDSRYAFATAHTHGSIYERRGWLTSEGKEIKNKAEIIALLKALFLPQEVAIIHCPGHQKGQDPVAVGNRQADRVARQAAMAEVLTLATEPDNTSHITAGKRTADGSEFEKRTADGSEFESPKKKAKVE

SEQ ID NO: 1948 - protein, 2106 aa, synthetic construct
MPAAKRVKLDGGDKKYSIGLDIGTNSVGWAVITDEYKVPSKKFKVLGNTDRHSIKKNLIGALLFDSGETAEATRLKRTARRRYTRRKNRICYLQEIFSNEMAKVDDSFFHRLEESFLVEEDKKHERHPIFGNIVDEVAYHEKYPTIYHLRKKLVDSTDKADLRLIYLALAHMIKFRGHFLIEGDLNPDNSDVDKLFIQLVQTYNQLFEENPINASGVDAKAILSARLSKSRRLENLIAQLPGEKKNGLFGNLIALSLGLTPNFKSNFDLAEDAKLQLSKDTYDDDLDNLLAQIGDQYADLFLAAKNLSDAILLSDILRVNTEITKAPLSASMIKRYDEHHQDLTLLKALVRQQLPEKYKEIFFDQSKNGYAGYIDGGASQEEFYKFIKPILEKMDGTEELLVKLNREDLLRKQRTFDNGSIPHQIHLGELHAILRRQEDFYPFLKDNREKIEKILTFRIPYYVGPLARGNSRFAWMTRKSEETITPWNFEEVVDKGASAQSFIERMTNFDKNLPNEKVLPKHSLLYEYFTVYNELTKVKYVTEGMRKPAFLSGEQKKAIVDLLFKTNRKVTVKQLKEDYFKKIECFDSVEISGVEDRFNASLGTYHDLLKIIKDKDFLDNEENEDILEDIVLTLTLFEDREMIEERLKTYAHLFDDKVMKQLKRRRYTGWGRLSRKLINGIRDKQSGKTILDFLKSDGFANRNFMQLIHDDSLTFKEDIQKAQVSGQGDSLHEHIANLAGSPAIKKGILQTVKVVDELVKVMGRHKPENIVIEMARENQTTQKGQKNSRERMKRIEEGIKELGSQILKEHPVENTQLQNEKLYLYYLQNGRDMYVDQELDINRLSDYDVDHIVPQSFLKDDSIDNKVLTRSDKARGKSDNVPSEEVVKKMKNYWRQLLNAKLITQRKFDNLTKAERGGLSELDKAGFIKRQLVETRQITKHVAQILDSRMNTKYDENDKLIREVKVITLKSKLVSDFRKDFQFYKVREINNYHHAHDAYLNAVVGTALIKKYPKLESEFVYGDYKVYDVRKMIAKSEQEIGKATAKYFFYSNIMNFFKTEITLANGEIRKRPLIETNGETGEIVWDKGRDFATVRKVLSMPQVNIVKKTEVQTGGFSKESILPKRNSDKLIARKKDWDPKKYGGFDSPTVAYSVLVVAKVEKGKSKKLKSVKELLGITIMERSSFEKNPIDFLEAKGYKEVKKDLIIKLPKYSLFELENGRKRMLASAGELQKGNELALPSKYVNFLYLASHYEKLKGSPEDNEQKQLFVEQHKHYLDEIIEQISEFSKRVILADANLDKVLSAYNKHRDKPIREQAENIIHLFTLTNLGAPAAFKYFDTTIDRKRYTSTKEVLDATLIHQSITGLYETRIDLSQLGGDGGGSSGSSGSSGSSGSSGGTVSLQDEHRLFDIPVTTSLPDVWLQDFPQAWAETGGLGRAKCQAPIIIDLKPTAVPVSIKQYPMSLEAHMGIRQHIIKFLELGVLRPCRSPWNTPLLPVKKPGTQDYRPVQDLREINKRTVDIHPTVPNPYNLLSTLKPDYSWYTVLDLKDAFFCLPLAPQSQELFAFEWKDPERGISGQLTWTRLPQGFKNSPTLFNEALHRDLTDFRTQHPEVTLLQYVDDLLLAAPTKKACTQGTRHLLQELGEKGYRASAKKAQICQTKVTYLGYILSEGKRWLTPGRIETVARIPPPRNPREVREFLGKAGFCRLFIPGFAELAAPLYALTKPSTPFTWQTEHQLAFEALKKALLSAPALGLPDTSKPFTLFLDERQGIAKGVLTQKLGPWKRPVAYLSKKLDPVAAGWPPCLRIMAATAMLVKDSAKLTLGQPLTVITPHTLEAIVRQPPDRWITNARLTHYQALLLDTDRVQFGPPVTLNPATLLPVPENQPSPHDCRQVLAETHGTREDLKDQELPDADHTWYTDGSSYLDSGTRRAGAAVVDGHNTIWAQSLPPGTSAQKAELIALTKALELSKGKKANIYTDSRYAFATAHTHGSIYERRGWLTSEGKEIKNKAEIIALLKALFLPQEVAIIHCPGHQKGQDPVAVGNRQADRVARQAAMAEVLTLATEPDNTSHITAGKRTADGSEFEKRTADGSEFESPKKKAKVE

SEQ ID NO: 1949 - protein, 2106 aa, synthetic construct
MPAAKRVKLDGGDKKYSIGLDIGTNSVGWAVITDEYKVPSKKFKVLGNTDRHSIKKNLIGALLFDSGETAEATRLKRTARRRYTRRKNRICYLQEIFSNEMAKVDDSFFHRLEESFLVEEDKKHERHPIFGNIVDEVAYHEKYPTIYHLRKKLVDSTDKADLRLIYLALAHMIKFRGHFLIEGDLNPDNSDVDKLFIQLVQTYNQLFEENPINASGVDAKAILSARLSKSRRLENLIAQLPGEKKNGLFGNLIALSLGLTPNFKSNFDLAEDAKLQLSKDTYDDDLDNLLAQIGDQYADLFLAAKNLSDAILLSDILRVNTEITKAPLSASMIKRYDEHHQDLTLLKALVRQQLPEKYKEIFFDQSKNGYAGYIDGGASQEEFYKFIKPILEKMDGTEELLVKLNREDLLRKQRTFDNGSIPHQIHLGELHAILRRQEDFYPFLKDNREKIEKILTFRIPYYVGPLARGNSRFAWMTRKSEETITPWNFEEVVDKGASAQSFIERMTNFDKNLPNEKVLPKHSLLYEYFTVYNELTKVKYVTEGMRKPAFLSGEQKKAIVDLLFKTNRKVTVKQLKEDYFKKIECFDSVEISGVEDRFNASLGTYHDLLKIIKDKDFLDNEENEDILEDIVLTLTLFEDREMIEERLKTYAHLFDDKVMKQLKRRRYTGWGRLSRKLINGIRDKQSGKTILDFLKSDGFANRNFMQLIHDDSLTFKEDIQKAQVSGQGDSLHEHIANLAGSPAIKKGILQTVKVVDELVKVMGRHKPENIVIEMARENQTTQKGQKNSRERMKRIEEGIKELGSQILKEHPVENTQLQNEKLYLYYLQNGRDMYVDQELDINRLSDYDVDHIVPQSFLKDDSIDNKVLTRSDKARGKSDNVPSEEVVKKMKNYWRQLLNAKLITQRKFDNLTKAERGGLSELDKAGFIKRQLVETRQITKHVAQILDSRMNTKYDENDKLIREVKVITLKSKLVSDFRKDFQFYKVREINNYHHAHDAYLNAVVGTALIKKYPKLESEFVYGDYKVYDVRKMIAKSEQEIGKATAKYFFYSNIMNFFKTEITLANGEIRKRPLIETNGETGEIVWDKGRDFATVRKVLSMPQVNIVKKTEVQTGGFSKESILPKRNSDKLIARKKDWDPKKYGGFDSPTVAYSVLVVAKVEKGKSKKLKSVKELLGITIMERSSFEKNPIDFLEAKGYKEVKKDLIIKLPKYSLFELENGRKRMLASAGELQKGNELALPSKYVNFLYLASHYEKLKGSPEDNEQKQLFVEQHKHYLDEIIEQISEFSKRVILADANLDKVLSAYNKHRDKPIREQAENIIHLFTLTNLGAPAAFKYFDTTIDRKRYTSTKEVLDATLIHQSITGLYETRIDLSQLGGDGGGGGGSEAAAKGGGGSGGTVSLQDEHRLFDIPVTTSLPDVWLQDFPQAWAETGGLGRAKCQAPIIIDLKPTAVPVSIKQYPMSLEAHMGIRQHIIKFLELGVLRPCRSPWNTPLLPVKKPGTQDYRPVQDLREINKRTVDIHPTVPNPYNLLSTLKPDYSWYTVLDLKDAFFCLPLAPQSQELFAFEWKDPERGISGQLTWTRLPQGFKNSPTLFNEALHRDLTDFRTQHPEVTLLQYVDDLLLAAPTKKACTQGTRHLLQELGEKGYRASAKKAQICQTKVTYLGYILSEGKRWLTPGRIETVARIPPPRNPREVREFLGKAGFCRLFIPGFAELAAPLYALTKPSTPFTWQTEHQLAFEALKKALLSAPALGLPDTSKPFTLFLDERQGIAKGVLTQKLGPWKRPVAYLSKKLDPVAAGWPPCLRIMAATAMLVKDSAKLTLGQPLTVITPHTLEAIVRQPPDRWITNARLTHYQALLLDTDRVQFGPPVTLNPATLLPVPENQPSPHDCRQVLAETHGTREDLKDQELPDADHTWYTDGSSYLDSGTRRAGAAVVDGHNTIWAQSLPPGTSAQKAELIALTKALELSKGKKANIYTDSRYAFATAHTHGSIYERRGWLTSEGKEIKNKAEIIALLKALFLPQEVAIIHCPGHQKGQDPVAVGNRQADRVARQAAMAEVLTLATEPDNTSHITAGKRTADGSEFEKRTADGSEFESPKKKAKVE

SEQ ID NO: 1950 - protein, 2097 aa, synthetic construct
MPAAKRVKLDGGDKKYSIGLDIGTNSVGWAVITDEYKVPSKKFKVLGNTDRHSIKKNLIGALLFDSGETAEATRLKRTARRRYTRRKNRICYLQEIFSNEMAKVDDSFFHRLEESFLVEEDKKHERHPIFGNIVDEVAYHEKYPTIYHLRKKLVDSTDKADLRLIYLALAHMIKFRGHFLIEGDLNPDNSDVDKLFIQLVQTYNQLFEENPINASGVDAKAILSARLSKSRRLENLIAQLPGEKKNGLFGNLIALSLGLTPNFKSNFDLAEDAKLQLSKDTYDDDLDNLLAQIGDQYADLFLAAKNLSDAILLSDILRVNTEITKAPLSASMIKRYDEHHQDLTLLKALVRQQLPEKYKEIFFDQSKNGYAGYIDGGASQEEFYKFIKPILEKMDGTEELLVKLNREDLLRKQRTFDNGSIPHQIHLGELHAILRRQEDFYPFLKDNREKIEKILTFRIPYYVGPLARGNSRFAWMTRKSEETITPWNFEEVVDKGASAQSFIERMTNFDKNLPNEKVLPKHSLLYEYFTVYNELTKVKYVTEGMRKPAFLSGEQKKAIVDLLFKTNRKVTVKQLKEDYFKKIECFDSVEISGVEDRFNASLGTYHDLLKIIKDKDFLDNEENEDILEDIVLTLTLFEDREMIEERLKTYAHLFDDKVMKQLKRRRYTGWGRLSRKLINGIRDKQSGKTILDFLKSDGFANRNFMQLIHDDSLTFKEDIQKAQVSGQGDSLHEHIANLAGSPAIKKGILQTVKVVDELVKVMGRHKPENIVIEMARENQTTQKGQKNSRERMKRIEEGIKELGSQILKEHPVENTQLQNEKLYLYYLQNGRDMYVDQELDINRLSDYDVDHIVPQSFLKDDSIDNKVLTRSDKARGKSDNVPSEEVVKKMKNYWRQLLNAKLITQRKFDNLTKAERGGLSELDKAGFIKRQLVETRQITKHVAQILDSRMNTKYDENDKLIREVKVITLKSKLVSDFRKDFQFYKVREINNYHHAHDAYLNAVVGTALIKKYPKLESEFVYGDYKVYDVRKMIAKSEQEIGKATAKYFFYSNIMNFFKTEITLANGEIRKRPLIETNGETGEIVWDKGRDFATVRKVLSMPQVNIVKKTEVQTGGFSKESILPKRNSDKLIARKKDWDPKKYGGFDSPTVAYSVLVVAKVEKGKSKKLKSVKELLGITIMERSSFEKNPIDFLEAKGYKEVKKDLIIKLPKYSLFELENGRKRMLASAGELQKGNELALPSKYVNFLYLASHYEKLKGSPEDNEQKQLFVEQHKHYLDEIIEQISEFSKRVILADANLDKVLSAYNKHRDKPIREQAENIIHLFTLTNLGAPAAFKYFDTTIDRKRYTSTKEVLDATLIHQSITGLYETRIDLSQLGGDGGGGGGSSGGTVSLQDEHRLFDIPVTTSLPDVWLQDFPQAWAETGGLGRAKCQAPIIIDLKPTAVPVSIKQYPMSLEAHMGIRQHIIKFLELGVLRPCRSPWNTPLLPVKKPGTQDYRPVQDLREINKRTVDIHPTVPNPYNLLSTLKPDYSWYTVLDLKDAFFCLPLAPQSQELFAFEWKDPERGISGQLTWTRLPQGFKNSPTLFNEALHRDLTDFRTQHPEVTLLQYVDDLLLAAPTKKACTQGTRHLLQELGEKGYRASAKKAQICQTKVTYLGYILSEGKRWLTPGRIETVARIPPPRNPREVREFLGKAGFCRLFIPGFAELAAPLYALTKPSTPFTWQTEHQLAFEALKKALLSAPALGLPDTSKPFTLFLDERQGIAKGVLTQKLGPWKRPVAYLSKKLDPVAAGWPPCLRIMAATAMLVKDSAKLTLGQPLTVITPHTLEAIVRQPPDRWITNARLTHYQALLLDTDRVQFGPPVTLNPATLLPVPENQPSPHDCRQVLAETHGTREDLKDQELPDADHTWYTDGSSYLDSGTRRAGAAVVDGHNTIWAQSLPPGTSAQKAELIALTKALELSKGKKANIYTDSRYAFATAHTHGSIYERRGWLTSEGKEIKNKAEIIALLKALFLPQEVAIIHCPGHQKGQDPVAVGNRQADRVARQAAMAEVLTLATEPDNTSHITAGKRTADGSEFEKRTADGSEFESPKKKAKVE

SEQ ID NO: 1951 - protein, 2102 aa, synthetic construct
MPAAKRVKLDGGDKKYSIGLDIGTNSVGWAVITDEYKVPSKKFKVLGNTDRHSIKKNLIGALLFDSGETAEATRLKRTARRRYTRRKNRICYLQEIFSNEMAKVDDSFFHRLEESFLVEEDKKHERHPIFGNIVDEVAYHEKYPTIYHLRKKLVDSTDKADLRLIYLALAHMIKFRGHFLIEGDLNPDNSDVDKLFIQLVQTYNQLFEENPINASGVDAKAILSARLSKSRRLENLIAQLPGEKKNGLFGNLIALSLGLTPNFKSNFDLAEDAKLQLSKDTYDDDLDNLLAQIGDQYADLFLAAKNLSDAILLSDILRVNTEITKAPLSASMIKRYDEHHQDLTLLKALVRQQLPEKYKEIFFDQSKNGYAGYIDGGASQEEFYKFIKPILEKMDGTEELLVKLNREDLLRKQRTFDNGSIPHQIHLGELHAILRRQEDFYPFLKDNREKIEKILTFRIPYYVGPLARGNSRFAWMTRKSEETITPWNFEEVVDKGASAQSFIERMTNFDKNLPNEKVLPKHSLLYEYFTVYNELTKVKYVTEGMRKPAFLSGEQKKAIVDLLFKTNRKVTVKQLKEDYFKKIECFDSVEISGVEDRFNASLGTYHDLLKIIKDKDFLDNEENEDILEDIVLTLTLFEDREMIEERLKTYAHLFDDKVMKQLKRRRYTGWGRLSRKLINGIRDKQSGKTILDFLKSDGFANRNFMQLIHDDSLTFKEDIQKAQVSGQGDSLHEHIANLAGSPAIKKGILQTVKVVDELVKVMGRHKPENIVIEMARENQTTQKGQKNSRERMKRIEEGIKELGSQILKEHPVENTQLQNEKLYLYYLQNGRDMYVDQELDINRLSDYDVDHIVPQSFLKDDSIDNKVLTRSDKARGKSDNVPSEEVVKKMKNYWRQLLNAKLITQRKFDNLTKAERGGLSELDKAGFIKRQLVETRQITKHVAQILDSRMNTKYDENDKLIREVKVITLKSKLVSDFRKDFQFYKVREINNYHHAHDAYLNAVVGTALIKKYPKLESEFVYGDYKVYDVRKMIAKSEQEIGKATAKYFFYSNIMNFFKTEITLANGEIRKRPLIETNGETGEIVWDKGRDFATVRKVLSMPQVNIVKKTEVQTGGFSKESILPKRNSDKLIARKKDWDPKKYGGFDSPTVAYSVLVVAKVEKGKSKKLKSVKELLGITIMERSSFEKNPIDFLEAKGYKEVKKDLIIKLPKYSLFELENGRKRMLASAGELQKGNELALPSKYVNFLYLASHYEKLKGSPEDNEQKQLFVEQHKHYLDEIIEQISEFSKRVILADANLDKVLSAYNKHRDKPIREQAENIIHLFTLTNLGAPAAFKYFDTTIDRKRYTSTKEVLDATLIHQSITGLYETRIDLSQLGGDGGGGSGSSEAAAKGGTVSLQDEHRLFDIPVTTSLPDVWLQDFPQAWAETGGLGRAKCQAPIIIDLKPTAVPVSIKQYPMSLEAHMGIRQHIIKFLELGVLRPCRSPWNTPLLPVKKPGTQDYRPVQDLREINKRTVDIHPTVPNPYNLLSTLKPDYSWYTVLDLKDAFFCLPLAPQSQELFAFEWKDPERGISGQLTWTRLPQGFKNSPTLFNEALHRDLTDFRTQHPEVTLLQYVDDLLLAAPTKKACTQGTRHLLQELGEKGYRASAKKAQICQTKVTYLGYILSEGKRWLTPGRIETVARIPPPRNPREVREFLGKAGFCRLFIPGFAELAAPLYALTKPSTPFTWQTEHQLAFEALKKALLSAPALGLPDTSKPFTLFLDERQGIAKGVLTQKLGPWKRPVAYLSKKLDPVAAGWPPCLRIMAATAMLVKDSAKLTLGQPLTVITPHTLEAIVRQPPDRWITNARLTHYQALLLDTDRVQFGPPVTLNPATLLPVPENQPSPHDCRQVLAETHGTREDLKDQELPDADHTWYTDGSSYLDSGTRRAGAAVVDGHNTIWAQSLPPGTSAQKAELIALTKALELSKGKKANIYTDSRYAFATAHTHGSIYERRGWLTSEGKEIKNKAEIIALLKALFLPQEVAIIHCPGHQKGQDPVAVGNRQADRVARQAAMAEVLTLATEPDNTSHITAGKRTADGSEFEKRTADGSEFESPKKKAKVE

SEQ ID NO: 1952 - protein, 2102 aa, synthetic construct
MPAAKRVKLDGGDKKYSIGLDIGTNSVGWAVITDEYKVPSKKFKVLGNTDRHSIKKNLIGALLFDSGETAEATRLKRTARRRYTRRKNRICYLQEIFSNEMAKVDDSFFHRLEESFLVEEDKKHERHPIFGNIVDEVAYHEKYPTIYHLRKKLVDSTDKADLRLIYLALAHMIKFRGHFLIEGDLNPDNSDVDKLFIQLVQTYNQLFEENPINASGVDAKAILSARLSKSRRLENLIAQLPGEKKNGLFGNLIALSLGLTPNFKSNFDLAEDAKLQLSKDTYDDDLDNLLAQIGDQYADLFLAAKNLSDAILLSDILRVNTEITKAPLSASMIKRYDEHHQDLTLLKALVRQQLPEKYKEIFFDQSKNGYAGYIDGGASQEEFYKFIKPILEKMDGTEELLVKLNREDLLRKQRTFDNGSIPHQIHLGELHAILRRQEDFYPFLKDNREKIEKILTFRIPYYVGPLARGNSRFAWMTRKSEETITPWNFEEVVDKGASAQSFIERMTNFDKNLPNEKVLPKHSLLYEYFTVYNELTKVKYVTEGMRKPAFLSGEQKKAIVDLLFKTNRKVTVKQLKEDYFKKIECFDSVEISGVEDRFNASLGTYHDLLKIIKDKDFLDNEENEDILEDIVLTLTLFEDREMIEERLKTYAHLFDDKVMKQLKRRRYTGWGRLSRKLINGIRDKQSGKTILDFLKSDGFANRNFMQLIHDDSLTFKEDIQKAQVSGQGDSLHEHIANLAGSPAIKKGILQTVKVVDELVKVMGRHKPENIVIEMARENQTTQKGQKNSRERMKRIEEGIKELGSQILKEHPVENTQLQNEKLYLYYLQNGRDMYVDQELDINRLSDYDVDHIVPQSFLKDDSIDNKVLTRSDKARGKSDNVPSEEVVKKMKNYWRQLLNAKLITQRKFDNLTKAERGGLSELDKAGFIKRQLVETRQITKHVAQILDSRMNTKYDENDKLIREVKVITLKSKLVSDFRKDFQFYKVREINNYHHAHDAYLNAVVGTALIKKYPKLESEFVYGDYKVYDVRKMIAKSEQEIGKATAKYFFYSNIMNFFKTEITLANGEIRKRPLIETNGETGEIVWDKGRDFATVRKVLSMPQVNIVKKTEVQTGGFSKESILPKRNSDKLIARKKDWDPKKYGGFDSPTVAYSVLVVAKVEKGKSKKLKSVKELLGITIMERSSFEKNPIDFLEAKGYKEVKKDLIIKLPKYSLFELENGRKRMLASAGELQKGNELALPSKYVNFLYLASHYEKLKGSPEDNEQKQLFVEQHKHYLDEIIEQISEFSKRVILADANLDKVLSAYNKHRDKPIREQAENIIHLFTLTNLGAPAAFKYFDTTIDRKRYTSTKEVLDATLIHQSITGLYETRIDLSQLGGDGGGSSGGGEAAAKGGTVSLQDEHRLFDIPVTTSLPDVWLQDFPQAWAETGGLGRAKCQAPIIIDLKPTAVPVSIKQYPMSLEAHMGIRQHIIKFLELGVLRPCRSPWNTPLLPVKKPGTQDYRPVQDLREINKRTVDIHPTVPNPYNLLSTLKPDYSWYTVLDLKDAFFCLPLAPQSQELFAFEWKDPERGISGQLTWTRLPQGFKNSPTLFNEALHRDLTDFRTQHPEVTLLQYVDDLLLAAPTKKACTQGTRHLLQELGEKGYRASAKKAQICQTKVTYLGYILSEGKRWLTPGRIETVARIPPPRNPREVREFLGKAGFCRLFIPGFAELAAPLYALTKPSTPFTWQTEHQLAFEALKKALLSAPALGLPDTSKPFTLFLDERQGIAKGVLTQKLGPWKRPVAYLSKKLDPVAAGWPPCLRIMAATAMLVKDSAKLTLGQPLTVITPHTLEAIVRQPPDRWITNARLTHYQALLLDTDRVQFGPPVTLNPATLLPVPENQPSPHDCRQVLAETHGTREDLKDQELPDADHTWYTDGSSYLDSGTRRAGAAVVDGHNTIWAQSLPPGTSAQKAELIALTKALELSKGKKANIYTDSRYAFATAHTHGSIYERRGWLTSEGKEIKNKAEIIALLKALFLPQEVAIIHCPGHQKGQDPVAVGNRQADRVARQAAMAEVLTLATEPDNTSHITAGKRTADGSEFEKRTADGSEFESPKKKAKVE

SEQ ID NO: 1953 - protein, 2098 aa, synthetic construct
MPAAKRVKLDGGDKKYSIGLDIGTNSVGWAVITDEYKVPSKKFKVLGNTDRHSIKKNLIGALLFDSGETAEATRLKRTARRRYTRRKNRICYLQEIFSNEMAKVDDSFFHRLEESFLVEEDKKHERHPIFGNIVDEVAYHEKYPTIYHLRKKLVDSTDKADLRLIYLALAHMIKFRGHFLIEGDLNPDNSDVDKLFIQLVQTYNQLFEENPINASGVDAKAILSARLSKSRRLENLIAQLPGEKKNGLFGNLIALSLGLTPNFKSNFDLAEDAKLQLSKDTYDDDLDNLLAQIGDQYADLFLAAKNLSDAILLSDILRVNTEITKAPLSASMIKRYDEHHQDLTLLKALVRQQLPEKYKEIFFDQSKNGYAGYIDGGASQEEFYKFIKPILEKMDGTEELLVKLNREDLLRKQRTFDNGSIPHQIHLGELHAILRRQEDFYPFLKDNREKIEKILTFRIPYYVGPLARGNSRFAWMTRKSEETITPWNFEEVVDKGASAQSFIERMTNFDKNLPNEKVLPKHSLLYEYFTVYNELTKVKYVTEGMRKPAFLSGEQKKAIVDLLFKTNRKVTVKQLKEDYFKKIECFDSVEISGVEDRFNASLGTYHDLLKIIKDKDFLDNEENEDILEDIVLTLTLFEDREMIEERLKTYAHLFDDKVMKQLKRRRYTGWGRLSRKLINGIRDKQSGKTILDFLKSDGFANRNFMQLIHDDSLTFKEDIQKAQVSGQGDSLHEHIANLAGSPAIKKGILQTVKVVDELVKVMGRHKPENIVIEMARENQTTQKGQKNSRERMKRIEEGIKELGSQILKEHPVENTQLQNEKLYLYYLQNGRDMYVDQELDINRLSDYDVDHIVPQSFLKDDSIDNKVLTRSDKARGKSDNVPSEEVVKKMKNYWRQLLNAKLITQRKFDNLTKAERGGLSELDKAGFIKRQLVETRQITKHVAQILDSRMNTKYDENDKLIREVKVITLKSKLVSDFRKDFQFYKVREINNYHHAHDAYLNAVVGTALIKKYPKLESEFVYGDYKVYDVRKMIAKSEQEIGKATAKYFFYSNIMNFFKTEITLANGEIRKRPLIETNGETGEIVWDKGRDFATVRKVLSMPQVNIVKKTEVQTGGFSKESILPKRNSDKLIARKKDWDPKKYGGFDSPTVAYSVLVVAKVEKGKSKKLKSVKELLGITIMERSSFEKNPIDFLEAKGYKEVKKDLIIKLPKYSLFELENGRKRMLASAGELQKGNELALPSKYVNFLYLASHYEKLKGSPEDNEQKQLFVEQHKHYLDEIIEQISEFSKRVILADANLDKVLSAYNKHRDKPIREQAENIIHLFTLTNLGAPAAFKYFDTTIDRKRYTSTKEVLDATLIHQSITGLYETRIDLSQLGGDGGPAPAPAPGGTVSLQDEHRLFDIPVTTSLPDVWLQDFPQAWAETGGLGRAKCQAPIIIDLKPTAVPVSIKQYPMSLEAHMGIRQHIIKFLELGVLRPCRSPWNTPLLPVKKPGTQDYRPVQDLREINKRTVDIHPTVPNPYNLLSTLKPDYSWYTVLDLKDAFFCLPLAPQSQELFAFEWKDPERGISGQLTWTRLPQGFKNSPTLFNEALHRDLTDFRTQHPEVTLLQYVDDLLLAAPTKKACTQGTRHLLQELGEKGYRASAKKAQICQTKVTYLGYILSEGKRWLTPGRIETVARIPPPRNPREVREFLGKAGFCRLFIPGFAELAAPLYALTKPSTPFTWQTEHQLAFEALKKALLSAPALGLPDTSKPFTLFLDERQGIAKGVLTQKLGPWKRPVAYLSKKLDPVAAGWPPCLRIMAATAMLVKDSAKLTLGQPLTVITPHTLEAIVRQPPDRWITNARLTHYQALLLDTDRVQFGPPVTLNPATLLPVPENQPSPHDCRQVLAETHGTREDLKDQELPDADHTWYTDGSSYLDSGTRRAGAAVVDGHNTIWAQSLPPGTSAQKAELIALTKALELSKGKKANIYTDSRYAFATAHTHGSIYERRGWLTSEGKEIKNKAEIIALLKALFLPQEVAIIHCPGHQKGQDPVAVGNRQADRVARQAAMAEVLTLATEPDNTSHITAGKRTADGSEFEKRTADGSEFESPKKKAKVE

SEQ ID NO: 1954 - protein, 2102 aa, synthetic construct
MPAAKRVKLDGGDKKYSIGLDIGTNSVGWAVITDEYKVPSKKFKVLGNTDRHSIKKNLIGALLFDSGETAEATRLKRTARRRYTRRKNRICYLQEIFSNEMAKVDDSFFHRLEESFLVEEDKKHERHPIFGNIVDEVAYHEKYPTIYHLRKKLVDSTDKADLRLIYLALAHMIKFRGHFLIEGDLNPDNSDVDKLFIQLVQTYNQLFEENPINASGVDAKAILSARLSKSRRLENLIAQLPGEKKNGLFGNLIALSLGLTPNFKSNFDLAEDAKLQLSKDTYDDDLDNLLAQIGDQYADLFLAAKNLSDAILLSDILRVNTEITKAPLSASMIKRYDEHHQDLTLLKALVRQQLPEKYKEIFFDQSKNGYAGYIDGGASQEEFYKFIKPILEKMDGTEELLVKLNREDLLRKQRTFDNGSIPHQIHLGELHAILRRQEDFYPFLKDNREKIEKILTFRIPYYVGPLARGNSRFAWMTRKSEETITPWNFEEVVDKGASAQSFIERMTNFDKNLPNEKVLPKHSLLYEYFTVYNELTKVKYVTEGMRKPAFLSGEQKKAIVDLLFKTNRKVTVKQLKEDYFKKIECFDSVEISGVEDRFNASLGTYHDLLKIIKDKDFLDNEENEDILEDIVLTLTLFEDREMIEERLKTYAHLFDDKVMKQLKRRRYTGWGRLSRKLINGIRDKQSGKTILDFLKSDGFANRNFMQLIHDDSLTFKEDIQKAQVSGQGDSLHEHIANLAGSPAIKKGILQTVKVVDELVKVMGRHKPENIVIEMARENQTTQKGQKNSRERMKRIEEGIKELGSQILKEHPVENTQLQNEKLYLYYLQNGRDMYVDQELDINRLSDYDVDHIVPQSFLKDDSIDNKVLTRSDKARGKSDNVPSEEVVKKMKNYWRQLLNAKLITQRKFDNLTKAERGGLSELDKAGFIKRQLVETRQITKHVAQILDSRMNTKYDENDKLIREVKVITLKSKLVSDFRKDFQFYKVREINNYHHAHDAYLNAVVGTALIKKYPKLESEFVYGDYKVYDVRKMIAKSEQEIGKATAKYFFYSNIMNFFKTEITLANGEIRKRPLIETNGETGEIVWDKGRDFATVRKVLSMPQVNIVKKTEVQTGGFSKESILPKRNSDKLIARKKDWDPKKYGGFDSPTVAYSVLVVAKVEKGKSKKLKSVKELLGITIMERSSFEKNPIDFLEAKGYKEVKKDLIIKLPKYSLFELENGRKRMLASAGELQKGNELALPSKYVNFLYLASHYEKLKGSPEDNEQKQLFVEQHKHYLDEIIEQISEFSKRVILADANLDKVLSAYNKHRDKPIREQAENIIHLFTLTNLGAPAAFKYFDTTIDRKRYTSTKEVLDATLIHQSITGLYETRIDLSQLGGDGGGGSPAPEAAAKGGTVSLQDEHRLFDIPVTTSLPDVWLQDFPQAWAETGGLGRAKCQAPIIIDLKPTAVPVSIKQYPMSLEAHMGIRQHIIKFLELGVLRPCRSPWNTPLLPVKKPGTQDYRPVQDLREINKRTVDIHPTVPNPYNLLSTLKPDYSWYTVLDLKDAFFCLPLAPQSQELFAFEWKDPERGISGQLTWTRLPQGFKNSPTLFNEALHRDLTDFRTQHPEVTLLQYVDDLLLAAPTKKACTQGTRHLLQELGEKGYRASAKKAQICQTKVTYLGYILSEGKRWLTPGRIETVARIPPPRNPREVREFLGKAGFCRLFIPGFAELAAPLYALTKPSTPFTWQTEHQLAFEALKKALLSAPALGLPDTSKPFTLFLDERQGIAKGVLTQKLGPWKRPVAYLSKKLDPVAAGWPPCLRIMAATAMLVKDSAKLTLGQPLTVITPHTLEAIVRQPPDRWITNARLTHYQALLLDTDRVQFGPPVTLNPATLLPVPENQPSPHDCRQVLAETHGTREDLKDQELPDADHTWYTDGSSYLDSGTRRAGAAVVDGHNTIWAQSLPPGTSAQKAELIALTKALELSKGKKANIYTDSRYAFATAHTHGSIYERRGWLTSEGKEIKNKAEIIALLKALFLPQEVAIIHCPGHQKGQDPVAVGNRQADRVARQAAMAEVLTLATEPDNTSHITAGKRTADGSEFEKRTADGSEFESPKKKAKVE

SEQ ID NO: 1955 - protein, 2103 aa, synthetic construct
MPAAKRVKLDGGDKKYSIGLDIGTNSVGWAVITDEYKVPSKKFKVLGNTDRHSIKKNLIGALLFDSGETAEATRLKRTARRRYTRRKNRICYLQEIFSNEMAKVDDSFFHRLEESFLVEEDKKHERHPIFGNIVDEVAYHEKYPTIYHLRKKLVDSTDKADLRLIYLALAHMIKFRGHFLIEGDLNPDNSDVDKLFIQLVQTYNQLFEENPINASGVDAKAILSARLSKSRRLENLIAQLPGEKKNGLFGNLIALSLGLTPNFKSNFDLAEDAKLQLSKDTYDDDLDNLLAQIGDQYADLFLAAKNLSDAILLSDILRVNTEITKAPLSASMIKRYDEHHQDLTLLKALVRQQLPEKYKEIFFDQSKNGYAGYIDGGASQEEFYKFIKPILEKMDGTEELLVKLNREDLLRKQRTFDNGSIPHQIHLGELHAILRRQEDFYPFLKDNREKIEKILTFRIPYYVGPLARGNSRFAWMTRKSEETITPWNFEEVVDKGASAQSFIERMTNFDKNLPNEKVLPKHSLLYEYFTVYNELTKVKYVTEGMRKPAFLSGEQKKAIVDLLFKTNRKVTVKQLKEDYFKKIECFDSVEISGVEDRFNASLGTYHDLLKIIKDKDFLDNEENEDILEDIVLTLTLFEDREMIEERLKTYAHLFDDKVMKQLKRRRYTGWGRLSRKLINGIRDKQSGKTILDFLKSDGFANRNFMQLIHDDSLTFKEDIQKAQVSGQGDSLHEHIANLAGSPAIKKGILQTVKVVDELVKVMGRHKPENIVIEMARENQTTQKGQKNSRERMKRIEEGIKELGSQILKEHPVENTQLQNEKLYLYYLQNGRDMYVDQELDINRLSDYDVDHIVPQSFLKDDSIDNKVLTRSDKARGKSDNVPSEEVVKKMKNYWRQLLNAKLITQRKFDNLTKAERGGLSELDKAGFIKRQLVETRQITKHVAQILDSRMNTKYDENDKLIREVKVITLKSKLVSDFRKDFQFYKVREINNYHHAHDAYLNAVVGTALIKKYPKLESEFVYGDYKVYDVRKMIAKSEQEIGKATAKYFFYSNIMNFFKTEITLANGEIRKRPLIETNGETGEIVWDKGRDFATVRKVLSMPQVNIVKKTEVQTGGFSKESILPKRNSDKLIARKKDWDPKKYGGFDSPTVAYSVLVVAKVEKGKSKKLKSVKELLGITIMERSSFEKNPIDFLEAKGYKEVKKDLIIKLPKYSLFELENGRKRMLASAGELQKGNELALPSKYVNFLYLASHYEKLKGSPEDNEQKQLFVEQHKHYLDEIIEQISEFSKRVILADANLDKVLSAYNKHRDKPIREQAENIIHLFTLTNLGAPAAFKYFDTTIDRKRYTSTKEVLDATLIHQSITGLYETRIDLSQLGGDGGGGSGGSGGSGGSGGTVSLQDEHRLFDIPVTTSLPDVWLQDFPQAWAETGGLGRAKCQAPIIIDLKPTAVPVSIKQYPMSLEAHMGIRQHIIKFLELGVLRPCRSPWNTPLLPVKKPGTQDYRPVQDLREINKRTVDIHPTVPNPYNLLSTLKPDYSWYTVLDLKDAFFCLPLAPQSQELFAFEWKDPERGISGQLTWTRLPQGFKNSPTLFNEALHRDLTDFRTQHPEVTLLQYVDDLLLAAPTKKACTQGTRHLLQELGEKGYRASAKKAQICQTKVTYLGYILSEGKRWLTPGRIETVARIPPPRNPREVREFLGKAGFCRLFIPGFAELAAPLYALTKPSTPFTWQTEHQLAFEALKKALLSAPALGLPDTSKPFTLFLDERQGIAKGVLTQKLGPWKRPVAYLSKKLDPVAAGWPPCLRIMAATAMLVKDSAKLTLGQPLTVITPHTLEAIVRQPPDRWITNARLTHYQALLLDTDRVQFGPPVTLNPATLLPVPENQPSPHDCRQVLAETHGTREDLKDQELPDADHTWYTDGSSYLDSGTRRAGAAVVDGHNTIWAQSLPPGTSAQKAELIALTKALELSKGKKANIYTDSRYAFATAHTHGSIYERRGWLTSEGKEIKNKAEIIALLKALFLPQEVAIIHCPGHQKGQDPVAVGNRQADRVARQAAMAEVLTLATEPDNTSHITAGKRTADGSEFEKRTADGSEFESPKKKAKVE

SEQ ID NO: 1956 - protein, 2097 aa, synthetic construct
MPAAKRVKLDGGDKKYSIGLDIGTNSVGWAVITDEYKVPSKKFKVLGNTDRHSIKKNLIGALLFDSGETAEATRLKRTARRRYTRRKNRICYLQEIFSNEMAKVDDSFFHRLEESFLVEEDKKHERHPIFGNIVDEVAYHEKYPTIYHLRKKLVDSTDKADLRLIYLALAHMIKFRGHFLIEGDLNPDNSDVDKLFIQLVQTYNQLFEENPINASGVDAKAILSARLSKSRRLENLIAQLPGEKKNGLFGNLIALSLGLTPNFKSNFDLAEDAKLQLSKDTYDDDLDNLLAQIGDQYADLFLAAKNLSDAILLSDILRVNTEITKAPLSASMIKRYDEHHQDLTLLKALVRQQLPEKYKEIFFDQSKNGYAGYIDGGASQEEFYKFIKPILEKMDGTEELLVKLNREDLLRKQRTFDNGSIPHQIHLGELHAILRRQEDFYPFLKDNREKIEKILTFRIPYYVGPLARGNSRFAWMTRKSEETITPWNFEEVVDKGASAQSFIERMTNFDKNLPNEKVLPKHSLLYEYFTVYNELTKVKYVTEGMRKPAFLSGEQKKAIVDLLFKTNRKVTVKQLKEDYFKKIECFDSVEISGVEDRFNASLGTYHDLLKIIKDKDFLDNEENEDILEDIVLTLTLFEDREMIEERLKTYAHLFDDKVMKQLKRRRYTGWGRLSRKLINGIRDKQSGKTILDFLKSDGFANRNFMQLIHDDSLTFKEDIQKAQVSGQGDSLHEHIANLAGSPAIKKGILQTVKVVDELVKVMGRHKPENIVIEMARENQTTQKGQKNSRERMKRIEEGIKELGSQILKEHPVENTQLQNEKLYLYYLQNGRDMYVDQELDINRLSDYDVDHIVPQSFLKDDSIDNKVLTRSDKARGKSDNVPSEEVVKKMKNYWRQLLNAKLITQRKFDNLTKAERGGLSELDKAGFIKRQLVETRQITKHVAQILDSRMNTKYDENDKLIREVKVITLKSKLVSDFRKDFQFYKVREINNYHHAHDAYLNAVVGTALIKKYPKLESEFVYGDYKVYDVRKMIAKSEQEIGKATAKYFFYSNIMNFFKTEITLANGEIRKRPLIETNGETGEIVWDKGRDFATVRKVLSMPQVNIVKKTEVQTGGFSKESILPKRNSDKLIARKKDWDPKKYGGFDSPTVAYSVLVVAKVEKGKSKKLKSVKELLGITIMERSSFEKNPIDFLEAKGYKEVKKDLIIKLPKYSLFELENGRKRMLASAGELQKGNELALPSKYVNFLYLASHYEKLKGSPEDNEQKQLFVEQHKHYLDEIIEQISEFSKRVILADANLDKVLSAYNKHRDKPIREQAENIIHLFTLTNLGAPAAFKYFDTTIDRKRYTSTKEVLDATLIHQSITGLYETRIDLSQLGGDGGGGGGGGGGTVSLQDEHRLFDIPVTTSLPDVWLQDFPQAWAETGGLGRAKCQAPIIIDLKPTAVPVSIKQYPMSLEAHMGIRQHIIKFLELGVLRPCRSPWNTPLLPVKKPGTQDYRPVQDLREINKRTVDIHPTVPNPYNLLSTLKPDYSWYTVLDLKDAFFCLPLAPQSQELFAFEWKDPERGISGQLTWTRLPQGFKNSPTLFNEALHRDLTDFRTQHPEVTLLQYVDDLLLAAPTKKACTQGTRHLLQELGEKGYRASAKKAQICQTKVTYLGYILSEGKRWLTPGRIETVARIPPPRNPREVREFLGKAGFCRLFIPGFAELAAPLYALTKPSTPFTWQTEHQLAFEALKKALLSAPALGLPDTSKPFTLFLDERQGIAKGVLTQKLGPWKRPVAYLSKKLDPVAAGWPPCLRIMAATAMLVKDSAKLTLGQPLTVITPHTLEAIVRQPPDRWITNARLTHYQALLLDTDRVQFGPPVTLNPATLLPVPENQPSPHDCRQVLAETHGTREDLKDQELPDADHTWYTDGSSYLDSGTRRAGAAVVDGHNTIWAQSLPPGTSAQKAELIALTKALELSKGKKANIYTDSRYAFATAHTHGSIYERRGWLTSEGKEIKNKAEIIALLKALFLPQEVAIIHCPGHQKGQDPVAVGNRQADRVARQAAMAEVLTLATEPDNTSHITAGKRTADGSEFEKRTADGSEFESPKKKAKVE

SEQ ID NO: 1957 - protein, 2109 aa, synthetic construct
MPAAKRVKLDGGDKKYSIGLDIGTNSVGWAVITDEYKVPSKKFKVLGNTDRHSIKKNLIGALLFDSGETAEATRLKRTARRRYTRRKNRICYLQEIFSNEMAKVDDSFFHRLEESFLVEEDKKHERHPIFGNIVDEVAYHEKYPTIYHLRKKLVDSTDKADLRLIYLALAHMIKFRGHFLIEGDLNPDNSDVDKLFIQLVQTYNQLFEENPINASGVDAKAILSARLSKSRRLENLIAQLPGEKKNGLFGNLIALSLGLTPNFKSNFDLAEDAKLQLSKDTYDDDLDNLLAQIGDQYADLFLAAKNLSDAILLSDILRVNTEITKAPLSASMIKRYDEHHQDLTLLKALVRQQLPEKYKEIFFDQSKNGYAGYIDGGASQEEFYKFIKPILEKMDGTEELLVKLNREDLLRKQRTFDNGSIPHQIHLGELHAILRRQEDFYPFLKDNREKIEKILTFRIPYYVGPLARGNSRFAWMTRKSEETITPWNFEEVVDKGASAQSFIERMTNFDKNLPNEKVLPKHSLLYEYFTVYNELTKVKYVTEGMRKPAFLSGEQKKAIVDLLFKTNRKVTVKQLKEDYFKKIECFDSVEISGVEDRFNASLGTYHDLLKIIKDKDFLDNEENEDILEDIVLTLTLFEDREMIEERLKTYAHLFDDKVMKQLKRRRYTGWGRLSRKLINGIRDKQSGKTILDFLKSDGFANRNFMQLIHDDSLTFKEDIQKAQVSGQGDSLHEHIANLAGSPAIKKGILQTVKVVDELVKVMGRHKPENIVIEMARENQTTQKGQKNSRERMKRIEEGIKELGSQILKEHPVENTQLQNEKLYLYYLQNGRDMYVDQELDINRLSDYDVDHIVPQSFLKDDSIDNKVLTRSDKARGKSDNVPSEEVVKKMKNYWRQLLNAKLITQRKFDNLTKAERGGLSELDKAGFIKRQLVETRQITKHVAQILDSRMNTKYDENDKLIREVKVITLKSKLVSDFRKDFQFYKVREINNYHHAHDAYLNAVVGTALIKKYPKLESEFVYGDYKVYDVRKMIAKSEQEIGKATAKYFFYSNIMNFFKTEITLANGEIRKRPLIETNGETGEIVWDKGRDFATVRKVLSMPQVNIVKKTEVQTGGFSKESILPKRNSDKLIARKKDWDPKKYGGFDSPTVAYSVLVVAKVEKGKSKKLKSVKELLGITIMERSSFEKNPIDFLEAKGYKEVKKDLIIKLPKYSLFELENGRKRMLASAGELQKGNELALPSKYVNFLYLASHYEKLKGSPEDNEQKQLFVEQHKHYLDEIIEQISEFSKRVILADANLDKVLSAYNKHRDKPIREQAENIIHLFTLTNLGAPAAFKYFDTTIDRKRYTSTKEVLDATLIHQSITGLYETRIDLSQLGGDGGGGSGGSGGSGGSGGSGGSGGTVSLQDEHRLFDIPVTTSLPDVWLQDFPQAWAETGGLGRAKCQAPIIIDLKPTAVPVSIKQYPMSLEAHMGIRQHIIKFLELGVLRPCRSPWNTPLLPVKKPGTQDYRPVQDLREINKRTVDIHPTVPNPYNLLSTLKPDYSWYTVLDLKDAFFCLPLAPQSQELFAFEWKDPERGISGQLTWTRLPQGFKNSPTLFNEALHRDLTDFRTQHPEVTLLQYVDDLLLAAPTKKACTQGTRHLLQELGEKGYRASAKKAQICQTKVTYLGYILSEGKRWLTPGRIETVARIPPPRNPREVREFLGKAGFCRLFIPGFAELAAPLYALTKPSTPFTWQTEHQLAFEALKKALLSAPALGLPDTSKPFTLFLDERQGIAKGVLTQKLGPWKRPVAYLSKKLDPVAAGWPPCLRIMAATAMLVKDSAKLTLGQPLTVITPHTLEAIVRQPPDRWITNARLTHYQALLLDTDRVQFGPPVTLNPATLLPVPENQPSPHDCRQVLAETHGTREDLKDQELPDADHTWYTDGSSYLDSGTRRAGAAVVDGHNTIWAQSLPPGTSAQKAELIALTKALELSKGKKANIYTDSRYAFATAHTHGSIYERRGWLTSEGKEIKNKAEIIALLKALFLPQEVAIIHCPGHQKGQDPVAVGNRQADRVARQAAMAEVLTLATEPDNTSHITAGKRTADGSEFEKRTADGSEFESPKKKAKVE

SEQ ID NO: 1958 - protein, 2100 aa, synthetic construct
MPAAKRVKLDGGDKKYSIGLDIGTNSVGWAVITDEYKVPSKKFKVLGNTDRHSIKKNLIGALLFDSGETAEATRLKRTARRRYTRRKNRICYLQEIFSNEMAKVDDSFFHRLEESFLVEEDKKHERHPIFGNIVDEVAYHEKYPTIYHLRKKLVDSTDKADLRLIYLALAHMIKFRGHFLIEGDLNPDNSDVDKLFIQLVQTYNQLFEENPINASGVDAKAILSARLSKSRRLENLIAQLPGEKKNGLFGNLIALSLGLTPNFKSNFDLAEDAKLQLSKDTYDDDLDNLLAQIGDQYADLFLAAKNLSDAILLSDILRVNTEITKAPLSASMIKRYDEHHQDLTLLKALVRQQLPEKYKEIFFDQSKNGYAGYIDGGASQEEFYKFIKPILEKMDGTEELLVKLNREDLLRKQRTFDNGSIPHQIHLGELHAILRRQEDFYPFLKDNREKIEKILTFRIPYYVGPLARGNSRFAWMTRKSEETITPWNFEEVVDKGASAQSFIERMTNFDKNLPNEKVLPKHSLLYEYFTVYNELTKVKYVTEGMRKPAFLSGEQKKAIVDLLFKTNRKVTVKQLKEDYFKKIECFDSVEISGVEDRFNASLGTYHDLLKIIKDKDFLDNEENEDILEDIVLTLTLFEDREMIEERLKTYAHLFDDKVMKQLKRRRYTGWGRLSRKLINGIRDKQSGKTILDFLKSDGFANRNFMQLIHDDSLTFKEDIQKAQVSGQGDSLHEHIANLAGSPAIKKGILQTVKVVDELVKVMGRHKPENIVIEMARENQTTQKGQKNSRERMKRIEEGIKELGSQILKEHPVENTQLQNEKLYLYYLQNGRDMYVDQELDINRLSDYDVDHIVPQSFLKDDSIDNKVLTRSDKARGKSDNVPSEEVVKKMKNYWRQLLNAKLITQRKFDNLTKAERGGLSELDKAGFIKRQLVETRQITKHVAQILDSRMNTKYDENDKLIREVKVITLKSKLVSDFRKDFQFYKVREINNYHHAHDAYLNAVVGTALIKKYPKLESEFVYGDYKVYDVRKMIAKSEQEIGKATAKYFFYSNIMNFFKTEITLANGEIRKRPLIETNGETGEIVWDKGRDFATVRKVLSMPQVNIVKKTEVQTGGFSKESILPKRNSDKLIARKKDWDPKKYGGFDSPTVAYSVLVVAKVEKGKSKKLKSVKELLGITIMERSSFEKNPIDFLEAKGYKEVKKDLIIKLPKYSLFELENGRKRMLASAGELQKGNELALPSKYVNFLYLASHYEKLKGSPEDNEQKQLFVEQHKHYLDEIIEQISEFSKRVILADANLDKVLSAYNKHRDKPIREQAENIIHLFTLTNLGAPAAFKYFDTTIDRKRYTSTKEVLDATLIHQSITGLYETRIDLSQLGGDGGGGSGSSPAPGGTVSLQDEHRLFDIPVTTSLPDVWLQDFPQAWAETGGLGRAKCQAPIIIDLKPTAVPVSIKQYPMSLEAHMGIRQHIIKFLELGVLRPCRSPWNTPLLPVKKPGTQDYRPVQDLREINKRTVDIHPTVPNPYNLLSTLKPDYSWYTVLDLKDAFFCLPLAPQSQELFAFEWKDPERGISGQLTWTRLPQGFKNSPTLFNEALHRDLTDFRTQHPEVTLLQYVDDLLLAAPTKKACTQGTRHLLQELGEKGYRASAKKAQICQTKVTYLGYILSEGKRWLTPGRIETVARIPPPRNPREVREFLGKAGFCRLFIPGFAELAAPLYALTKPSTPFTWQTEHQLAFEALKKALLSAPALGLPDTSKPFTLFLDERQGIAKGVLTQKLGPWKRPVAYLSKKLDPVAAGWPPCLRIMAATAMLVKDSAKLTLGQPLTVITPHTLEAIVRQPPDRWITNARLTHYQALLLDTDRVQFGPPVTLNPATLLPVPENQPSPHDCRQVLAETHGTREDLKDQELPDADHTWYTDGSSYLDSGTRRAGAAVVDGHNTIWAQSLPPGTSAQKAELIALTKALELSKGKKANIYTDSRYAFATAHTHGSIYERRGWLTSEGKEIKNKAEIIALLKALFLPQEVAIIHCPGHQKGQDPVAVGNRQADRVARQAAMAEVLTLATEPDNTSHITAGKRTADGSEFEKRTADGSEFESPKKKAKVE

SEQ ID NO: 1959 - protein, 2102 aa, synthetic construct
MPAAKRVKLDGGDKKYSIGLDIGTNSVGWAVITDEYKVPSKKFKVLGNTDRHSIKKNLIGALLFDSGETAEATRLKRTARRRYTRRKNRICYLQEIFSNEMAKVDDSFFHRLEESFLVEEDKKHERHPIFGNIVDEVAYHEKYPTIYHLRKKLVDSTDKADLRLIYLALAHMIKFRGHFLIEGDLNPDNSDVDKLFIQLVQTYNQLFEENPINASGVDAKAILSARLSKSRRLENLIAQLPGEKKNGLFGNLIALSLGLTPNFKSNFDLAEDAKLQLSKDTYDDDLDNLLAQIGDQYADLFLAAKNLSDAILLSDILRVNTEITKAPLSASMIKRYDEHHQDLTLLKALVRQQLPEKYKEIFFDQSKNGYAGYIDGGASQEEFYKFIKPILEKMDGTEELLVKLNREDLLRKQRTFDNGSIPHQIHLGELHAILRRQEDFYPFLKDNREKIEKILTFRIPYYVGPLARGNSRFAWMTRKSEETITPWNFEEVVDKGASAQSFIERMTNFDKNLPNEKVLPKHSLLYEYFTVYNELTKVKYVTEGMRKPAFLSGEQKKAIVDLLFKTNRKVTVKQLKEDYFKKIECFDSVEISGVEDRFNASLGTYHDLLKIIKDKDFLDNEENEDILEDIVLTLTLFEDREMIEERLKTYAHLFDDKVMKQLKRRRYTGWGRLSRKLINGIRDKQSGKTILDFLKSDGFANRNFMQLIHDDSLTFKEDIQKAQVSGQGDSLHEHIANLAGSPAIKKGILQTVKVVDELVKVMGRHKPENIVIEMARENQTTQKGQKNSRERMKRIEEGIKELGSQILKEHPVENTQLQNEKLYLYYLQNGRDMYVDQELDINRLSDYDVDHIVPQSFLKDDSIDNKVLTRSDKARGKSDNVPSEEVVKKMKNYWRQLLNAKLITQRKFDNLTKAERGGLSELDKAGFIKRQLVETRQITKHVAQILDSRMNTKYDENDKLIREVKVITLKSKLVSDFRKDFQFYKVREINNYHHAHDAYLNAVVGTALIKKYPKLESEFVYGDYKVYDVRKMIAKSEQEIGKATAKYFFYSNIMNFFKTEITLANGEIRKRPLIETNGETGEIVWDKGRDFATVRKVLSMPQVNIVKKTEVQTGGFSKESILPKRNSDKLIARKKDWDPKKYGGFDSPTVAYSVLVVAKVEKGKSKKLKSVKELLGITIMERSSFEKNPIDFLEAKGYKEVKKDLIIKLPKYSLFELENGRKRMLASAGELQKGNELALPSKYVNFLYLASHYEKLKGSPEDNEQKQLFVEQHKHYLDEIIEQISEFSKRVILADANLDKVLSAYNKHRDKPIREQAENIIHLFTLTNLGAPAAFKYFDTTIDRKRYTSTKEVLDATLIHQSITGLYETRIDLSQLGGDGGGSSEAAAKGGSGGTVSLQDEHRLFDIPVTTSLPDVWLQDFPQAWAETGGLGRAKCQAPIIIDLKPTAVPVSIKQYPMSLEAHMGIRQHIIKFLELGVLRPCRSPWNTPLLPVKKPGTQDYRPVQDLREINKRTVDIHPTVPNPYNLLSTLKPDYSWYTVLDLKDAFFCLPLAPQSQELFAFEWKDPERGISGQLTWTRLPQGFKNSPTLFNEALHRDLTDFRTQHPEVTLLQYVDDLLLAAPTKKACTQGTRHLLQELGEKGYRASAKKAQICQTKVTYLGYILSEGKRWLTPGRIETVARIPPPRNPREVREFLGKAGFCRLFIPGFAELAAPLYALTKPSTPFTWQTEHQLAFEALKKALLSAPALGLPDTSKPFTLFLDERQGIAKGVLTQKLGPWKRPVAYLSKKLDPVAAGWPPCLRIMAATAMLVKDSAKLTLGQPLTVITPHTLEAIVRQPPDRWITNARLTHYQALLLDTDRVQFGPPVTLNPATLLPVPENQPSPHDCRQVLAETHGTREDLKDQELPDADHTWYTDGSSYLDSGTRRAGAAVVDGHNTIWAQSLPPGTSAQKAELIALTKALELSKGKKANIYTDSRYAFATAHTHGSIYERRGWLTSEGKEIKNKAEIIALLKALFLPQEVAIIHCPGHQKGQDPVAVGNRQADRVARQAAMAEVLTLATEPDNTSHITAGKRTADGSEFEKRTADGSEFESPKKKAKVE

SEQ ID NO: 1960 - protein, 2099 aa, synthetic construct
MPAAKRVKLDGGDKKYSIGLDIGTNSVGWAVITDEYKVPSKKFKVLGNTDRHSIKKNLIGALLFDSGETAEATRLKRTARRRYTRRKNRICYLQEIFSNEMAKVDDSFFHRLEESFLVEEDKKHERHPIFGNIVDEVAYHEKYPTIYHLRKKLVDSTDKADLRLIYLALAHMIKFRGHFLIEGDLNPDNSDVDKLFIQLVQTYNQLFEENPINASGVDAKAILSARLSKSRRLENLIAQLPGEKKNGLFGNLIALSLGLTPNFKSNFDLAEDAKLQLSKDTYDDDLDNLLAQIGDQYADLFLAAKNLSDAILLSDILRVNTEITKAPLSASMIKRYDEHHQDLTLLKALVRQQLPEKYKEIFFDQSKNGYAGYIDGGASQEEFYKFIKPILEKMDGTEELLVKLNREDLLRKQRTFDNGSIPHQIHLGELHAILRRQEDFYPFLKDNREKIEKILTFRIPYYVGPLARGNSRFAWMTRKSEETITPWNFEEVVDKGASAQSFIERMTNFDKNLPNEKVLPKHSLLYEYFTVYNELTKVKYVTEGMRKPAFLSGEQKKAIVDLLFKTNRKVTVKQLKEDYFKKIECFDSVEISGVEDRFNASLGTYHDLLKIIKDKDFLDNEENEDILEDIVLTLTLFEDREMIEERLKTYAHLFDDKVMKQLKRRRYTGWGRLSRKLINGIRDKQSGKTILDFLKSDGFANRNFMQLIHDDSLTFKEDIQKAQVSGQGDSLHEHIANLAGSPAIKKGILQTVKVVDELVKVMGRHKPENIVIEMARENQTTQKGQKNSRERMKRIEEGIKELGSQILKEHPVENTQLQNEKLYLYYLQNGRDMYVDQELDINRLSDYDVDHIVPQSFLKDDSIDNKVLTRSDKARGKSDNVPSEEVVKKMKNYWRQLLNAKLITQRKFDNLTKAERGGLSELDKAGFIKRQLVETRQITKHVAQILDSRMNTKYDENDKLIREVKVITLKSKLVSDFRKDFQFYKVREINNYHHAHDAYLNAVVGTALIKKYPKLESEFVYGDYKVYDVRKMIAKSEQEIGKATAKYFFYSNIMNFFKTEITLANGEIRKRPLIETNGETGEIVWDKGRDFATVRKVLSMPQVNIVKKTEVQTGGFSKESILPKRNSDKLIARKKDWDPKKYGGFDSPTVAYSVLVVAKVEKGKSKKLKSVKELLGITIMERSSFEKNPIDFLEAKGYKEVKKDLIIKLPKYSLFELENGRKRMLASAGELQKGNELALPSKYVNFLYLASHYEKLKGSPEDNEQKQLFVEQHKHYLDEIIEQISEFSKRVILADANLDKVLSAYNKHRDKPIREQAENIIHLFTLTNLGAPAAFKYFDTTIDRKRYTSTKEVLDATLIHQSITGLYETRIDLSQLGGDGGEAAAKPAPGGTVSLQDEHRLFDIPVTTSLPDVWLQDFPQAWAETGGLGRAKCQAPIIIDLKPTAVPVSIKQYPMSLEAHMGIRQHIIKFLELGVLRPCRSPWNTPLLPVKKPGTQDYRPVQDLREINKRTVDIHPTVPNPYNLLSTLKPDYSWYTVLDLKDAFFCLPLAPQSQELFAFEWKDPERGISGQLTWTRLPQGFKNSPTLFNEALHRDLTDFRTQHPEVTLLQYVDDLLLAAPTKKACTQGTRHLLQELGEKGYRASAKKAQICQTKVTYLGYILSEGKRWLTPGRIETVARIPPPRNPREVREFLGKAGFCRLFIPGFAELAAPLYALTKPSTPFTWQTEHQLAFEALKKALLSAPALGLPDTSKPFTLFLDERQGIAKGVLTQKLGPWKRPVAYLSKKLDPVAAGWPPCLRIMAATAMLVKDSAKLTLGQPLTVITPHTLEAIVRQPPDRWITNARLTHYQALLLDTDRVQFGPPVTLNPATLLPVPENQPSPHDCRQVLAETHGTREDLKDQELPDADHTWYTDGSSYLDSGTRRAGAAVVDGHNTIWAQSLPPGTSAQKAELIALTKALELSKGKKANIYTDSRYAFATAHTHGSIYERRGWLTSEGKEIKNKAEIIALLKALFLPQEVAIIHCPGHQKGQDPVAVGNRQADRVARQAAMAEVLTLATEPDNTSHITAGKRTADGSEFEKRTADGSEFESPKKKAKVE

SEQ ID NO: 1961 - protein, 2100 aa, synthetic construct
MPAAKRVKLDGGDKKYSIGLDIGTNSVGWAVITDEYKVPSKKFKVLGNTDRHSIKKNLIGALLFDSGETAEATRLKRTARRRYTRRKNRICYLQEIFSNEMAKVDDSFFHRLEESFLVEEDKKHERHPIFGNIVDEVAYHEKYPTIYHLRKKLVDSTDKADLRLIYLALAHMIKFRGHFLIEGDLNPDNSDVDKLFIQLVQTYNQLFEENPINASGVDAKAILSARLSKSRRLENLIAQLPGEKKNGLFGNLIALSLGLTPNFKSNFDLAEDAKLQLSKDTYDDDLDNLLAQIGDQYADLFLAAKNLSDAILLSDILRVNTEITKAPLSASMIKRYDEHHQDLTLLKALVRQQLPEKYKEIFFDQSKNGYAGYIDGGASQEEFYKFIKPILEKMDGTEELLVKLNREDLLRKQRTFDNGSIPHQIHLGELHAILRRQEDFYPFLKDNREKIEKILTFRIPYYVGPLARGNSRFAWMTRKSEETITPWNFEEVVDKGASAQSFIERMTNFDKNLPNEKVLPKHSLLYEYFTVYNELTKVKYVTEGMRKPAFLSGEQKKAIVDLLFKTNRKVTVKQLKEDYFKKIECFDSVEISGVEDRFNASLGTYHDLLKIIKDKDFLDNEENEDILEDIVLTLTLFEDREMIEERLKTYAHLFDDKVMKQLKRRRYTGWGRLSRKLINGIRDKQSGKTILDFLKSDGFANRNFMQLIHDDSLTFKEDIQKAQVSGQGDSLHEHIANLAGSPAIKKGILQTVKVVDELVKVMGRHKPENIVIEMARENQTTQKGQKNSRERMKRIEEGIKELGSQILKEHPVENTQLQNEKLYLYYLQNGRDMYVDQELDINRLSDYDVDHIVPQSFLKDDSIDNKVLTRSDKARGKSDNVPSEEVVKKMKNYWRQLLNAKLITQRKFDNLTKAERGGLSELDKAGFIKRQLVETRQITKHVAQILDSRMNTKYDENDKLIREVKVITLKSKLVSDFRKDFQFYKVREINNYHHAHDAYLNAVVGTALIKKYPKLESEFVYGDYKVYDVRKMIAKSEQEIGKATAKYFFYSNIMNFFKTEITLANGEIRKRPLIETNGETGEIVWDKGRDFATVRKVLSMPQVNIVKKTEVQTGGFSKESILPKRNSDKLIARKKDWDPKKYGGFDSPTVAYSVLVVAKVEKGKSKKLKSVKELLGITIMERSSFEKNPIDFLEAKGYKEVKKDLIIKLPKYSLFELENGRKRMLASAGELQKGNELALPSKYVNFLYLASHYEKLKGSPEDNEQKQLFVEQHKHYLDEIIEQISEFSKRVILADANLDKVLSAYNKHRDKPIREQAENIIHLFTLTNLGAPAAFKYFDTTIDRKRYTSTKEVLDATLIHQSITGLYETRIDLSQLGGDGGPAPGSSGGSGGTVSLQDEHRLFDIPVTTSLPDVWLQDFPQAWAETGGLGRAKCQAPIIIDLKPTAVPVSIKQYPMSLEAHMGIRQHIIKFLELGVLRPCRSPWNTPLLPVKKPGTQDYRPVQDLREINKRTVDIHPTVPNPYNLLSTLKPDYSWYTVLDLKDAFFCLPLAPQSQELFAFEWKDPERGISGQLTWTRLPQGFKNSPTLFNEALHRDLTDFRTQHPEVTLLQYVDDLLLAAPTKKACTQGTRHLLQELGEKGYRASAKKAQICQTKVTYLGYILSEGKRWLTPGRIETVARIPPPRNPREVREFLGKAGFCRLFIPGFAELAAPLYALTKPSTPFTWQTEHQLAFEALKKALLSAPALGLPDTSKPFTLFLDERQGIAKGVLTQKLGPWKRPVAYLSKKLDPVAAGWPPCLRIMAATAMLVKDSAKLTLGQPLTVITPHTLEAIVRQPPDRWITNARLTHYQALLLDTDRVQFGPPVTLNPATLLPVPENQPSPHDCRQVLAETHGTREDLKDQELPDADHTWYTDGSSYLDSGTRRAGAAVVDGHNTIWAQSLPPGTSAQKAELIALTKALELSKGKKANIYTDSRYAFATAHTHGSIYERRGWLTSEGKEIKNKAEIIALLKALFLPQEVAIIHCPGHQKGQDPVAVGNRQADRVARQAAMAEVLTLATEPDNTSHITAGKRTADGSEFEKRTADGSEFESPKKKAKVE

SEQ ID NO: 1962 - protein, 2100 aa, synthetic construct
MPAAKRVKLDGGDKKYSIGLDIGTNSVGWAVITDEYKVPSKKFKVLGNTDRHSIKKNLIGALLFDSGETAEATRLKRTARRRYTRRKNRICYLQEIFSNEMAKVDDSFFHRLEESFLVEEDKKHERHPIFGNIVDEVAYHEKYPTIYHLRKKLVDSTDKADLRLIYLALAHMIKFRGHFLIEGDLNPDNSDVDKLFIQLVQTYNQLFEENPINASGVDAKAILSARLSKSRRLENLIAQLPGEKKNGLFGNLIALSLGLTPNFKSNFDLAEDAKLQLSKDTYDDDLDNLLAQIGDQYADLFLAAKNLSDAILLSDILRVNTEITKAPLSASMIKRYDEHHQDLTLLKALVRQQLPEKYKEIFFDQSKNGYAGYIDGGASQEEFYKFIKPILEKMDGTEELLVKLNREDLLRKQRTFDNGSIPHQIHLGELHAILRRQEDFYPFLKDNREKIEKILTFRIPYYVGPLARGNSRFAWMTRKSEETITPWNFEEVVDKGASAQSFIERMTNFDKNLPNEKVLPKHSLLYEYFTVYNELTKVKYVTEGMRKPAFLSGEQKKAIVDLLFKTNRKVTVKQLKEDYFKKIECFDSVEISGVEDRFNASLGTYHDLLKIIKDKDFLDNEENEDILEDIVLTLTLFEDREMIEERLKTYAHLFDDKVMKQLKRRRYTGWGRLSRKLINGIRDKQSGKTILDFLKSDGFANRNFMQLIHDDSLTFKEDIQKAQVSGQGDSLHEHIANLAGSPAIKKGILQTVKVVDELVKVMGRHKPENIVIEMARENQTTQKGQKNSRERMKRIEEGIKELGSQILKEHPVENTQLQNEKLYLYYLQNGRDMYVDQELDINRLSDYDVDHIVPQSFLKDDSIDNKVLTRSDKARGKSDNVPSEEVVKKMKNYWRQLLNAKLITQRKFDNLTKAERGGLSELDKAGFIKRQLVETRQITKHVAQILDSRMNTKYDENDKLIREVKVITLKSKLVSDFRKDFQFYKVREINNYHHAHDAYLNAVVGTALIKKYPKLESEFVYGDYKVYDVRKMIAKSEQEIGKATAKYFFYSNIMNFFKTEITLANGEIRKRPLIETNGETGEIVWDKGRDFATVRKVLSMPQVNIVKKTEVQTGGFSKESILPKRNSDKLIARKKDWDPKKYGGFDSPTVAYSVLVVAKVEKGKSKKLKSVKELLGITIMERSSFEKNPIDFLEAKGYKEVKKDLIIKLPKYSLFELENGRKRMLASAGELQKGNELALPSKYVNFLYLASHYEKLKGSPEDNEQKQLFVEQHKHYLDEIIEQISEFSKRVILADANLDKVLSAYNKHRDKPIREQAENIIHLFTLTNLGAPAAFKYFDTTIDRKRYTSTKEVLDATLIHQSITGLYETRIDLSQLGGDGGGSSPAPGGGGGTVSLQDEHRLFDIPVTTSLPDVWLQDFPQAWAETGGLGRAKCQAPIIIDLKPTAVPVSIKQYPMSLEAHMGIRQHIIKFLELGVLRPCRSPWNTPLLPVKKPGTQDYRPVQDLREINKRTVDIHPTVPNPYNLLSTLKPDYSWYTVLDLKDAFFCLPLAPQSQELFAFEWKDPERGISGQLTWTRLPQGFKNSPTLFNEALHRDLTDFRTQHPEVTLLQYVDDLLLAAPTKKACTQGTRHLLQELGEKGYRASAKKAQICQTKVTYLGYILSEGKRWLTPGRIETVARIPPPRNPREVREFLGKAGFCRLFIPGFAELAAPLYALTKPSTPFTWQTEHQLAFEALKKALLSAPALGLPDTSKPFTLFLDERQGIAKGVLTQKLGPWKRPVAYLSKKLDPVAAGWPPCLRIMAATAMLVKDSAKLTLGQPLTVITPHTLEAIVRQPPDRWITNARLTHYQALLLDTDRVQFGPPVTLNPATLLPVPENQPSPHDCRQVLAETHGTREDLKDQELPDADHTWYTDGSSYLDSGTRRAGAAVVDGHNTIWAQSLPPGTSAQKAELIALTKALELSKGKKANIYTDSRYAFATAHTHGSIYERRGWLTSEGKEIKNKAEIIALLKALFLPQEVAIIHCPGHQKGQDPVAVGNRQADRVARQAAMAEVLTLATEPDNTSHITAGKRTADGSEFEKRTADGSEFESPKKKAKVE

SEQ ID NO: 1963 - protein, 2101 aa, synthetic construct
MPAAKRVKLDGGDKKYSIGLDIGTNSVGWAVITDEYKVPSKKFKVLGNTDRHSIKKNLIGALLFDSGETAEATRLKRTARRRYTRRKNRICYLQEIFSNEMAKVDDSFFHRLEESFLVEEDKKHERHPIFGNIVDEVAYHEKYPTIYHLRKKLVDSTDKADLRLIYLALAHMIKFRGHFLIEGDLNPDNSDVDKLFIQLVQTYNQLFEENPINASGVDAKAILSARLSKSRRLENLIAQLPGEKKNGLFGNLIALSLGLTPNFKSNFDLAEDAKLQLSKDTYDDDLDNLLAQIGDQYADLFLAAKNLSDAILLSDILRVNTEITKAPLSASMIKRYDEHHQDLTLLKALVRQQLPEKYKEIFFDQSKNGYAGYIDGGASQEEFYKFIKPILEKMDGTEELLVKLNREDLLRKQRTFDNGSIPHQIHLGELHAILRRQEDFYPFLKDNREKIEKILTFRIPYYVGPLARGNSRFAWMTRKSEETITPWNFEEVVDKGASAQSFIERMTNFDKNLPNEKVLPKHSLLYEYFTVYNELTKVKYVTEGMRKPAFLSGEQKKAIVDLLFKTNRKVTVKQLKEDYFKKIECFDSVEISGVEDRFNASLGTYHDLLKIIKDKDFLDNEENEDILEDIVLTLTLFEDREMIEERLKTYAHLFDDKVMKQLKRRRYTGWGRLSRKLINGIRDKQSGKTILDFLKSDGFANRNFMQLIHDDSLTFKEDIQKAQVSGQGDSLHEHIANLAGSPAIKKGILQTVKVVDELVKVMGRHKPENIVIEMARENQTTQKGQKNSRERMKRIEEGIKELGSQILKEHPVENTQLQNEKLYLYYLQNGRDMYVDQELDINRLSDYDVDHIVPQSFLKDDSIDNKVLTRSDKARGKSDNVPSEEVVKKMKNYWRQLLNAKLITQRKFDNLTKAERGGLSELDKAGFIKRQLVETRQITKHVAQILDSRMNTKYDENDKLIREVKVITLKSKLVSDFRKDFQFYKVREINNYHHAHDAYLNAVVGTALIKKYPKLESEFVYGDYKVYDVRKMIAKSEQEIGKATAKYFFYSNIMNFFKTEITLANGEIRKRPLIETNGETGEIVWDKGRDFATVRKVLSMPQVNIVKKTEVQTGGFSKESILPKRNSDKLIARKKDWDPKKYGGFDSPTVAYSVLVVAKVEKGKSKKLKSVKELLGITIMERSSFEKNPIDFLEAKGYKEVKKDLIIKLPKYSLFELENGRKRMLASAGELQKGNELALPSKYVNFLYLASHYEKLKGSPEDNEQKQLFVEQHKHYLDEIIEQISEFSKRVILADANLDKVLSAYNKHRDKPIREQAENIIHLFTLTNLGAPAAFKYFDTTIDRKRYTSTKEVLDATLIHQSITGLYETRIDLSQLGGDGGEAAAKEAAAKGGTVSLQDEHRLFDIPVTTSLPDVWLQDFPQAWAETGGLGRAKCQAPIIIDLKPTAVPVSIKQYPMSLEAHMGIRQHIIKFLELGVLRPCRSPWNTPLLPVKKPGTQDYRPVQDLREINKRTVDIHPTVPNPYNLLSTLKPDYSWYTVLDLKDAFFCLPLAPQSQELFAFEWKDPERGISGQLTWTRLPQGFKNSPTLFNEALHRDLTDFRTQHPEVTLLQYVDDLLLAAPTKKACTQGTRHLLQELGEKGYRASAKKAQICQTKVTYLGYILSEGKRWLTPGRIETVARIPPPRNPREVREFLGKAGFCRLFIPGFAELAAPLYALTKPSTPFTWQTEHQLAFEALKKALLSAPALGLPDTSKPFTLFLDERQGIAKGVLTQKLGPWKRPVAYLSKKLDPVAAGWPPCLRIMAATAMLVKDSAKLTLGQPLTVITPHTLEAIVRQPPDRWITNARLTHYQALLLDTDRVQFGPPVTLNPATLLPVPENQPSPHDCRQVLAETHGTREDLKDQELPDADHTWYTDGSSYLDSGTRRAGAAVVDGHNTIWAQSLPPGTSAQKAELIALTKALELSKGKKANIYTDSRYAFATAHTHGSIYERRGWLTSEGKEIKNKAEIIALLKALFLPQEVAIIHCPGHQKGQDPVAVGNRQADRVARQAAMAEVLTLATEPDNTSHITAGKRTADGSEFEKRTADGSEFESPKKKAKVE

SEQ ID NO: 1964 - protein, 2100 aa, synthetic construct
MPAAKRVKLDGGDKKYSIGLDIGTNSVGWAVITDEYKVPSKKFKVLGNTDRHSIKKNLIGALLFDSGETAEATRLKRTARRRYTRRKNRICYLQEIFSNEMAKVDDSFFHRLEESFLVEEDKKHERHPIFGNIVDEVAYHEKYPTIYHLRKKLVDSTDKADLRLIYLALAHMIKFRGHFLIEGDLNPDNSDVDKLFIQLVQTYNQLFEENPINASGVDAKAILSARLSKSRRLENLIAQLPGEKKNGLFGNLIALSLGLTPNFKSNFDLAEDAKLQLSKDTYDDDLDNLLAQIGDQYADLFLAAKNLSDAILLSDILRVNTEITKAPLSASMIKRYDEHHQDLTLLKALVRQQLPEKYKEIFFDQSKNGYAGYIDGGASQEEFYKFIKPILEKMDGTEELLVKLNREDLLRKQRTFDNGSIPHQIHLGELHAILRRQEDFYPFLKDNREKIEKILTFRIPYYVGPLARGNSRFAWMTRKSEETITPWNFEEVVDKGASAQSFIERMTNFDKNLPNEKVLPKHSLLYEYFTVYNELTKVKYVTEGMRKPAFLSGEQKKAIVDLLFKTNRKVTVKQLKEDYFKKIECFDSVEISGVEDRFNASLGTYHDLLKIIKDKDFLDNEENEDILEDIVLTLTLFEDREMIEERLKTYAHLFDDKVMKQLKRRRYTGWGRLSRKLINGIRDKQSGKTILDFLKSDGFANRNFMQLIHDDSLTFKEDIQKAQVSGQGDSLHEHIANLAGSPAIKKGILQTVKVVDELVKVMGRHKPENIVIEMARENQTTQKGQKNSRERMKRIEEGIKELGSQILKEHPVENTQLQNEKLYLYYLQNGRDMYVDQELDINRLSDYDVDHIVPQSFLKDDSIDNKVLTRSDKARGKSDNVPSEEVVKKMKNYWRQLLNAKLITQRKFDNLTKAERGGLSELDKAGFIKRQLVETRQITKHVAQILDSRMNTKYDENDKLIREVKVITLKSKLVSDFRKDFQFYKVREINNYHHAHDAYLNAVVGTALIKKYPKLESEFVYGDYKVYDVRKMIAKSEQEIGKATAKYFFYSNIMNFFKTEITLANGEIRKRPLIETNGETGEIVWDKGRDFATVRKVLSMPQVNIVKKTEVQTGGFSKESILPKRNSDKLIARKKDWDPKKYGGFDSPTVAYSVLVVAKVEKGKSKKLKSVKELLGITIMERSSFEKNPIDFLEAKGYKEVKKDLIIKLPKYSLFELENGRKRMLASAGELQKGNELALPSKYVNFLYLASHYEKLKGSPEDNEQKQLFVEQHKHYLDEIIEQISEFSKRVILADANLDKVLSAYNKHRDKPIREQAENIIHLFTLTNLGAPAAFKYFDTTIDRKRYTSTKEVLDATLIHQSITGLYETRIDLSQLGGDGGGGSPAPGSSGGTVSLQDEHRLFDIPVTTSLPDVWLQDFPQAWAETGGLGRAKCQAPIIIDLKPTAVPVSIKQYPMSLEAHMGIRQHIIKFLELGVLRPCRSPWNTPLLPVKKPGTQDYRPVQDLREINKRTVDIHPTVPNPYNLLSTLKPDYSWYTVLDLKDAFFCLPLAPQSQELFAFEWKDPERGISGQLTWTRLPQGFKNSPTLFNEALHRDLTDFRTQHPEVTLLQYVDDLLLAAPTKKACTQGTRHLLQELGEKGYRASAKKAQICQTKVTYLGYILSEGKRWLTPGRIETVARIPPPRNPREVREFLGKAGFCRLFIPGFAELAAPLYALTKPSTPFTWQTEHQLAFEALKKALLSAPALGLPDTSKPFTLFLDERQGIAKGVLTQKLGPWKRPVAYLSKKLDPVAAGWPPCLRIMAATAMLVKDSAKLTLGQPLTVITPHTLEAIVRQPPDRWITNARLTHYQALLLDTDRVQFGPPVTLNPATLLPVPENQPSPHDCRQVLAETHGTREDLKDQELPDADHTWYTDGSSYLDSGTRRAGAAVVDGHNTIWAQSLPPGTSAQKAELIALTKALELSKGKKANIYTDSRYAFATAHTHGSIYERRGWLTSEGKEIKNKAEIIALLKALFLPQEVAIIHCPGHQKGQDPVAVGNRQADRVARQAAMAEVLTLATEPDNTSHITAGKRTADGSEFEKRTADGSEFESPKKKAKVE

SEQ ID NO: 1965 - protein, 2099 aa, synthetic construct
MPAAKRVKLDGGDKKYSIGLDIGTNSVGWAVITDEYKVPSKKFKVLGNTDRHSIKKNLIGALLFDSGETAEATRLKRTARRRYTRRKNRICYLQEIFSNEMAKVDDSFFHRLEESFLVEEDKKHERHPIFGNIVDEVAYHEKYPTIYHLRKKLVDSTDKADLRLIYLALAHMIKFRGHFLIEGDLNPDNSDVDKLFIQLVQTYNQLFEENPINASGVDAKAILSARLSKSRRLENLIAQLPGEKKNGLFGNLIALSLGLTPNFKSNFDLAEDAKLQLSKDTYDDDLDNLLAQIGDQYADLFLAAKNLSDAILLSDILRVNTEITKAPLSASMIKRYDEHHQDLTLLKALVRQQLPEKYKEIFFDQSKNGYAGYIDGGASQEEFYKFIKPILEKMDGTEELLVKLNREDLLRKQRTFDNGSIPHQIHLGELHAILRRQEDFYPFLKDNREKIEKILTFRIPYYVGPLARGNSRFAWMTRKSEETITPWNFEEVVDKGASAQSFIERMTNFDKNLPNEKVLPKHSLLYEYFTVYNELTKVKYVTEGMRKPAFLSGEQKKAIVDLLFKTNRKVTVKQLKEDYFKKIECFDSVEISGVEDRFNASLGTYHDLLKIIKDKDFLDNEENEDILEDIVLTLTLFEDREMIEERLKTYAHLFDDKVMKQLKRRRYTGWGRLSRKLINGIRDKQSGKTILDFLKSDGFANRNFMQLIHDDSLTFKEDIQKAQVSGQGDSLHEHIANLAGSPAIKKGILQTVKVVDELVKVMGRHKPENIVIEMARENQTTQKGQKNSRERMKRIEEGIKELGSQILKEHPVENTQLQNEKLYLYYLQNGRDMYVDQELDINRLSDYDVDHIVPQSFLKDDSIDNKVLTRSDKARGKSDNVPSEEVVKKMKNYWRQLLNAKLITQRKFDNLTKAERGGLSELDKAGFIKRQLVETRQITKHVAQILDSRMNTKYDENDKLIREVKVITLKSKLVSDFRKDFQFYKVREINNYHHAHDAYLNAVVGTALIKKYPKLESEFVYGDYKVYDVRKMIAKSEQEIGKATAKYFFYSNIMNFFKTEITLANGEIRKRPLIETNGETGEIVWDKGRDFATVRKVLSMPQVNIVKKTEVQTGGFSKESILPKRNSDKLIARKKDWDPKKYGGFDSPTVAYSVLVVAKVEKGKSKKLKSVKELLGITIMERSSFEKNPIDFLEAKGYKEVKKDLIIKLPKYSLFELENGRKRMLASAGELQKGNELALPSKYVNFLYLASHYEKLKGSPEDNEQKQLFVEQHKHYLDEIIEQISEFSKRVILADANLDKVLSAYNKHRDKPIREQAENIIHLFTLTNLGAPAAFKYFDTTIDRKRYTSTKEVLDATLIHQSITGLYETRIDLSQLGGDGGGSSEAAAKGGTVSLQDEHRLFDIPVTTSLPDVWLQDFPQAWAETGGLGRAKCQAPIIIDLKPTAVPVSIKQYPMSLEAHMGIRQHIIKFLELGVLRPCRSPWNTPLLPVKKPGTQDYRPVQDLREINKRTVDIHPTVPNPYNLLSTLKPDYSWYTVLDLKDAFFCLPLAPQSQELFAFEWKDPERGISGQLTWTRLPQGFKNSPTLFNEALHRDLTDFRTQHPEVTLLQYVDDLLLAAPTKKACTQGTRHLLQELGEKGYRASAKKAQICQTKVTYLGYILSEGKRWLTPGRIETVARIPPPRNPREVREFLGKAGFCRLFIPGFAELAAPLYALTKPSTPFTWQTEHQLAFEALKKALLSAPALGLPDTSKPFTLFLDERQGIAKGVLTQKLGPWKRPVAYLSKKLDPVAAGWPPCLRIMAATAMLVKDSAKLTLGQPLTVITPHTLEAIVRQPPDRWITNARLTHYQALLLDTDRVQFGPPVTLNPATLLPVPENQPSPHDCRQVLAETHGTREDLKDQELPDADHTWYTDGSSYLDSGTRRAGAAVVDGHNTIWAQSLPPGTSAQKAELIALTKALELSKGKKANIYTDSRYAFATAHTHGSIYERRGWLTSEGKEIKNKAEIIALLKALFLPQEVAIIHCPGHQKGQDPVAVGNRQADRVARQAAMAEVLTLATEPDNTSHITAGKRTADGSEFEKRTADGSEFESPKKKAKVE

SEQ ID NO: 1966 - protein, 2111 aa, synthetic construct
MPAAKRVKLDGGDKKYSIGLDIGTNSVGWAVITDEYKVPSKKFKVLGNTDRHSIKKNLIGALLFDSGETAEATRLKRTARRRYTRRKNRICYLQEIFSNEMAKVDDSFFHRLEESFLVEEDKKHERHPIFGNIVDEVAYHEKYPTIYHLRKKLVDSTDKADLRLIYLALAHMIKFRGHFLIEGDLNPDNSDVDKLFIQLVQTYNQLFEENPINASGVDAKAILSARLSKSRRLENLIAQLPGEKKNGLFGNLIALSLGLTPNFKSNFDLAEDAKLQLSKDTYDDDLDNLLAQIGDQYADLFLAAKNLSDAILLSDILRVNTEITKAPLSASMIKRYDEHHQDLTLLKALVRQQLPEKYKEIFFDQSKNGYAGYIDGGASQEEFYKFIKPILEKMDGTEELLVKLNREDLLRKQRTFDNGSIPHQIHLGELHAILRRQEDFYPFLKDNREKIEKILTFRIPYYVGPLARGNSRFAWMTRKSEETITPWNFEEVVDKGASAQSFIERMTNFDKNLPNEKVLPKHSLLYEYFTVYNELTKVKYVTEGMRKPAFLSGEQKKAIVDLLFKTNRKVTVKQLKEDYFKKIECFDSVEISGVEDRFNASLGTYHDLLKIIKDKDFLDNEENEDILEDIVLTLTLFEDREMIEERLKTYAHLFDDKVMKQLKRRRYTGWGRLSRKLINGIRDKQSGKTILDFLKSDGFANRNFMQLIHDDSLTFKEDIQKAQVSGQGDSLHEHIANLAGSPAIKKGILQTVKVVDELVKVMGRHKPENIVIEMARENQTTQKGQKNSRERMKRIEEGIKELGSQILKEHPVENTQLQNEKLYLYYLQNGRDMYVDQELDINRLSDYDVDHIVPQSFLKDDSIDNKVLTRSDKARGKSDNVPSEEVVKKMKNYWRQLLNAKLITQRKFDNLTKAERGGLSELDKAGFIKRQLVETRQITKHVAQILDSRMNTKYDENDKLIREVKVITLKSKLVSDFRKDFQFYKVREINNYHHAHDAYLNAVVGTALIKKYPKLESEFVYGDYKVYDVRKMIAKSEQEIGKATAKYFFYSNIMNFFKTEITLANGEIRKRPLIETNGETGEIVWDKGRDFATVRKVLSMPQVNIVKKTEVQTGGFSKESILPKRNSDKLIARKKDWDPKKYGGFDSPTVAYSVLVVAKVEKGKSKKLKSVKELLGITIMERSSFEKNPIDFLEAKGYKEVKKDLIIKLPKYSLFELENGRKRMLASAGELQKGNELALPSKYVNFLYLASHYEKLKGSPEDNEQKQLFVEQHKHYLDEIIEQISEFSKRVILADANLDKVLSAYNKHRDKPIREQAENIIHLFTLTNLGAPAAFKYFDTTIDRKRYTSTKEVLDATLIHQSITGLYETRIDLSQLGGDGGGGGGSGGGGSGGGGSGGGGSGGTVSLQDEHRLFDIPVTTSLPDVWLQDFPQAWAETGGLGRAKCQAPIIIDLKPTAVPVSIKQYPMSLEAHMGIRQHIIKFLELGVLRPCRSPWNTPLLPVKKPGTQDYRPVQDLREINKRTVDIHPTVPNPYNLLSTLKPDYSWYTVLDLKDAFFCLPLAPQSQELFAFEWKDPERGISGQLTWTRLPQGFKNSPTLFNEALHRDLTDFRTQHPEVTLLQYVDDLLLAAPTKKACTQGTRHLLQELGEKGYRASAKKAQICQTKVTYLGYILSEGKRWLTPGRIETVARIPPPRNPREVREFLGKAGFCRLFIPGFAELAAPLYALTKPSTPFTWQTEHQLAFEALKKALLSAPALGLPDTSKPFTLFLDERQGIAKGVLTQKLGPWKRPVAYLSKKLDPVAAGWPPCLRIMAATAMLVKDSAKLTLGQPLTVITPHTLEAIVRQPPDRWITNARLTHYQALLLDTDRVQFGPPVTLNPATLLPVPENQPSPHDCRQVLAETHGTREDLKDQELPDADHTWYTDGSSYLDSGTRRAGAAVVDGHNTIWAQSLPPGTSAQKAELIALTKALELSKGKKANIYTDSRYAFATAHTHGSIYERRGWLTSEGKEIKNKAEIIALLKALFLPQEVAIIHCPGHQKGQDPVAVGNRQADRVARQAAMAEVLTLATEPDNTSHITAGKRTADGSEFEKRTADGSEFESPKKKAKVE

SEQ ID NO: 1967 - protein, 2137 aa, synthetic construct
MPAAKRVKLDGGDKKYSIGLDIGTNSVGWAVITDEYKVPSKKFKVLGNTDRHSIKKNLIGALLFDSGETAEATRLKRTARRRYTRRKNRICYLQEIFSNEMAKVDDSFFHRLEESFLVEEDKKHERHPIFGNIVDEVAYHEKYPTIYHLRKKLVDSTDKADLRLIYLALAHMIKFRGHFLIEGDLNPDNSDVDKLFIQLVQTYNQLFEENPINASGVDAKAILSARLSKSRRLENLIAQLPGEKKNGLFGNLIALSLGLTPNFKSNFDLAEDAKLQLSKDTYDDDLDNLLAQIGDQYADLFLAAKNLSDAILLSDILRVNTEITKAPLSASMIKRYDEHHQDLTLLKALVRQQLPEKYKEIFFDQSKNGYAGYIDGGASQEEFYKFIKPILEKMDGTEELLVKLNREDLLRKQRTFDNGSIPHQIHLGELHAILRRQEDFYPFLKDNREKIEKILTFRIPYYVGPLARGNSRFAWMTRKSEETITPWNFEEVVDKGASAQSFIERMTNFDKNLPNEKVLPKHSLLYEYFTVYNELTKVKYVTEGMRKPAFLSGEQKKAIVDLLFKTNRKVTVKQLKEDYFKKIECFDSVEISGVEDRFNASLGTYHDLLKIIKDKDFLDNEENEDILEDIVLTLTLFEDREMIEERLKTYAHLFDDKVMKQLKRRRYTGWGRLSRKLINGIRDKQSGKTILDFLKSDGFANRNFMQLIHDDSLTFKEDIQKAQVSGQGDSLHEHIANLAGSPAIKKGILQTVKVVDELVKVMGRHKPENIVIEMARENQTTQKGQKNSRERMKRIEEGIKELGSQILKEHPVENTQLQNEKLYLYYLQNGRDMYVDQELDINRLSDYDVDHIVPQSFLKDDSIDNKVLTRSDKARGKSDNVPSEEVVKKMKNYWRQLLNAKLITQRKFDNLTKAERGGLSELDKAGFIKRQLVETRQITKHVAQILDSRMNTKYDENDKLIREVKVITLKSKLVSDFRKDFQFYKVREINNYHHAHDAYLNAVVGTALIKKYPKLESEFVYGDYKVYDVRKMIAKSEQEIGKATAKYFFYSNIMNFFKTEITLANGEIRKRPLIETNGETGEIVWDKGRDFATVRKVLSMPQVNIVKKTEVQTGGFSKESILPKRNSDKLIARKKDWDPKKYGGFDSPTVAYSVLVVAKVEKGKSKKLKSVKELLGITIMERSSFEKNPIDFLEAKGYKEVKKDLIIKLPKYSLFELENGRKRMLASAGELQKGNELALPSKYVNFLYLASHYEKLKGSPEDNEQKQLFVEQHKHYLDEIIEQISEFSKRVILADANLDKVLSAYNKHRDKPIREQAENIIHLFTLTNLGAPAAFKYFDTTIDRKRYTSTKEVLDATLIHQSITGLYETRIDLSQLGGDGGAEAAAKEAAAKEAAAKEAAAKALEAEAAAKEAAAKEAAAKEAAAKAGGTVSLQDEHRLFDIPVTTSLPDVWLQDFPQAWAETGGLGRAKCQAPIIIDLKPTAVPVSIKQYPMSLEAHMGIRQHIIKFLELGVLRPCRSPWNTPLLPVKKPGTQDYRPVQDLREINKRTVDIHPTVPNPYNLLSTLKPDYSWYTVLDLKDAFFCLPLAPQSQELFAFEWKDPERGISGQLTWTRLPQGFKNSPTLFNEALHRDLTDFRTQHPEVTLLQYVDDLLLAAPTKKACTQGTRHLLQELGEKGYRASAKKAQICQTKVTYLGYILSEGKRWLTPGRIETVARIPPPRNPREVREFLGKAGFCRLFIPGFAELAAPLYALTKPSTPFTWQTEHQLAFEALKKALLSAPALGLPDTSKPFTLFLDERQGIAKGVLTQKLGPWKRPVAYLSKKLDPVAAGWPPCLRIMAATAMLVKDSAKLTLGQPLTVITPHTLEAIVRQPPDRWITNARLTHYQALLLDTDRVQFGPPVTLNPATLLPVPENQPSPHDCRQVLAETHGTREDLKDQELPDADHTWYTDGSSYLDSGTRRAGAAVVDGHNTIWAQSLPPGTSAQKAELIALTKALELSKGKKANIYTDSRYAFATAHTHGSIYERRGWLTSEGKEIKNKAEIIALLKALFLPQEVAIIHCPGHQKGQDPVAVGNRQADRVARQAAMAEVLTLATEPDNTSHITAGKRTADGSEFEKRTADGSEFESPKKKAKVE

SEQ ID NO: 1968 - protein, 2102 aa, synthetic construct
MPAAKRVKLDGGDKKYSIGLDIGTNSVGWAVITDEYKVPSKKFKVLGNTDRHSIKKNLIGALLFDSGETAEATRLKRTARRRYTRRKNRICYLQEIFSNEMAKVDDSFFHRLEESFLVEEDKKHERHPIFGNIVDEVAYHEKYPTIYHLRKKLVDSTDKADLRLIYLALAHMIKFRGHFLIEGDLNPDNSDVDKLFIQLVQTYNQLFEENPINASGVDAKAILSARLSKSRRLENLIAQLPGEKKNGLFGNLIALSLGLTPNFKSNFDLAEDAKLQLSKDTYDDDLDNLLAQIGDQYADLFLAAKNLSDAILLSDILRVNTEITKAPLSASMIKRYDEHHQDLTLLKALVRQQLPEKYKEIFFDQSKNGYAGYIDGGASQEEFYKFIKPILEKMDGTEELLVKLNREDLLRKQRTFDNGSIPHQIHLGELHAILRRQEDFYPFLKDNREKIEKILTFRIPYYVGPLARGNSRFAWMTRKSEETITPWNFEEVVDKGASAQSFIERMTNFDKNLPNEKVLPKHSLLYEYFTVYNELTKVKYVTEGMRKPAFLSGEQKKAIVDLLFKTNRKVTVKQLKEDYFKKIECFDSVEISGVEDRFNASLGTYHDLLKIIKDKDFLDNEENEDILEDIVLTLTLFEDREMIEERLKTYAHLFDDKVMKQLKRRRYTGWGRLSRKLINGIRDKQSGKTILDFLKSDGFANRNFMQLIHDDSLTFKEDIQKAQVSGQGDSLHEHIANLAGSPAIKKGILQTVKVVDELVKVMGRHKPENIVIEMARENQTTQKGQKNSRERMKRIEEGIKELGSQILKEHPVENTQLQNEKLYLYYLQNGRDMYVDQELDINRLSDYDVDHIVPQSFLKDDSIDNKVLTRSDKARGKSDNVPSEEVVKKMKNYWRQLLNAKLITQRKFDNLTKAERGGLSELDKAGFIKRQLVETRQITKHVAQILDSRMNTKYDENDKLIREVKVITLKSKLVSDFRKDFQFYKVREINNYHHAHDAYLNAVVGTALIKKYPKLESEFVYGDYKVYDVRKMIAKSEQEIGKATAKYFFYSNIMNFFKTEITLANGEIRKRPLIETNGETGEIVWDKGRDFATVRKVLSMPQVNIVKKTEVQTGGFSKESILPKRNSDKLIARKKDWDPKKYGGFDSPTVAYSVLVVAKVEKGKSKKLKSVKELLGITIMERSSFEKNPIDFLEAKGYKEVKKDLIIKLPKYSLFELENGRKRMLASAGELQKGNELALPSKYVNFLYLASHYEKLKGSPEDNEQKQLFVEQHKHYLDEIIEQISEFSKRVILADANLDKVLSAYNKHRDKPIREQAENIIHLFTLTNLGAPAAFKYFDTTIDRKRYTSTKEVLDATLIHQSITGLYETRIDLSQLGGDGGPAPGSSEAAAKGGTVSLQDEHRLFDIPVTTSLPDVWLQDFPQAWAETGGLGRAKCQAPIIIDLKPTAVPVSIKQYPMSLEAHMGIRQHIIKFLELGVLRPCRSPWNTPLLPVKKPGTQDYRPVQDLREINKRTVDIHPTVPNPYNLLSTLKPDYSWYTVLDLKDAFFCLPLAPQSQELFAFEWKDPERGISGQLTWTRLPQGFKNSPTLFNEALHRDLTDFRTQHPEVTLLQYVDDLLLAAPTKKACTQGTRHLLQELGEKGYRASAKKAQICQTKVTYLGYILSEGKRWLTPGRIETVARIPPPRNPREVREFLGKAGFCRLFIPGFAELAAPLYALTKPSTPFTWQTEHQLAFEALKKALLSAPALGLPDTSKPFTLFLDERQGIAKGVLTQKLGPWKRPVAYLSKKLDPVAAGWPPCLRIMAATAMLVKDSAKLTLGQPLTVITPHTLEAIVRQPPDRWITNARLTHYQALLLDTDRVQFGPPVTLNPATLLPVPENQPSPHDCRQVLAETHGTREDLKDQELPDADHTWYTDGSSYLDSGTRRAGAAVVDGHNTIWAQSLPPGTSAQKAELIALTKALELSKGKKANIYTDSRYAFATAHTHGSIYERRGWLTSEGKEIKNKAEIIALLKALFLPQEVAIIHCPGHQKGQDPVAVGNRQADRVARQAAMAEVLTLATEPDNTSHITAGKRTADGSEFEKRTADGSEFESPKKKAKVE

SEQ ID NO: 1969 - protein, 2102 aa, synthetic construct
MPAAKRVKLDGGDKKYSIGLDIGTNSVGWAVITDEYKVPSKKFKVLGNTDRHSIKKNLIGALLFDSGETAEATRLKRTARRRYTRRKNRICYLQEIFSNEMAKVDDSFFHRLEESFLVEEDKKHERHPIFGNIVDEVAYHEKYPTIYHLRKKLVDSTDKADLRLIYLALAHMIKFRGHFLIEGDLNPDNSDVDKLFIQLVQTYNQLFEENPINASGVDAKAILSARLSKSRRLENLIAQLPGEKKNGLFGNLIALSLGLTPNFKSNFDLAEDAKLQLSKDTYDDDLDNLLAQIGDQYADLFLAAKNLSDAILLSDILRVNTEITKAPLSASMIKRYDEHHQDLTLLKALVRQQLPEKYKEIFFDQSKNGYAGYIDGGASQEEFYKFIKPILEKMDGTEELLVKLNREDLLRKQRTFDNGSIPHQIHLGELHAILRRQEDFYPFLKDNREKIEKILTFRIPYYVGPLARGNSRFAWMTRKSEETITPWNFEEVVDKGASAQSFIERMTNFDKNLPNEKVLPKHSLLYEYFTVYNELTKVKYVTEGMRKPAFLSGEQKKAIVDLLFKTNRKVTVKQLKEDYFKKIECFDSVEISGVEDRFNASLGTYHDLLKIIKDKDFLDNEENEDILEDIVLTLTLFEDREMIEERLKTYAHLFDDKVMKQLKRRRYTGWGRLSRKLINGIRDKQSGKTILDFLKSDGFANRNFMQLIHDDSLTFKEDIQKAQVSGQGDSLHEHIANLAGSPAIKKGILQTVKVVDELVKVMGRHKPENIVIEMARENQTTQKGQKNSRERMKRIEEGIKELGSQILKEHPVENTQLQNEKLYLYYLQNGRDMYVDQELDINRLSDYDVDHIVPQSFLKDDSIDNKVLTRSDKARGKSDNVPSEEVVKKMKNYWRQLLNAKLITQRKFDNLTKAERGGLSELDKAGFIKRQLVETRQITKHVAQILDSRMNTKYDENDKLIREVKVITLKSKLVSDFRKDFQFYKVREINNYHHAHDAYLNAVVGTALIKKYPKLESEFVYGDYKVYDVRKMIAKSEQEIGKATAKYFFYSNIMNFFKTEITLANGEIRKRPLIETNGETGEIVWDKGRDFATVRKVLSMPQVNIVKKTEVQTGGFSKESILPKRNSDKLIARKKDWDPKKYGGFDSPTVAYSVLVVAKVEKGKSKKLKSVKELLGITIMERSSFEKNPIDFLEAKGYKEVKKDLIIKLPKYSLFELENGRKRMLASAGELQKGNELALPSKYVNFLYLASHYEKLKGSPEDNEQKQLFVEQHKHYLDEIIEQISEFSKRVILADANLDKVLSAYNKHRDKPIREQAENIIHLFTLTNLGAPAAFKYFDTTIDRKRYTSTKEVLDATLIHQSITGLYETRIDLSQLGGDGGGGGEAAAKPAPGGTVSLQDEHRLFDIPVTTSLPDVWLQDFPQAWAETGGLGRAKCQAPIIIDLKPTAVPVSIKQYPMSLEAHMGIRQHIIKFLELGVLRPCRSPWNTPLLPVKKPGTQDYRPVQDLREINKRTVDIHPTVPNPYNLLSTLKPDYSWYTVLDLKDAFFCLPLAPQSQELFAFEWKDPERGISGQLTWTRLPQGFKNSPTLFNEALHRDLTDFRTQHPEVTLLQYVDDLLLAAPTKKACTQGTRHLLQELGEKGYRASAKKAQICQTKVTYLGYILSEGKRWLTPGRIETVARIPPPRNPREVREFLGKAGFCRLFIPGFAELAAPLYALTKPSTPFTWQTEHQLAFEALKKALLSAPALGLPDTSKPFTLFLDERQGIAKGVLTQKLGPWKRPVAYLSKKLDPVAAGWPPCLRIMAATAMLVKDSAKLTLGQPLTVITPHTLEAIVRQPPDRWITNARLTHYQALLLDTDRVQFGPPVTLNPATLLPVPENQPSPHDCRQVLAETHGTREDLKDQELPDADHTWYTDGSSYLDSGTRRAGAAVVDGHNTIWAQSLPPGTSAQKAELIALTKALELSKGKKANIYTDSRYAFATAHTHGSIYERRGWLTSEGKEIKNKAEIIALLKALFLPQEVAIIHCPGHQKGQDPVAVGNRQADRVARQAAMAEVLTLATEPDNTSHITAGKRTADGSEFEKRTADGSEFESPKKKAKVE

SEQ ID NO: 1970 - protein, 2097 aa, synthetic construct
MPAAKRVKLDGGDKKYSIGLDIGTNSVGWAVITDEYKVPSKKFKVLGNTDRHSIKKNLIGALLFDSGETAEATRLKRTARRRYTRRKNRICYLQEIFSNEMAKVDDSFFHRLEESFLVEEDKKHERHPIFGNIVDEVAYHEKYPTIYHLRKKLVDSTDKADLRLIYLALAHMIKFRGHFLIEGDLNPDNSDVDKLFIQLVQTYNQLFEENPINASGVDAKAILSARLSKSRRLENLIAQLPGEKKNGLFGNLIALSLGLTPNFKSNFDLAEDAKLQLSKDTYDDDLDNLLAQIGDQYADLFLAAKNLSDAILLSDILRVNTEITKAPLSASMIKRYDEHHQDLTLLKALVRQQLPEKYKEIFFDQSKNGYAGYIDGGASQEEFYKFIKPILEKMDGTEELLVKLNREDLLRKQRTFDNGSIPHQIHLGELHAILRRQEDFYPFLKDNREKIEKILTFRIPYYVGPLARGNSRFAWMTRKSEETITPWNFEEVVDKGASAQSFIERMTNFDKNLPNEKVLPKHSLLYEYFTVYNELTKVKYVTEGMRKPAFLSGEQKKAIVDLLFKTNRKVTVKQLKEDYFKKIECFDSVEISGVEDRFNASLGTYHDLLKIIKDKDFLDNEENEDILEDIVLTLTLFEDREMIEERLKTYAHLFDDKVMKQLKRRRYTGWGRLSRKLINGIRDKQSGKTILDFLKSDGFANRNFMQLIHDDSLTFKEDIQKAQVSGQGDSLHEHIANLAGSPAIKKGILQTVKVVDELVKVMGRHKPENIVIEMARENQTTQKGQKNSRERMKRIEEGIKELGSQILKEHPVENTQLQNEKLYLYYLQNGRDMYVDQELDINRLSDYDVDHIVPQSFLKDDSIDNKVLTRSDKARGKSDNVPSEEVVKKMKNYWRQLLNAKLITQRKFDNLTKAERGGLSELDKAGFIKRQLVETRQITKHVAQILDSRMNTKYDENDKLIREVKVITLKSKLVSDFRKDFQFYKVREINNYHHAHDAYLNAVVGTALIKKYPKLESEFVYGDYKVYDVRKMIAKSEQEIGKATAKYFFYSNIMNFFKTEITLANGEIRKRPLIETNGETGEIVWDKGRDFATVRKVLSMPQVNIVKKTEVQTGGFSKESILPKRNSDKLIARKKDWDPKKYGGFDSPTVAYSVLVVAKVEKGKSKKLKSVKELLGITIMERSSFEKNPIDFLEAKGYKEVKKDLIIKLPKYSLFELENGRKRMLASAGELQKGNELALPSKYVNFLYLASHYEKLKGSPEDNEQKQLFVEQHKHYLDEIIEQISEFSKRVILADANLDKVLSAYNKHRDKPIREQAENIIHLFTLTNLGAPAAFKYFDTTIDRKRYTSTKEVLDATLIHQSITGLYETRIDLSQLGGDGGGSSGSSGGTVSLQDEHRLFDIPVTTSLPDVWLQDFPQAWAETGGLGRAKCQAPIIIDLKPTAVPVSIKQYPMSLEAHMGIRQHIIKFLELGVLRPCRSPWNTPLLPVKKPGTQDYRPVQDLREINKRTVDIHPTVPNPYNLLSTLKPDYSWYTVLDLKDAFFCLPLAPQSQELFAFEWKDPERGISGQLTWTRLPQGFKNSPTLFNEALHRDLTDFRTQHPEVTLLQYVDDLLLAAPTKKACTQGTRHLLQELGEKGYRASAKKAQICQTKVTYLGYILSEGKRWLTPGRIETVARIPPPRNPREVREFLGKAGFCRLFIPGFAELAAPLYALTKPSTPFTWQTEHQLAFEALKKALLSAPALGLPDTSKPFTLFLDERQGIAKGVLTQKLGPWKRPVAYLSKKLDPVAAGWPPCLRIMAATAMLVKDSAKLTLGQPLTVITPHTLEAIVRQPPDRWITNARLTHYQALLLDTDRVQFGPPVTLNPATLLPVPENQPSPHDCRQVLAETHGTREDLKDQELPDADHTWYTDGSSYLDSGTRRAGAAVVDGHNTIWAQSLPPGTSAQKAELIALTKALELSKGKKANIYTDSRYAFATAHTHGSIYERRGWLTSEGKEIKNKAEIIALLKALFLPQEVAIIHCPGHQKGQDPVAVGNRQADRVARQAAMAEVLTLATEPDNTSHITAGKRTADGSEFEKRTADGSEFESPKKKAKVE

SEQ ID NO: 1971 - protein, 2099 aa, synthetic construct
MPAAKRVKLDGGDKKYSIGLDIGTNSVGWAVITDEYKVPSKKFKVLGNTDRHSIKKNLIGALLFDSGETAEATRLKRTARRRYTRRKNRICYLQEIFSNEMAKVDDSFFHRLEESFLVEEDKKHERHPIFGNIVDEVAYHEKYPTIYHLRKKLVDSTDKADLRLIYLALAHMIKFRGHFLIEGDLNPDNSDVDKLFIQLVQTYNQLFEENPINASGVDAKAILSARLSKSRRLENLIAQLPGEKKNGLFGNLIALSLGLTPNFKSNFDLAEDAKLQLSKDTYDDDLDNLLAQIGDQYADLFLAAKNLSDAILLSDILRVNTEITKAPLSASMIKRYDEHHQDLTLLKALVRQQLPEKYKEIFFDQSKNGYAGYIDGGASQEEFYKFIKPILEKMDGTEELLVKLNREDLLRKQRTFDNGSIPHQIHLGELHAILRRQEDFYPFLKDNREKIEKILTFRIPYYVGPLARGNSRFAWMTRKSEETITPWNFEEVVDKGASAQSFIERMTNFDKNLPNEKVLPKHSLLYEYFTVYNELTKVKYVTEGMRKPAFLSGEQKKAIVDLLFKTNRKVTVKQLKEDYFKKIECFDSVEISGVEDRFNASLGTYHDLLKIIKDKDFLDNEENEDILEDIVLTLTLFEDREMIEERLKTYAHLFDDKVMKQLKRRRYTGWGRLSRKLINGIRDKQSGKTILDFLKSDGFANRNFMQLIHDDSLTFKEDIQKAQVSGQGDSLHEHIANLAGSPAIKKGILQTVKVVDELVKVMGRHKPENIVIEMARENQTTQKGQKNSRERMKRIEEGIKELGSQILKEHPVENTQLQNEKLYLYYLQNGRDMYVDQELDINRLSDYDVDHIVPQSFLKDDSIDNKVLTRSDKARGKSDNVPSEEVVKKMKNYWRQLLNAKLITQRKFDNLTKAERGGLSELDKAGFIKRQLVETRQITKHVAQILDSRMNTKYDENDKLIREVKVITLKSKLVSDFRKDFQFYKVREINNYHHAHDAYLNAVVGTALIKKYPKLESEFVYGDYKVYDVRKMIAKSEQEIGKATAKYFFYSNIMNFFKTEITLANGEIRKRPLIETNGETGEIVWDKGRDFATVRKVLSMPQVNIVKKTEVQTGGFSKESILPKRNSDKLIARKKDWDPKKYGGFDSPTVAYSVLVVAKVEKGKSKKLKSVKELLGITIMERSSFEKNPIDFLEAKGYKEVKKDLIIKLPKYSLFELENGRKRMLASAGELQKGNELALPSKYVNFLYLASHYEKLKGSPEDNEQKQLFVEQHKHYLDEIIEQISEFSKRVILADANLDKVLSAYNKHRDKPIREQAENIIHLFTLTNLGAPAAFKYFDTTIDRKRYTSTKEVLDATLIHQSITGLYETRIDLSQLGGDGGEAAAKGSSGGTVSLQDEHRLFDIPVTTSLPDVWLQDFPQAWAETGGLGRAKCQAPIIIDLKPTAVPVSIKQYPMSLEAHMGIRQHIIKFLELGVLRPCRSPWNTPLLPVKKPGTQDYRPVQDLREINKRTVDIHPTVPNPYNLLSTLKPDYSWYTVLDLKDAFFCLPLAPQSQELFAFEWKDPERGISGQLTWTRLPQGFKNSPTLFNEALHRDLTDFRTQHPEVTLLQYVDDLLLAAPTKKACTQGTRHLLQELGEKGYRASAKKAQICQTKVTYLGYILSEGKRWLTPGRIETVARIPPPRNPREVREFLGKAGFCRLFIPGFAELAAPLYALTKPSTPFTWQTEHQLAFEALKKALLSAPALGLPDTSKPFTLFLDERQGIAKGVLTQKLGPWKRPVAYLSKKLDPVAAGWPPCLRIMAATAMLVKDSAKLTLGQPLTVITPHTLEAIVRQPPDRWITNARLTHYQALLLDTDRVQFGPPVTLNPATLLPVPENQPSPHDCRQVLAETHGTREDLKDQELPDADHTWYTDGSSYLDSGTRRAGAAVVDGHNTIWAQSLPPGTSAQKAELIALTKALELSKGKKANIYTDSRYAFATAHTHGSIYERRGWLTSEGKEIKNKAEIIALLKALFLPQEVAIIHCPGHQKGQDPVAVGNRQADRVARQAAMAEVLTLATEPDNTSHITAGKRTADGSEFEKRTADGSEFESPKKKAKVE

SEQ ID NO: 1972 - protein, 2102 aa, synthetic construct
MPAAKRVKLDGGDKKYSIGLDIGTNSVGWAVITDEYKVPSKKFKVLGNTDRHSIKKNLIGALLFDSGETAEATRLKRTARRRYTRRKNRICYLQEIFSNEMAKVDDSFFHRLEESFLVEEDKKHERHPIFGNIVDEVAYHEKYPTIYHLRKKLVDSTDKADLRLIYLALAHMIKFRGHFLIEGDLNPDNSDVDKLFIQLVQTYNQLFEENPINASGVDAKAILSARLSKSRRLENLIAQLPGEKKNGLFGNLIALSLGLTPNFKSNFDLAEDAKLQLSKDTYDDDLDNLLAQIGDQYADLFLAAKNLSDAILLSDILRVNTEITKAPLSASMIKRYDEHHQDLTLLKALVRQQLPEKYKEIFFDQSKNGYAGYIDGGASQEEFYKFIKPILEKMDGTEELLVKLNREDLLRKQRTFDNGSIPHQIHLGELHAILRRQEDFYPFLKDNREKIEKILTFRIPYYVGPLARGNSRFAWMTRKSEETITPWNFEEVVDKGASAQSFIERMTNFDKNLPNEKVLPKHSLLYEYFTVYNELTKVKYVTEGMRKPAFLSGEQKKAIVDLLFKTNRKVTVKQLKEDYFKKIECFDSVEISGVEDRFNASLGTYHDLLKIIKDKDFLDNEENEDILEDIVLTLTLFEDREMIEERLKTYAHLFDDKVMKQLKRRRYTGWGRLSRKLINGIRDKQSGKTILDFLKSDGFANRNFMQLIHDDSLTFKEDIQKAQVSGQGDSLHEHIANLAGSPAIKKGILQTVKVVDELVKVMGRHKPENIVIEMARENQTTQKGQKNSRERMKRIEEGIKELGSQILKEHPVENTQLQNEKLYLYYLQNGRDMYVDQELDINRLSDYDVDHIVPQSFLKDDSIDNKVLTRSDKARGKSDNVPSEEVVKKMKNYWRQLLNAKLITQRKFDNLTKAERGGLSELDKAGFIKRQLVETRQITKHVAQILDSRMNTKYDENDKLIREVKVITLKSKLVSDFRKDFQFYKVREINNYHHAHDAYLNAVVGTALIKKYPKLESEFVYGDYKVYDVRKMIAKSEQEIGKATAKYFFYSNIMNFFKTEITLANGEIRKRPLIETNGETGEIVWDKGRDFATVRKVLSMPQVNIVKKTEVQTGGFSKESILPKRNSDKLIARKKDWDPKKYGGFDSPTVAYSVLVVAKVEKGKSKKLKSVKELLGITIMERSSFEKNPIDFLEAKGYKEVKKDLIIKLPKYSLFELENGRKRMLASAGELQKGNELALPSKYVNFLYLASHYEKLKGSPEDNEQKQLFVEQHKHYLDEIIEQISEFSKRVILADANLDKVLSAYNKHRDKPIREQAENIIHLFTLTNLGAPAAFKYFDTTIDRKRYTSTKEVLDATLIHQSITGLYETRIDLSQLGGDGGGSSEAAAKGGGGGTVSLQDEHRLFDIPVTTSLPDVWLQDFPQAWAETGGLGRAKCQAPIIIDLKPTAVPVSIKQYPMSLEAHMGIRQHIIKFLELGVLRPCRSPWNTPLLPVKKPGTQDYRPVQDLREINKRTVDIHPTVPNPYNLLSTLKPDYSWYTVLDLKDAFFCLPLAPQSQELFAFEWKDPERGISGQLTWTRLPQGFKNSPTLFNEALHRDLTDFRTQHPEVTLLQYVDDLLLAAPTKKACTQGTRHLLQELGEKGYRASAKKAQICQTKVTYLGYILSEGKRWLTPGRIETVARIPPPRNPREVREFLGKAGFCRLFIPGFAELAAPLYALTKPSTPFTWQTEHQLAFEALKKALLSAPALGLPDTSKPFTLFLDERQGIAKGVLTQKLGPWKRPVAYLSKKLDPVAAGWPPCLRIMAATAMLVKDSAKLTLGQPLTVITPHTLEAIVRQPPDRWITNARLTHYQALLLDTDRVQFGPPVTLNPATLLPVPENQPSPHDCRQVLAETHGTREDLKDQELPDADHTWYTDGSSYLDSGTRRAGAAVVDGHNTIWAQSLPPGTSAQKAELIALTKALELSKGKKANIYTDSRYAFATAHTHGSIYERRGWLTSEGKEIKNKAEIIALLKALFLPQEVAIIHCPGHQKGQDPVAVGNRQADRVARQAAMAEVLTLATEPDNTSHITAGKRTADGSEFEKRTADGSEFESPKKKAKVE

SEQ ID NO: 1973 - protein, 2102 aa, synthetic construct
MPAAKRVKLDGGDKKYSIGLDIGTNSVGWAVITDEYKVPSKKFKVLGNTDRHSIKKNLIGALLFDSGETAEATRLKRTARRRYTRRKNRICYLQEIFSNEMAKVDDSFFHRLEESFLVEEDKKHERHPIFGNIVDEVAYHEKYPTIYHLRKKLVDSTDKADLRLIYLALAHMIKFRGHFLIEGDLNPDNSDVDKLFIQLVQTYNQLFEENPINASGVDAKAILSARLSKSRRLENLIAQLPGEKKNGLFGNLIALSLGLTPNFKSNFDLAEDAKLQLSKDTYDDDLDNLLAQIGDQYADLFLAAKNLSDAILLSDILRVNTEITKAPLSASMIKRYDEHHQDLTLLKALVRQQLPEKYKEIFFDQSKNGYAGYIDGGASQEEFYKFIKPILEKMDGTEELLVKLNREDLLRKQRTFDNGSIPHQIHLGELHAILRRQEDFYPFLKDNREKIEKILTFRIPYYVGPLARGNSRFAWMTRKSEETITPWNFEEVVDKGASAQSFIERMTNFDKNLPNEKVLPKHSLLYEYFTVYNELTKVKYVTEGMRKPAFLSGEQKKAIVDLLFKTNRKVTVKQLKEDYFKKIECFDSVEISGVEDRFNASLGTYHDLLKIIKDKDFLDNEENEDILEDIVLTLTLFEDREMIEERLKTYAHLFDDKVMKQLKRRRYTGWGRLSRKLINGIRDKQSGKTILDFLKSDGFANRNFMQLIHDDSLTFKEDIQKAQVSGQGDSLHEHIANLAGSPAIKKGILQTVKVVDELVKVMGRHKPENIVIEMARENQTTQKGQKNSRERMKRIEEGIKELGSQILKEHPVENTQLQNEKLYLYYLQNGRDMYVDQELDINRLSDYDVDHIVPQSFLKDDSIDNKVLTRSDKARGKSDNVPSEEVVKKMKNYWRQLLNAKLITQRKFDNLTKAERGGLSELDKAGFIKRQLVETRQITKHVAQILDSRMNTKYDENDKLIREVKVITLKSKLVSDFRKDFQFYKVREINNYHHAHDAYLNAVVGTALIKKYPKLESEFVYGDYKVYDVRKMIAKSEQEIGKATAKYFFYSNIMNFFKTEITLANGEIRKRPLIETNGETGEIVWDKGRDFATVRKVLSMPQVNIVKKTEVQTGGFSKESILPKRNSDKLIARKKDWDPKKYGGFDSPTVAYSVLVVAKVEKGKSKKLKSVKELLGITIMERSSFEKNPIDFLEAKGYKEVKKDLIIKLPKYSLFELENGRKRMLASAGELQKGNELALPSKYVNFLYLASHYEKLKGSPEDNEQKQLFVEQHKHYLDEIIEQISEFSKRVILADANLDKVLSAYNKHRDKPIREQAENIIHLFTLTNLGAPAAFKYFDTTIDRKRYTSTKEVLDATLIHQSITGLYETRIDLSQLGGDGGPAPEAAAKGGGGGTVSLQDEHRLFDIPVTTSLPDVWLQDFPQAWAETGGLGRAKCQAPIIIDLKPTAVPVSIKQYPMSLEAHMGIRQHIIKFLELGVLRPCRSPWNTPLLPVKKPGTQDYRPVQDLREINKRTVDIHPTVPNPYNLLSTLKPDYSWYTVLDLKDAFFCLPLAPQSQELFAFEWKDPERGISGQLTWTRLPQGFKNSPTLFNEALHRDLTDFRTQHPEVTLLQYVDDLLLAAPTKKACTQGTRHLLQELGEKGYRASAKKAQICQTKVTYLGYILSEGKRWLTPGRIETVARIPPPRNPREVREFLGKAGFCRLFIPGFAELAAPLYALTKPSTPFTWQTEHQLAFEALKKALLSAPALGLPDTSKPFTLFLDERQGIAKGVLTQKLGPWKRPVAYLSKKLDPVAAGWPPCLRIMAATAMLVKDSAKLTLGQPLTVITPHTLEAIVRQPPDRWITNARLTHYQALLLDTDRVQFGPPVTLNPATLLPVPENQPSPHDCRQVLAETHGTREDLKDQELPDADHTWYTDGSSYLDSGTRRAGAAVVDGHNTIWAQSLPPGTSAQKAELIALTKALELSKGKKANIYTDSRYAFATAHTHGSIYERRGWLTSEGKEIKNKAEIIALLKALFLPQEVAIIHCPGHQKGQDPVAVGNRQADRVARQAAMAEVLTLATEPDNTSHITAGKRTADGSEFEKRTADGSEFESPKKKAKVE

SEQ ID NO: 1974 - protein, 2100 aa, synthetic construct
MPAAKRVKLDGGDKKYSIGLDIGTNSVGWAVITDEYKVPSKKFKVLGNTDRHSIKKNLIGALLFDSGETAEATRLKRTARRRYTRRKNRICYLQEIFSNEMAKVDDSFFHRLEESFLVEEDKKHERHPIFGNIVDEVAYHEKYPTIYHLRKKLVDSTDKADLRLIYLALAHMIKFRGHFLIEGDLNPDNSDVDKLFIQLVQTYNQLFEENPINASGVDAKAILSARLSKSRRLENLIAQLPGEKKNGLFGNLIALSLGLTPNFKSNFDLAEDAKLQLSKDTYDDDLDNLLAQIGDQYADLFLAAKNLSDAILLSDILRVNTEITKAPLSASMIKRYDEHHQDLTLLKALVRQQLPEKYKEIFFDQSKNGYAGYIDGGASQEEFYKFIKPILEKMDGTEELLVKLNREDLLRKQRTFDNGSIPHQIHLGELHAILRRQEDFYPFLKDNREKIEKILTFRIPYYVGPLARGNSRFAWMTRKSEETITPWNFEEVVDKGASAQSFIERMTNFDKNLPNEKVLPKHSLLYEYFTVYNELTKVKYVTEGMRKPAFLSGEQKKAIVDLLFKTNRKVTVKQLKEDYFKKIECFDSVEISGVEDRFNASLGTYHDLLKIIKDKDFLDNEENEDILEDIVLTLTLFEDREMIEERLKTYAHLFDDKVMKQLKRRRYTGWGRLSRKLINGIRDKQSGKTILDFLKSDGFANRNFMQLIHDDSLTFKEDIQKAQVSGQGDSLHEHIANLAGSPAIKKGILQTVKVVDELVKVMGRHKPENIVIEMARENQTTQKGQKNSRERMKRIEEGIKELGSQILKEHPVENTQLQNEKLYLYYLQNGRDMYVDQELDINRLSDYDVDHIVPQSFLKDDSIDNKVLTRSDKARGKSDNVPSEEVVKKMKNYWRQLLNAKLITQRKFDNLTKAERGGLSELDKAGFIKRQLVETRQITKHVAQILDSRMNTKYDENDKLIREVKVITLKSKLVSDFRKDFQFYKVREINNYHHAHDAYLNAVVGTALIKKYPKLESEFVYGDYKVYDVRKMIAKSEQEIGKATAKYFFYSNIMNFFKTEITLANGEIRKRPLIETNGETGEIVWDKGRDFATVRKVLSMPQVNIVKKTEVQTGGFSKESILPKRNSDKLIARKKDWDPKKYGGFDSPTVAYSVLVVAKVEKGKSKKLKSVKELLGITIMERSSFEKNPIDFLEAKGYKEVKKDLIIKLPKYSLFELENGRKRMLASAGELQKGNELALPSKYVNFLYLASHYEKLKGSPEDNEQKQLFVEQHKHYLDEIIEQISEFSKRVILADANLDKVLSAYNKHRDKPIREQAENIIHLFTLTNLGAPAAFKYFDTTIDRKRYTSTKEVLDATLIHQSITGLYETRIDLSQLGGDGGGGSGSSGGGGGTVSLQDEHRLFDIPVTTSLPDVWLQDFPQAWAETGGLGRAKCQAPIIIDLKPTAVPVSIKQYPMSLEAHMGIRQHIIKFLELGVLRPCRSPWNTPLLPVKKPGTQDYRPVQDLREINKRTVDIHPTVPNPYNLLSTLKPDYSWYTVLDLKDAFFCLPLAPQSQELFAFEWKDPERGISGQLTWTRLPQGFKNSPTLFNEALHRDLTDFRTQHPEVTLLQYVDDLLLAAPTKKACTQGTRHLLQELGEKGYRASAKKAQICQTKVTYLGYILSEGKRWLTPGRIETVARIPPPRNPREVREFLGKAGFCRLFIPGFAELAAPLYALTKPSTPFTWQTEHQLAFEALKKALLSAPALGLPDTSKPFTLFLDERQGIAKGVLTQKLGPWKRPVAYLSKKLDPVAAGWPPCLRIMAATAMLVKDSAKLTLGQPLTVITPHTLEAIVRQPPDRWITNARLTHYQALLLDTDRVQFGPPVTLNPATLLPVPENQPSPHDCRQVLAETHGTREDLKDQELPDADHTWYTDGSSYLDSGTRRAGAAVVDGHNTIWAQSLPPGTSAQKAELIALTKALELSKGKKANIYTDSRYAFATAHTHGSIYERRGWLTSEGKEIKNKAEIIALLKALFLPQEVAIIHCPGHQKGQDPVAVGNRQADRVARQAAMAEVLTLATEPDNTSHITAGKRTADGSEFEKRTADGSEFESPKKKAKVE

SEQ ID NO: 1975 - protein, 2102 aa, synthetic construct
MPAAKRVKLDGGDKKYSIGLDIGTNSVGWAVITDEYKVPSKKFKVLGNTDRHSIKKNLIGALLFDSGETAEATRLKRTARRRYTRRKNRICYLQEIFSNEMAKVDDSFFHRLEESFLVEEDKKHERHPIFGNIVDEVAYHEKYPTIYHLRKKLVDSTDKADLRLIYLALAHMIKFRGHFLIEGDLNPDNSDVDKLFIQLVQTYNQLFEENPINASGVDAKAILSARLSKSRRLENLIAQLPGEKKNGLFGNLIALSLGLTPNFKSNFDLAEDAKLQLSKDTYDDDLDNLLAQIGDQYADLFLAAKNLSDAILLSDILRVNTEITKAPLSASMIKRYDEHHQDLTLLKALVRQQLPEKYKEIFFDQSKNGYAGYIDGGASQEEFYKFIKPILEKMDGTEELLVKLNREDLLRKQRTFDNGSIPHQIHLGELHAILRRQEDFYPFLKDNREKIEKILTFRIPYYVGPLARGNSRFAWMTRKSEETITPWNFEEVVDKGASAQSFIERMTNFDKNLPNEKVLPKHSLLYEYFTVYNELTKVKYVTEGMRKPAFLSGEQKKAIVDLLFKTNRKVTVKQLKEDYFKKIECFDSVEISGVEDRFNASLGTYHDLLKIIKDKDFLDNEENEDILEDIVLTLTLFEDREMIEERLKTYAHLFDDKVMKQLKRRRYTGWGRLSRKLINGIRDKQSGKTILDFLKSDGFANRNFMQLIHDDSLTFKEDIQKAQVSGQGDSLHEHIANLAGSPAIKKGILQTVKVVDELVKVMGRHKPENIVIEMARENQTTQKGQKNSRERMKRIEEGIKELGSQILKEHPVENTQLQNEKLYLYYLQNGRDMYVDQELDINRLSDYDVDHIVPQSFLKDDSIDNKVLTRSDKARGKSDNVPSEEVVKKMKNYWRQLLNAKLITQRKFDNLTKAERGGLSELDKAGFIKRQLVETRQITKHVAQILDSRMNTKYDENDKLIREVKVITLKSKLVSDFRKDFQFYKVREINNYHHAHDAYLNAVVGTALIKKYPKLESEFVYGDYKVYDVRKMIAKSEQEIGKATAKYFFYSNIMNFFKTEITLANGEIRKRPLIETNGETGEIVWDKGRDFATVRKVLSMPQVNIVKKTEVQTGGFSKESILPKRNSDKLIARKKDWDPKKYGGFDSPTVAYSVLVVAKVEKGKSKKLKSVKELLGITIMERSSFEKNPIDFLEAKGYKEVKKDLIIKLPKYSLFELENGRKRMLASAGELQKGNELALPSKYVNFLYLASHYEKLKGSPEDNEQKQLFVEQHKHYLDEIIEQISEFSKRVILADANLDKVLSAYNKHRDKPIREQAENIIHLFTLTNLGAPAAFKYFDTTIDRKRYTSTKEVLDATLIHQSITGLYETRIDLSQLGGDGGGGGGSSEAAAKGGTVSLQDEHRLFDIPVTTSLPDVWLQDFPQAWAETGGLGRAKCQAPIIIDLKPTAVPVSIKQYPMSLEAHMGIRQHIIKFLELGVLRPCRSPWNTPLLPVKKPGTQDYRPVQDLREINKRTVDIHPTVPNPYNLLSTLKPDYSWYTVLDLKDAFFCLPLAPQSQELFAFEWKDPERGISGQLTWTRLPQGFKNSPTLFNEALHRDLTDFRTQHPEVTLLQYVDDLLLAAPTKKACTQGTRHLLQELGEKGYRASAKKAQICQTKVTYLGYILSEGKRWLTPGRIETVARIPPPRNPREVREFLGKAGFCRLFIPGFAELAAPLYALTKPSTPFTWQTEHQLAFEALKKALLSAPALGLPDTSKPFTLFLDERQGIAKGVLTQKLGPWKRPVAYLSKKLDPVAAGWPPCLRIMAATAMLVKDSAKLTLGQPLTVITPHTLEAIVRQPPDRWITNARLTHYQALLLDTDRVQFGPPVTLNPATLLPVPENQPSPHDCRQVLAETHGTREDLKDQELPDADHTWYTDGSSYLDSGTRRAGAAVVDGHNTIWAQSLPPGTSAQKAELIALTKALELSKGKKANIYTDSRYAFATAHTHGSIYERRGWLTSEGKEIKNKAEIIALLKALFLPQEVAIIHCPGHQKGQDPVAVGNRQADRVARQAAMAEVLTLATEPDNTSHITAGKRTADGSEFEKRTADGSEFESPKKKAKVE

SEQ ID NO: 1976 - protein, 2100 aa, synthetic construct
MPAAKRVKLDGGDKKYSIGLDIGTNSVGWAVITDEYKVPSKKFKVLGNTDRHSIKKNLIGALLFDSGETAEATRLKRTARRRYTRRKNRICYLQEIFSNEMAKVDDSFFHRLEESFLVEEDKKHERHPIFGNIVDEVAYHEKYPTIYHLRKKLVDSTDKADLRLIYLALAHMIKFRGHFLIEGDLNPDNSDVDKLFIQLVQTYNQLFEENPINASGVDAKAILSARLSKSRRLENLIAQLPGEKKNGLFGNLIALSLGLTPNFKSNFDLAEDAKLQLSKDTYDDDLDNLLAQIGDQYADLFLAAKNLSDAILLSDILRVNTEITKAPLSASMIKRYDEHHQDLTLLKALVRQQLPEKYKEIFFDQSKNGYAGYIDGGASQEEFYKFIKPILEKMDGTEELLVKLNREDLLRKQRTFDNGSIPHQIHLGELHAILRRQEDFYPFLKDNREKIEKILTFRIPYYVGPLARGNSRFAWMTRKSEETITPWNFEEVVDKGASAQSFIERMTNFDKNLPNEKVLPKHSLLYEYFTVYNELTKVKYVTEGMRKPAFLSGEQKKAIVDLLFKTNRKVTVKQLKEDYFKKIECFDSVEISGVEDRFNASLGTYHDLLKIIKDKDFLDNEENEDILEDIVLTLTLFEDREMIEERLKTYAHLFDDKVMKQLKRRRYTGWGRLSRKLINGIRDKQSGKTILDFLKSDGFANRNFMQLIHDDSLTFKEDIQKAQVSGQGDSLHEHIANLAGSPAIKKGILQTVKVVDELVKVMGRHKPENIVIEMARENQTTQKGQKNSRERMKRIEEGIKELGSQILKEHPVENTQLQNEKLYLYYLQNGRDMYVDQELDINRLSDYDVDHIVPQSFLKDDSIDNKVLTRSDKARGKSDNVPSEEVVKKMKNYWRQLLNAKLITQRKFDNLTKAERGGLSELDKAGFIKRQLVETRQITKHVAQILDSRMNTKYDENDKLIREVKVITLKSKLVSDFRKDFQFYKVREINNYHHAHDAYLNAVVGTALIKKYPKLESEFVYGDYKVYDVRKMIAKSEQEIGKATAKYFFYSNIMNFFKTEITLANGEIRKRPLIETNGETGEIVWDKGRDFATVRKVLSMPQVNIVKKTEVQTGGFSKESILPKRNSDKLIARKKDWDPKKYGGFDSPTVAYSVLVVAKVEKGKSKKLKSVKELLGITIMERSSFEKNPIDFLEAKGYKEVKKDLIIKLPKYSLFELENGRKRMLASAGELQKGNELALPSKYVNFLYLASHYEKLKGSPEDNEQKQLFVEQHKHYLDEIIEQISEFSKRVILADANLDKVLSAYNKHRDKPIREQAENIIHLFTLTNLGAPAAFKYFDTTIDRKRYTSTKEVLDATLIHQSITGLYETRIDLSQLGGDGGGGSPAPGGGGGTVSLQDEHRLFDIPVTTSLPDVWLQDFPQAWAETGGLGRAKCQAPIIIDLKPTAVPVSIKQYPMSLEAHMGIRQHIIKFLELGVLRPCRSPWNTPLLPVKKPGTQDYRPVQDLREINKRTVDIHPTVPNPYNLLSTLKPDYSWYTVLDLKDAFFCLPLAPQSQELFAFEWKDPERGISGQLTWTRLPQGFKNSPTLFNEALHRDLTDFRTQHPEVTLLQYVDDLLLAAPTKKACTQGTRHLLQELGEKGYRASAKKAQICQTKVTYLGYILSEGKRWLTPGRIETVARIPPPRNPREVREFLGKAGFCRLFIPGFAELAAPLYALTKPSTPFTWQTEHQLAFEALKKALLSAPALGLPDTSKPFTLFLDERQGIAKGVLTQKLGPWKRPVAYLSKKLDPVAAGWPPCLRIMAATAMLVKDSAKLTLGQPLTVITPHTLEAIVRQPPDRWITNARLTHYQALLLDTDRVQFGPPVTLNPATLLPVPENQPSPHDCRQVLAETHGTREDLKDQELPDADHTWYTDGSSYLDSGTRRAGAAVVDGHNTIWAQSLPPGTSAQKAELIALTKALELSKGKKANIYTDSRYAFATAHTHGSIYERRGWLTSEGKEIKNKAEIIALLKALFLPQEVAIIHCPGHQKGQDPVAVGNRQADRVARQAAMAEVLTLATEPDNTSHITAGKRTADGSEFEKRTADGSEFESPKKKAKVE

SEQ ID NO: 1977 - protein, 2102 aa, synthetic construct
MPAAKRVKLDGGDKKYSIGLDIGTNSVGWAVITDEYKVPSKKFKVLGNTDRHSIKKNLIGALLFDSGETAEATRLKRTARRRYTRRKNRICYLQEIFSNEMAKVDDSFFHRLEESFLVEEDKKHERHPIFGNIVDEVAYHEKYPTIYHLRKKLVDSTDKADLRLIYLALAHMIKFRGHFLIEGDLNPDNSDVDKLFIQLVQTYNQLFEENPINASGVDAKAILSARLSKSRRLENLIAQLPGEKKNGLFGNLIALSLGLTPNFKSNFDLAEDAKLQLSKDTYDDDLDNLLAQIGDQYADLFLAAKNLSDAILLSDILRVNTEITKAPLSASMIKRYDEHHQDLTLLKALVRQQLPEKYKEIFFDQSKNGYAGYIDGGASQEEFYKFIKPILEKMDGTEELLVKLNREDLLRKQRTFDNGSIPHQIHLGELHAILRRQEDFYPFLKDNREKIEKILTFRIPYYVGPLARGNSRFAWMTRKSEETITPWNFEEVVDKGASAQSFIERMTNFDKNLPNEKVLPKHSLLYEYFTVYNELTKVKYVTEGMRKPAFLSGEQKKAIVDLLFKTNRKVTVKQLKEDYFKKIECFDSVEISGVEDRFNASLGTYHDLLKIIKDKDFLDNEENEDILEDIVLTLTLFEDREMIEERLKTYAHLFDDKVMKQLKRRRYTGWGRLSRKLINGIRDKQSGKTILDFLKSDGFANRNFMQLIHDDSLTFKEDIQKAQVSGQGDSLHEHIANLAGSPAIKKGILQTVKVVDELVKVMGRHKPENIVIEMARENQTTQKGQKNSRERMKRIEEGIKELGSQILKEHPVENTQLQNEKLYLYYLQNGRDMYVDQELDINRLSDYDVDHIVPQSFLKDDSIDNKVLTRSDKARGKSDNVPSEEVVKKMKNYWRQLLNAKLITQRKFDNLTKAERGGLSELDKAGFIKRQLVETRQITKHVAQILDSRMNTKYDENDKLIREVKVITLKSKLVSDFRKDFQFYKVREINNYHHAHDAYLNAVVGTALIKKYPKLESEFVYGDYKVYDVRKMIAKSEQEIGKATAKYFFYSNIMNFFKTEITLANGEIRKRPLIETNGETGEIVWDKGRDFATVRKVLSMPQVNIVKKTEVQTGGFSKESILPKRNSDKLIARKKDWDPKKYGGFDSPTVAYSVLVVAKVEKGKSKKLKSVKELLGITIMERSSFEKNPIDFLEAKGYKEVKKDLIIKLPKYSLFELENGRKRMLASAGELQKGNELALPSKYVNFLYLASHYEKLKGSPEDNEQKQLFVEQHKHYLDEIIEQISEFSKRVILADANLDKVLSAYNKHRDKPIREQAENIIHLFTLTNLGAPAAFKYFDTTIDRKRYTSTKEVLDATLIHQSITGLYETRIDLSQLGGDGGPAPGGGEAAAKGGTVSLQDEHRLFDIPVTTSLPDVWLQDFPQAWAETGGLGRAKCQAPIIIDLKPTAVPVSIKQYPMSLEAHMGIRQHIIKFLELGVLRPCRSPWNTPLLPVKKPGTQDYRPVQDLREINKRTVDIHPTVPNPYNLLSTLKPDYSWYTVLDLKDAFFCLPLAPQSQELFAFEWKDPERGISGQLTWTRLPQGFKNSPTLFNEALHRDLTDFRTQHPEVTLLQYVDDLLLAAPTKKACTQGTRHLLQELGEKGYRASAKKAQICQTKVTYLGYILSEGKRWLTPGRIETVARIPPPRNPREVREFLGKAGFCRLFIPGFAELAAPLYALTKPSTPFTWQTEHQLAFEALKKALLSAPALGLPDTSKPFTLFLDERQGIAKGVLTQKLGPWKRPVAYLSKKLDPVAAGWPPCLRIMAATAMLVKDSAKLTLGQPLTVITPHTLEAIVRQPPDRWITNARLTHYQALLLDTDRVQFGPPVTLNPATLLPVPENQPSPHDCRQVLAETHGTREDLKDQELPDADHTWYTDGSSYLDSGTRRAGAAVVDGHNTIWAQSLPPGTSAQKAELIALTKALELSKGKKANIYTDSRYAFATAHTHGSIYERRGWLTSEGKEIKNKAEIIALLKALFLPQEVAIIHCPGHQKGQDPVAVGNRQADRVARQAAMAEVLTLATEPDNTSHITAGKRTADGSEFEKRTADGSEFESPKKKAKVE

SEQ ID NO: 1978 - protein, 2100 aa, synthetic construct
MPAAKRVKLDGGDKKYSIGLDIGTNSVGWAVITDEYKVPSKKFKVLGNTDRHSIKKNLIGALLFDSGETAEATRLKRTARRRYTRRKNRICYLQEIFSNEMAKVDDSFFHRLEESFLVEEDKKHERHPIFGNIVDEVAYHEKYPTIYHLRKKLVDSTDKADLRLIYLALAHMIKFRGHFLIEGDLNPDNSDVDKLFIQLVQTYNQLFEENPINASGVDAKAILSARLSKSRRLENLIAQLPGEKKNGLFGNLIALSLGLTPNFKSNFDLAEDAKLQLSKDTYDDDLDNLLAQIGDQYADLFLAAKNLSDAILLSDILRVNTEITKAPLSASMIKRYDEHHQDLTLLKALVRQQLPEKYKEIFFDQSKNGYAGYIDGGASQEEFYKFIKPILEKMDGTEELLVKLNREDLLRKQRTFDNGSIPHQIHLGELHAILRRQEDFYPFLKDNREKIEKILTFRIPYYVGPLARGNSRFAWMTRKSEETITPWNFEEVVDKGASAQSFIERMTNFDKNLPNEKVLPKHSLLYEYFTVYNELTKVKYVTEGMRKPAFLSGEQKKAIVDLLFKTNRKVTVKQLKEDYFKKIECFDSVEISGVEDRFNASLGTYHDLLKIIKDKDFLDNEENEDILEDIVLTLTLFEDREMIEERLKTYAHLFDDKVMKQLKRRRYTGWGRLSRKLINGIRDKQSGKTILDFLKSDGFANRNFMQLIHDDSLTFKEDIQKAQVSGQGDSLHEHIANLAGSPAIKKGILQTVKVVDELVKVMGRHKPENIVIEMARENQTTQKGQKNSRERMKRIEEGIKELGSQILKEHPVENTQLQNEKLYLYYLQNGRDMYVDQELDINRLSDYDVDHIVPQSFLKDDSIDNKVLTRSDKARGKSDNVPSEEVVKKMKNYWRQLLNAKLITQRKFDNLTKAERGGLSELDKAGFIKRQLVETRQITKHVAQILDSRMNTKYDENDKLIREVKVITLKSKLVSDFRKDFQFYKVREINNYHHAHDAYLNAVVGTALIKKYPKLESEFVYGDYKVYDVRKMIAKSEQEIGKATAKYFFYSNIMNFFKTEITLANGEIRKRPLIETNGETGEIVWDKGRDFATVRKVLSMPQVNIVKKTEVQTGGFSKESILPKRNSDKLIARKKDWDPKKYGGFDSPTVAYSVLVVAKVEKGKSKKLKSVKELLGITIMERSSFEKNPIDFLEAKGYKEVKKDLIIKLPKYSLFELENGRKRMLASAGELQKGNELALPSKYVNFLYLASHYEKLKGSPEDNEQKQLFVEQHKHYLDEIIEQISEFSKRVILADANLDKVLSAYNKHRDKPIREQAENIIHLFTLTNLGAPAAFKYFDTTIDRKRYTSTKEVLDATLIHQSITGLYETRIDLSQLGGDGGPAPAPAPAPGGTVSLQDEHRLFDIPVTTSLPDVWLQDFPQAWAETGGLGRAKCQAPIIIDLKPTAVPVSIKQYPMSLEAHMGIRQHIIKFLELGVLRPCRSPWNTPLLPVKKPGTQDYRPVQDLREINKRTVDIHPTVPNPYNLLSTLKPDYSWYTVLDLKDAFFCLPLAPQSQELFAFEWKDPERGISGQLTWTRLPQGFKNSPTLFNEALHRDLTDFRTQHPEVTLLQYVDDLLLAAPTKKACTQGTRHLLQELGEKGYRASAKKAQICQTKVTYLGYILSEGKRWLTPGRIETVARIPPPRNPREVREFLGKAGFCRLFIPGFAELAAPLYALTKPSTPFTWQTEHQLAFEALKKALLSAPALGLPDTSKPFTLFLDERQGIAKGVLTQKLGPWKRPVAYLSKKLDPVAAGWPPCLRIMAATAMLVKDSAKLTLGQPLTVITPHTLEAIVRQPPDRWITNARLTHYQALLLDTDRVQFGPPVTLNPATLLPVPENQPSPHDCRQVLAETHGTREDLKDQELPDADHTWYTDGSSYLDSGTRRAGAAVVDGHNTIWAQSLPPGTSAQKAELIALTKALELSKGKKANIYTDSRYAFATAHTHGSIYERRGWLTSEGKEIKNKAEIIALLKALFLPQEVAIIHCPGHQKGQDPVAVGNRQADRVARQAAMAEVLTLATEPDNTSHITAGKRTADGSEFEKRTADGSEFESPKKKAKVE

SEQ ID NO: 1979 - protein, 2099 aa, synthetic construct
MPAAKRVKLDGGDKKYSIGLDIGTNSVGWAVITDEYKVPSKKFKVLGNTDRHSIKKNLIGALLFDSGETAEATRLKRTARRRYTRRKNRICYLQEIFSNEMAKVDDSFFHRLEESFLVEEDKKHERHPIFGNIVDEVAYHEKYPTIYHLRKKLVDSTDKADLRLIYLALAHMIKFRGHFLIEGDLNPDNSDVDKLFIQLVQTYNQLFEENPINASGVDAKAILSARLSKSRRLENLIAQLPGEKKNGLFGNLIALSLGLTPNFKSNFDLAEDAKLQLSKDTYDDDLDNLLAQIGDQYADLFLAAKNLSDAILLSDILRVNTEITKAPLSASMIKRYDEHHQDLTLLKALVRQQLPEKYKEIFFDQSKNGYAGYIDGGASQEEFYKFIKPILEKMDGTEELLVKLNREDLLRKQRTFDNGSIPHQIHLGELHAILRRQEDFYPFLKDNREKIEKILTFRIPYYVGPLARGNSRFAWMTRKSEETITPWNFEEVVDKGASAQSFIERMTNFDKNLPNEKVLPKHSLLYEYFTVYNELTKVKYVTEGMRKPAFLSGEQKKAIVDLLFKTNRKVTVKQLKEDYFKKIECFDSVEISGVEDRFNASLGTYHDLLKIIKDKDFLDNEENEDILEDIVLTLTLFEDREMIEERLKTYAHLFDDKVMKQLKRRRYTGWGRLSRKLINGIRDKQSGKTILDFLKSDGFANRNFMQLIHDDSLTFKEDIQKAQVSGQGDSLHEHIANLAGSPAIKKGILQTVKVVDELVKVMGRHKPENIVIEMARENQTTQKGQKNSRERMKRIEEGIKELGSQILKEHPVENTQLQNEKLYLYYLQNGRDMYVDQELDINRLSDYDVDHIVPQSFLKDDSIDNKVLTRSDKARGKSDNVPSEEVVKKMKNYWRQLLNAKLITQRKFDNLTKAERGGLSELDKAGFIKRQLVETRQITKHVAQILDSRMNTKYDENDKLIREVKVITLKSKLVSDFRKDFQFYKVREINNYHHAHDAYLNAVVGTALIKKYPKLESEFVYGDYKVYDVRKMIAKSEQEIGKATAKYFFYSNIMNFFKTEITLANGEIRKRPLIETNGETGEIVWDKGRDFATVRKVLSMPQVNIVKKTEVQTGGFSKESILPKRNSDKLIARKKDWDPKKYGGFDSPTVAYSVLVVAKVEKGKSKKLKSVKELLGITIMERSSFEKNPIDFLEAKGYKEVKKDLIIKLPKYSLFELENGRKRMLASAGELQKGNELALPSKYVNFLYLASHYEKLKGSPEDNEQKQLFVEQHKHYLDEIIEQISEFSKRVILADANLDKVLSAYNKHRDKPIREQAENIIHLFTLTNLGAPAAFKYFDTTIDRKRYTSTKEVLDATLIHQSITGLYETRIDLSQLGGDGGGGGGGGGGGGTVSLQDEHRLFDIPVTTSLPDVWLQDFPQAWAETGGLGRAKCQAPIIIDLKPTAVPVSIKQYPMSLEAHMGIRQHIIKFLELGVLRPCRSPWNTPLLPVKKPGTQDYRPVQDLREINKRTVDIHPTVPNPYNLLSTLKPDYSWYTVLDLKDAFFCLPLAPQSQELFAFEWKDPERGISGQLTWTRLPQGFKNSPTLFNEALHRDLTDFRTQHPEVTLLQYVDDLLLAAPTKKACTQGTRHLLQELGEKGYRASAKKAQICQTKVTYLGYILSEGKRWLTPGRIETVARIPPPRNPREVREFLGKAGFCRLFIPGFAELAAPLYALTKPSTPFTWQTEHQLAFEALKKALLSAPALGLPDTSKPFTLFLDERQGIAKGVLTQKLGPWKRPVAYLSKKLDPVAAGWPPCLRIMAATAMLVKDSAKLTLGQPLTVITPHTLEAIVRQPPDRWITNARLTHYQALLLDTDRVQFGPPVTLNPATLLPVPENQPSPHDCRQVLAETHGTREDLKDQELPDADHTWYTDGSSYLDSGTRRAGAAVVDGHNTIWAQSLPPGTSAQKAELIALTKALELSKGKKANIYTDSRYAFATAHTHGSIYERRGWLTSEGKEIKNKAEIIALLKALFLPQEVAIIHCPGHQKGQDPVAVGNRQADRVARQAAMAEVLTLATEPDNTSHITAGKRTADGSEFEKRTADGSEFESPKKKAKVE

SEQ ID NO: 1980 - protein, 2107 aa, synthetic construct
MPAAKRVKLDGGDKKYSIGLDIGTNSVGWAVITDEYKVPSKKFKVLGNTDRHSIKKNLIGALLFDSGETAEATRLKRTARRRYTRRKNRICYLQEIFSNEMAKVDDSFFHRLEESFLVEEDKKHERHPIFGNIVDEVAYHEKYPTIYHLRKKLVDSTDKADLRLIYLALAHMIKFRGHFLIEGDLNPDNSDVDKLFIQLVQTYNQLFEENPINASGVDAKAILSARLSKSRRLENLIAQLPGEKKNGLFGNLIALSLGLTPNFKSNFDLAEDAKLQLSKDTYDDDLDNLLAQIGDQYADLFLAAKNLSDAILLSDILRVNTEITKAPLSASMIKRYDEHHQDLTLLKALVRQQLPEKYKEIFFDQSKNGYAGYIDGGASQEEFYKFIKPILEKMDGTEELLVKLNREDLLRKQRTFDNGSIPHQIHLGELHAILRRQEDFYPFLKDNREKIEKILTFRIPYYVGPLARGNSRFAWMTRKSEETITPWNFEEVVDKGASAQSFIERMTNFDKNLPNEKVLPKHSLLYEYFTVYNELTKVKYVTEGMRKPAFLSGEQKKAIVDLLFKTNRKVTVKQLKEDYFKKIECFDSVEISGVEDRFNASLGTYHDLLKIIKDKDFLDNEENEDILEDIVLTLTLFEDREMIEERLKTYAHLFDDKVMKQLKRRRYTGWGRLSRKLINGIRDKQSGKTILDFLKSDGFANRNFMQLIHDDSLTFKEDIQKAQVSGQGDSLHEHIANLAGSPAIKKGILQTVKVVDELVKVMGRHKPENIVIEMARENQTTQKGQKNSRERMKRIEEGIKELGSQILKEHPVENTQLQNEKLYLYYLQNGRDMYVDQELDINRLSDYDVDHIVPQSFLKDDSIDNKVLTRSDKARGKSDNVPSEEVVKKMKNYWRQLLNAKLITQRKFDNLTKAERGGLSELDKAGFIKRQLVETRQITKHVAQILDSRMNTKYDENDKLIREVKVITLKSKLVSDFRKDFQFYKVREINNYHHAHDAYLNAVVGTALIKKYPKLESEFVYGDYKVYDVRKMIAKSEQEIGKATAKYFFYSNIMNFFKTEITLANGEIRKRPLIETNGETGEIVWDKGRDFATVRKVLSMPQVNIVKKTEVQTGGFSKESILPKRNSDKLIARKKDWDPKKYGGFDSPTVAYSVLVVAKVEKGKSKKLKSVKELLGITIMERSSFEKNPIDFLEAKGYKEVKKDLIIKLPKYSLFELENGRKRMLASAGELQKGNELALPSKYVNFLYLASHYEKLKGSPEDNEQKQLFVEQHKHYLDEIIEQISEFSKRVILADANLDKVLSAYNKHRDKPIREQAENIIHLFTLTNLGAPAAFKYFDTTIDRKRYTSTKEVLDATLIHQSITGLYETRIDLSQLGGDGGSGSETPGTSESATPESGGTVSLQDEHRLFDIPVTTSLPDVWLQDFPQAWAETGGLGRAKCQAPIIIDLKPTAVPVSIKQYPMSLEAHMGIRQHIIKFLELGVLRPCRSPWNTPLLPVKKPGTQDYRPVQDLREINKRTVDIHPTVPNPYNLLSTLKPDYSWYTVLDLKDAFFCLPLAPQSQELFAFEWKDPERGISGQLTWTRLPQGFKNSPTLFNEALHRDLTDFRTQHPEVTLLQYVDDLLLAAPTKKACTQGTRHLLQELGEKGYRASAKKAQICQTKVTYLGYILSEGKRWLTPGRIETVARIPPPRNPREVREFLGKAGFCRLFIPGFAELAAPLYALTKPSTPFTWQTEHQLAFEALKKALLSAPALGLPDTSKPFTLFLDERQGIAKGVLTQKLGPWKRPVAYLSKKLDPVAAGWPPCLRIMAATAMLVKDSAKLTLGQPLTVITPHTLEAIVRQPPDRWITNARLTHYQALLLDTDRVQFGPPVTLNPATLLPVPENQPSPHDCRQVLAETHGTREDLKDQELPDADHTWYTDGSSYLDSGTRRAGAAVVDGHNTIWAQSLPPGTSAQKAELIALTKALELSKGKKANIYTDSRYAFATAHTHGSIYERRGWLTSEGKEIKNKAEIIALLKALFLPQEVAIIHCPGHQKGQDPVAVGNRQADRVARQAAMAEVLTLATEPDNTSHITAGKRTADGSEFEKRTADGSEFESPKKKAKVE

SEQ ID NO: 1981 - protein, 2102 aa, synthetic construct
MPAAKRVKLDGGDKKYSIGLDIGTNSVGWAVITDEYKVPSKKFKVLGNTDRHSIKKNLIGALLFDSGETAEATRLKRTARRRYTRRKNRICYLQEIFSNEMAKVDDSFFHRLEESFLVEEDKKHERHPIFGNIVDEVAYHEKYPTIYHLRKKLVDSTDKADLRLIYLALAHMIKFRGHFLIEGDLNPDNSDVDKLFIQLVQTYNQLFEENPINASGVDAKAILSARLSKSRRLENLIAQLPGEKKNGLFGNLIALSLGLTPNFKSNFDLAEDAKLQLSKDTYDDDLDNLLAQIGDQYADLFLAAKNLSDAILLSDILRVNTEITKAPLSASMIKRYDEHHQDLTLLKALVRQQLPEKYKEIFFDQSKNGYAGYIDGGASQEEFYKFIKPILEKMDGTEELLVKLNREDLLRKQRTFDNGSIPHQIHLGELHAILRRQEDFYPFLKDNREKIEKILTFRIPYYVGPLARGNSRFAWMTRKSEETITPWNFEEVVDKGASAQSFIERMTNFDKNLPNEKVLPKHSLLYEYFTVYNELTKVKYVTEGMRKPAFLSGEQKKAIVDLLFKTNRKVTVKQLKEDYFKKIECFDSVEISGVEDRFNASLGTYHDLLKIIKDKDFLDNEENEDILEDIVLTLTLFEDREMIEERLKTYAHLFDDKVMKQLKRRRYTGWGRLSRKLINGIRDKQSGKTILDFLKSDGFANRNFMQLIHDDSLTFKEDIQKAQVSGQGDSLHEHIANLAGSPAIKKGILQTVKVVDELVKVMGRHKPENIVIEMARENQTTQKGQKNSRERMKRIEEGIKELGSQILKEHPVENTQLQNEKLYLYYLQNGRDMYVDQELDINRLSDYDVDHIVPQSFLKDDSIDNKVLTRSDKARGKSDNVPSEEVVKKMKNYWRQLLNAKLITQRKFDNLTKAERGGLSELDKAGFIKRQLVETRQITKHVAQILDSRMNTKYDENDKLIREVKVITLKSKLVSDFRKDFQFYKVREINNYHHAHDAYLNAVVGTALIKKYPKLESEFVYGDYKVYDVRKMIAKSEQEIGKATAKYFFYSNIMNFFKTEITLANGEIRKRPLIETNGETGEIVWDKGRDFATVRKVLSMPQVNIVKKTEVQTGGFSKESILPKRNSDKLIARKKDWDPKKYGGFDSPTVAYSVLVVAKVEKGKSKKLKSVKELLGITIMERSSFEKNPIDFLEAKGYKEVKKDLIIKLPKYSLFELENGRKRMLASAGELQKGNELALPSKYVNFLYLASHYEKLKGSPEDNEQKQLFVEQHKHYLDEIIEQISEFSKRVILADANLDKVLSAYNKHRDKPIREQAENIIHLFTLTNLGAPAAFKYFDTTIDRKRYTSTKEVLDATLIHQSITGLYETRIDLSQLGGDGGGSSPAPEAAAKGGTVSLQDEHRLFDIPVTTSLPDVWLQDFPQAWAETGGLGRAKCQAPIIIDLKPTAVPVSIKQYPMSLEAHMGIRQHIIKFLELGVLRPCRSPWNTPLLPVKKPGTQDYRPVQDLREINKRTVDIHPTVPNPYNLLSTLKPDYSWYTVLDLKDAFFCLPLAPQSQELFAFEWKDPERGISGQLTWTRLPQGFKNSPTLFNEALHRDLTDFRTQHPEVTLLQYVDDLLLAAPTKKACTQGTRHLLQELGEKGYRASAKKAQICQTKVTYLGYILSEGKRWLTPGRIETVARIPPPRNPREVREFLGKAGFCRLFIPGFAELAAPLYALTKPSTPFTWQTEHQLAFEALKKALLSAPALGLPDTSKPFTLFLDERQGIAKGVLTQKLGPWKRPVAYLSKKLDPVAAGWPPCLRIMAATAMLVKDSAKLTLGQPLTVITPHTLEAIVRQPPDRWITNARLTHYQALLLDTDRVQFGPPVTLNPATLLPVPENQPSPHDCRQVLAETHGTREDLKDQELPDADHTWYTDGSSYLDSGTRRAGAAVVDGHNTIWAQSLPPGTSAQKAELIALTKALELSKGKKANIYTDSRYAFATAHTHGSIYERRGWLTSEGKEIKNKAEIIALLKALFLPQEVAIIHCPGHQKGQDPVAVGNRQADRVARQAAMAEVLTLATEPDNTSHITAGKRTADGSEFEKRTADGSEFESPKKKAKVE

SEQ ID NO: 1982 - protein, 2100 aa, synthetic construct
MPAAKRVKLDGGDKKYSIGLDIGTNSVGWAVITDEYKVPSKKFKVLGNTDRHSIKKNLIGALLFDSGETAEATRLKRTARRRYTRRKNRICYLQEIFSNEMAKVDDSFFHRLEESFLVEEDKKHERHPIFGNIVDEVAYHEKYPTIYHLRKKLVDSTDKADLRLIYLALAHMIKFRGHFLIEGDLNPDNSDVDKLFIQLVQTYNQLFEENPINASGVDAKAILSARLSKSRRLENLIAQLPGEKKNGLFGNLIALSLGLTPNFKSNFDLAEDAKLQLSKDTYDDDLDNLLAQIGDQYADLFLAAKNLSDAILLSDILRVNTEITKAPLSASMIKRYDEHHQDLTLLKALVRQQLPEKYKEIFFDQSKNGYAGYIDGGASQEEFYKFIKPILEKMDGTEELLVKLNREDLLRKQRTFDNGSIPHQIHLGELHAILRRQEDFYPFLKDNREKIEKILTFRIPYYVGPLARGNSRFAWMTRKSEETITPWNFEEVVDKGASAQSFIERMTNFDKNLPNEKVLPKHSLLYEYFTVYNELTKVKYVTEGMRKPAFLSGEQKKAIVDLLFKTNRKVTVKQLKEDYFKKIECFDSVEISGVEDRFNASLGTYHDLLKIIKDKDFLDNEENEDILEDIVLTLTLFEDREMIEERLKTYAHLFDDKVMKQLKRRRYTGWGRLSRKLINGIRDKQSGKTILDFLKSDGFANRNFMQLIHDDSLTFKEDIQKAQVSGQGDSLHEHIANLAGSPAIKKGILQTVKVVDELVKVMGRHKPENIVIEMARENQTTQKGQKNSRERMKRIEEGIKELGSQILKEHPVENTQLQNEKLYLYYLQNGRDMYVDQELDINRLSDYDVDHIVPQSFLKDDSIDNKVLTRSDKARGKSDNVPSEEVVKKMKNYWRQLLNAKLITQRKFDNLTKAERGGLSELDKAGFIKRQLVETRQITKHVAQILDSRMNTKYDENDKLIREVKVITLKSKLVSDFRKDFQFYKVREINNYHHAHDAYLNAVVGTALIKKYPKLESEFVYGDYKVYDVRKMIAKSEQEIGKATAKYFFYSNIMNFFKTEITLANGEIRKRPLIETNGETGEIVWDKGRDFATVRKVLSMPQVNIVKKTEVQTGGFSKESILPKRNSDKLIARKKDWDPKKYGGFDSPTVAYSVLVVAKVEKGKSKKLKSVKELLGITIMERSSFEKNPIDFLEAKGYKEVKKDLIIKLPKYSLFELENGRKRMLASAGELQKGNELALPSKYVNFLYLASHYEKLKGSPEDNEQKQLFVEQHKHYLDEIIEQISEFSKRVILADANLDKVLSAYNKHRDKPIREQAENIIHLFTLTNLGAPAAFKYFDTTIDRKRYTSTKEVLDATLIHQSITGLYETRIDLSQLGGDGGGSSGGGGGSGGTVSLQDEHRLFDIPVTTSLPDVWLQDFPQAWAETGGLGRAKCQAPIIIDLKPTAVPVSIKQYPMSLEAHMGIRQHIIKFLELGVLRPCRSPWNTPLLPVKKPGTQDYRPVQDLREINKRTVDIHPTVPNPYNLLSTLKPDYSWYTVLDLKDAFFCLPLAPQSQELFAFEWKDPERGISGQLTWTRLPQGFKNSPTLFNEALHRDLTDFRTQHPEVTLLQYVDDLLLAAPTKKACTQGTRHLLQELGEKGYRASAKKAQICQTKVTYLGYILSEGKRWLTPGRIETVARIPPPRNPREVREFLGKAGFCRLFIPGFAELAAPLYALTKPSTPFTWQTEHQLAFEALKKALLSAPALGLPDTSKPFTLFLDERQGIAKGVLTQKLGPWKRPVAYLSKKLDPVAAGWPPCLRIMAATAMLVKDSAKLTLGQPLTVITPHTLEAIVRQPPDRWITNARLTHYQALLLDTDRVQFGPPVTLNPATLLPVPENQPSPHDCRQVLAETHGTREDLKDQELPDADHTWYTDGSSYLDSGTRRAGAAVVDGHNTIWAQSLPPGTSAQKAELIALTKALELSKGKKANIYTDSRYAFATAHTHGSIYERRGWLTSEGKEIKNKAEIIALLKALFLPQEVAIIHCPGHQKGQDPVAVGNRQADRVARQAAMAEVLTLATEPDNTSHITAGKRTADGSEFEKRTADGSEFESPKKKAKVE

SEQ ID NO: 1983 - protein, 2097 aa, synthetic construct
MPAAKRVKLDGGDKKYSIGLDIGTNSVGWAVITDEYKVPSKKFKVLGNTDRHSIKKNLIGALLFDSGETAEATRLKRTARRRYTRRKNRICYLQEIFSNEMAKVDDSFFHRLEESFLVEEDKKHERHPIFGNIVDEVAYHEKYPTIYHLRKKLVDSTDKADLRLIYLALAHMIKFRGHFLIEGDLNPDNSDVDKLFIQLVQTYNQLFEENPINASGVDAKAILSARLSKSRRLENLIAQLPGEKKNGLFGNLIALSLGLTPNFKSNFDLAEDAKLQLSKDTYDDDLDNLLAQIGDQYADLFLAAKNLSDAILLSDILRVNTEITKAPLSASMIKRYDEHHQDLTLLKALVRQQLPEKYKEIFFDQSKNGYAGYIDGGASQEEFYKFIKPILEKMDGTEELLVKLNREDLLRKQRTFDNGSIPHQIHLGELHAILRRQEDFYPFLKDNREKIEKILTFRIPYYVGPLARGNSRFAWMTRKSEETITPWNFEEVVDKGASAQSFIERMTNFDKNLPNEKVLPKHSLLYEYFTVYNELTKVKYVTEGMRKPAFLSGEQKKAIVDLLFKTNRKVTVKQLKEDYFKKIECFDSVEISGVEDRFNASLGTYHDLLKIIKDKDFLDNEENEDILEDIVLTLTLFEDREMIEERLKTYAHLFDDKVMKQLKRRRYTGWGRLSRKLINGIRDKQSGKTILDFLKSDGFANRNFMQLIHDDSLTFKEDIQKAQVSGQGDSLHEHIANLAGSPAIKKGILQTVKVVDELVKVMGRHKPENIVIEMARENQTTQKGQKNSRERMKRIEEGIKELGSQILKEHPVENTQLQNEKLYLYYLQNGRDMYVDQELDINRLSDYDVDHIVPQSFLKDDSIDNKVLTRSDKARGKSDNVPSEEVVKKMKNYWRQLLNAKLITQRKFDNLTKAERGGLSELDKAGFIKRQLVETRQITKHVAQILDSRMNTKYDENDKLIREVKVITLKSKLVSDFRKDFQFYKVREINNYHHAHDAYLNAVVGTALIKKYPKLESEFVYGDYKVYDVRKMIAKSEQEIGKATAKYFFYSNIMNFFKTEITLANGEIRKRPLIETNGETGEIVWDKGRDFATVRKVLSMPQVNIVKKTEVQTGGFSKESILPKRNSDKLIARKKDWDPKKYGGFDSPTVAYSVLVVAKVEKGKSKKLKSVKELLGITIMERSSFEKNPIDFLEAKGYKEVKKDLIIKLPKYSLFELENGRKRMLASAGELQKGNELALPSKYVNFLYLASHYEKLKGSPEDNEQKQLFVEQHKHYLDEIIEQISEFSKRVILADANLDKVLSAYNKHRDKPIREQAENIIHLFTLTNLGAPAAFKYFDTTIDRKRYTSTKEVLDATLIHQSITGLYETRIDLSQLGGDGGPAPGGGGGTVSLQDEHRLFDIPVTTSLPDVWLQDFPQAWAETGGLGRAKCQAPIIIDLKPTAVPVSIKQYPMSLEAHMGIRQHIIKFLELGVLRPCRSPWNTPLLPVKKPGTQDYRPVQDLREINKRTVDIHPTVPNPYNLLSTLKPDYSWYTVLDLKDAFFCLPLAPQSQELFAFEWKDPERGISGQLTWTRLPQGFKNSPTLFNEALHRDLTDFRTQHPEVTLLQYVDDLLLAAPTKKACTQGTRHLLQELGEKGYRASAKKAQICQTKVTYLGYILSEGKRWLTPGRIETVARIPPPRNPREVREFLGKAGFCRLFIPGFAELAAPLYALTKPSTPFTWQTEHQLAFEALKKALLSAPALGLPDTSKPFTLFLDERQGIAKGVLTQKLGPWKRPVAYLSKKLDPVAAGWPPCLRIMAATAMLVKDSAKLTLGQPLTVITPHTLEAIVRQPPDRWITNARLTHYQALLLDTDRVQFGPPVTLNPATLLPVPENQPSPHDCRQVLAETHGTREDLKDQELPDADHTWYTDGSSYLDSGTRRAGAAVVDGHNTIWAQSLPPGTSAQKAELIALTKALELSKGKKANIYTDSRYAFATAHTHGSIYERRGWLTSEGKEIKNKAEIIALLKALFLPQEVAIIHCPGHQKGQDPVAVGNRQADRVARQAAMAEVLTLATEPDNTSHITAGKRTADGSEFEKRTADGSEFESPKKKAKVE

SEQ ID NO: 1984 - protein, 2102 aa, synthetic construct
MPAAKRVKLDGGDKKYSIGLDIGTNSVGWAVITDEYKVPSKKFKVLGNTDRHSIKKNLIGALLFDSGETAEATRLKRTARRRYTRRKNRICYLQEIFSNEMAKVDDSFFHRLEESFLVEEDKKHERHPIFGNIVDEVAYHEKYPTIYHLRKKLVDSTDKADLRLIYLALAHMIKFRGHFLIEGDLNPDNSDVDKLFIQLVQTYNQLFEENPINASGVDAKAILSARLSKSRRLENLIAQLPGEKKNGLFGNLIALSLGLTPNFKSNFDLAEDAKLQLSKDTYDDDLDNLLAQIGDQYADLFLAAKNLSDAILLSDILRVNTEITKAPLSASMIKRYDEHHQDLTLLKALVRQQLPEKYKEIFFDQSKNGYAGYIDGGASQEEFYKFIKPILEKMDGTEELLVKLNREDLLRKQRTFDNGSIPHQIHLGELHAILRRQEDFYPFLKDNREKIEKILTFRIPYYVGPLARGNSRFAWMTRKSEETITPWNFEEVVDKGASAQSFIERMTNFDKNLPNEKVLPKHSLLYEYFTVYNELTKVKYVTEGMRKPAFLSGEQKKAIVDLLFKTNRKVTVKQLKEDYFKKIECFDSVEISGVEDRFNASLGTYHDLLKIIKDKDFLDNEENEDILEDIVLTLTLFEDREMIEERLKTYAHLFDDKVMKQLKRRRYTGWGRLSRKLINGIRDKQSGKTILDFLKSDGFANRNFMQLIHDDSLTFKEDIQKAQVSGQGDSLHEHIANLAGSPAIKKGILQTVKVVDELVKVMGRHKPENIVIEMARENQTTQKGQKNSRERMKRIEEGIKELGSQILKEHPVENTQLQNEKLYLYYLQNGRDMYVDQELDINRLSDYDVDHIVPQSFLKDDSIDNKVLTRSDKARGKSDNVPSEEVVKKMKNYWRQLLNAKLITQRKFDNLTKAERGGLSELDKAGFIKRQLVETRQITKHVAQILDSRMNTKYDENDKLIREVKVITLKSKLVSDFRKDFQFYKVREINNYHHAHDAYLNAVVGTALIKKYPKLESEFVYGDYKVYDVRKMIAKSEQEIGKATAKYFFYSNIMNFFKTEITLANGEIRKRPLIETNGETGEIVWDKGRDFATVRKVLSMPQVNIVKKTEVQTGGFSKESILPKRNSDKLIARKKDWDPKKYGGFDSPTVAYSVLVVAKVEKGKSKKLKSVKELLGITIMERSSFEKNPIDFLEAKGYKEVKKDLIIKLPKYSLFELENGRKRMLASAGELQKGNELALPSKYVNFLYLASHYEKLKGSPEDNEQKQLFVEQHKHYLDEIIEQISEFSKRVILADANLDKVLSAYNKHRDKPIREQAENIIHLFTLTNLGAPAAFKYFDTTIDRKRYTSTKEVLDATLIHQSITGLYETRIDLSQLGGDGGGGSEAAAKGGGGGTVSLQDEHRLFDIPVTTSLPDVWLQDFPQAWAETGGLGRAKCQAPIIIDLKPTAVPVSIKQYPMSLEAHMGIRQHIIKFLELGVLRPCRSPWNTPLLPVKKPGTQDYRPVQDLREINKRTVDIHPTVPNPYNLLSTLKPDYSWYTVLDLKDAFFCLPLAPQSQELFAFEWKDPERGISGQLTWTRLPQGFKNSPTLFNEALHRDLTDFRTQHPEVTLLQYVDDLLLAAPTKKACTQGTRHLLQELGEKGYRASAKKAQICQTKVTYLGYILSEGKRWLTPGRIETVARIPPPRNPREVREFLGKAGFCRLFIPGFAELAAPLYALTKPSTPFTWQTEHQLAFEALKKALLSAPALGLPDTSKPFTLFLDERQGIAKGVLTQKLGPWKRPVAYLSKKLDPVAAGWPPCLRIMAATAMLVKDSAKLTLGQPLTVITPHTLEAIVRQPPDRWITNARLTHYQALLLDTDRVQFGPPVTLNPATLLPVPENQPSPHDCRQVLAETHGTREDLKDQELPDADHTWYTDGSSYLDSGTRRAGAAVVDGHNTIWAQSLPPGTSAQKAELIALTKALELSKGKKANIYTDSRYAFATAHTHGSIYERRGWLTSEGKEIKNKAEIIALLKALFLPQEVAIIHCPGHQKGQDPVAVGNRQADRVARQAAMAEVLTLATEPDNTSHITAGKRTADGSEFEKRTADGSEFESPKKKAKVE

SEQ ID NO: 1985 - protein, 2100 aa, synthetic construct
MPAAKRVKLDGGDKKYSIGLDIGTNSVGWAVITDEYKVPSKKFKVLGNTDRHSIKKNLIGALLFDSGETAEATRLKRTARRRYTRRKNRICYLQEIFSNEMAKVDDSFFHRLEESFLVEEDKKHERHPIFGNIVDEVAYHEKYPTIYHLRKKLVDSTDKADLRLIYLALAHMIKFRGHFLIEGDLNPDNSDVDKLFIQLVQTYNQLFEENPINASGVDAKAILSARLSKSRRLENLIAQLPGEKKNGLFGNLIALSLGLTPNFKSNFDLAEDAKLQLSKDTYDDDLDNLLAQIGDQYADLFLAAKNLSDAILLSDILRVNTEITKAPLSASMIKRYDEHHQDLTLLKALVRQQLPEKYKEIFFDQSKNGYAGYIDGGASQEEFYKFIKPILEKMDGTEELLVKLNREDLLRKQRTFDNGSIPHQIHLGELHAILRRQEDFYPFLKDNREKIEKILTFRIPYYVGPLARGNSRFAWMTRKSEETITPWNFEEVVDKGASAQSFIERMTNFDKNLPNEKVLPKHSLLYEYFTVYNELTKVKYVTEGMRKPAFLSGEQKKAIVDLLFKTNRKVTVKQLKEDYFKKIECFDSVEISGVEDRFNASLGTYHDLLKIIKDKDFLDNEENEDILEDIVLTLTLFEDREMIEERLKTYAHLFDDKVMKQLKRRRYTGWGRLSRKLINGIRDKQSGKTILDFLKSDGFANRNFMQLIHDDSLTFKEDIQKAQVSGQGDSLHEHIANLAGSPAIKKGILQTVKVVDELVKVMGRHKPENIVIEMARENQTTQKGQKNSRERMKRIEEGIKELGSQILKEHPVENTQLQNEKLYLYYLQNGRDMYVDQELDINRLSDYDVDHIVPQSFLKDDSIDNKVLTRSDKARGKSDNVPSEEVVKKMKNYWRQLLNAKLITQRKFDNLTKAERGGLSELDKAGFIKRQLVETRQITKHVAQILDSRMNTKYDENDKLIREVKVITLKSKLVSDFRKDFQFYKVREINNYHHAHDAYLNAVVGTALIKKYPKLESEFVYGDYKVYDVRKMIAKSEQEIGKATAKYFFYSNIMNFFKTEITLANGEIRKRPLIETNGETGEIVWDKGRDFATVRKVLSMPQVNIVKKTEVQTGGFSKESILPKRNSDKLIARKKDWDPKKYGGFDSPTVAYSVLVVAKVEKGKSKKLKSVKELLGITIMERSSFEKNPIDFLEAKGYKEVKKDLIIKLPKYSLFELENGRKRMLASAGELQKGNELALPSKYVNFLYLASHYEKLKGSPEDNEQKQLFVEQHKHYLDEIIEQISEFSKRVILADANLDKVLSAYNKHRDKPIREQAENIIHLFTLTNLGAPAAFKYFDTTIDRKRYTSTKEVLDATLIHQSITGLYETRIDLSQLGGDGGGSSPAPGGSGGTVSLQDEHRLFDIPVTTSLPDVWLQDFPQAWAETGGLGRAKCQAPIIIDLKPTAVPVSIKQYPMSLEAHMGIRQHIIKFLELGVLRPCRSPWNTPLLPVKKPGTQDYRPVQDLREINKRTVDIHPTVPNPYNLLSTLKPDYSWYTVLDLKDAFFCLPLAPQSQELFAFEWKDPERGISGQLTWTRLPQGFKNSPTLFNEALHRDLTDFRTQHPEVTLLQYVDDLLLAAPTKKACTQGTRHLLQELGEKGYRASAKKAQICQTKVTYLGYILSEGKRWLTPGRIETVARIPPPRNPREVREFLGKAGFCRLFIPGFAELAAPLYALTKPSTPFTWQTEHQLAFEALKKALLSAPALGLPDTSKPFTLFLDERQGIAKGVLTQKLGPWKRPVAYLSKKLDPVAAGWPPCLRIMAATAMLVKDSAKLTLGQPLTVITPHTLEAIVRQPPDRWITNARLTHYQALLLDTDRVQFGPPVTLNPATLLPVPENQPSPHDCRQVLAETHGTREDLKDQELPDADHTWYTDGSSYLDSGTRRAGAAVVDGHNTIWAQSLPPGTSAQKAELIALTKALELSKGKKANIYTDSRYAFATAHTHGSIYERRGWLTSEGKEIKNKAEIIALLKALFLPQEVAIIHCPGHQKGQDPVAVGNRQADRVARQAAMAEVLTLATEPDNTSHITAGKRTADGSEFEKRTADGSEFESPKKKAKVE

SEQ ID NO: 1986 - protein, 2099 aa, synthetic construct
MPAAKRVKLDGGDKKYSIGLDIGTNSVGWAVITDEYKVPSKKFKVLGNTDRHSIKKNLIGALLFDSGETAEATRLKRTARRRYTRRKNRICYLQEIFSNEMAKVDDSFFHRLEESFLVEEDKKHERHPIFGNIVDEVAYHEKYPTIYHLRKKLVDSTDKADLRLIYLALAHMIKFRGHFLIEGDLNPDNSDVDKLFIQLVQTYNQLFEENPINASGVDAKAILSARLSKSRRLENLIAQLPGEKKNGLFGNLIALSLGLTPNFKSNFDLAEDAKLQLSKDTYDDDLDNLLAQIGDQYADLFLAAKNLSDAILLSDILRVNTEITKAPLSASMIKRYDEHHQDLTLLKALVRQQLPEKYKEIFFDQSKNGYAGYIDGGASQEEFYKFIKPILEKMDGTEELLVKLNREDLLRKQRTFDNGSIPHQIHLGELHAILRRQEDFYPFLKDNREKIEKILTFRIPYYVGPLARGNSRFAWMTRKSEETITPWNFEEVVDKGASAQSFIERMTNFDKNLPNEKVLPKHSLLYEYFTVYNELTKVKYVTEGMRKPAFLSGEQKKAIVDLLFKTNRKVTVKQLKEDYFKKIECFDSVEISGVEDRFNASLGTYHDLLKIIKDKDFLDNEENEDILEDIVLTLTLFEDREMIEERLKTYAHLFDDKVMKQLKRRRYTGWGRLSRKLINGIRDKQSGKTILDFLKSDGFANRNFMQLIHDDSLTFKEDIQKAQVSGQGDSLHEHIANLAGSPAIKKGILQTVKVVDELVKVMGRHKPENIVIEMARENQTTQKGQKNSRERMKRIEEGIKELGSQILKEHPVENTQLQNEKLYLYYLQNGRDMYVDQELDINRLSDYDVDHIVPQSFLKDDSIDNKVLTRSDKARGKSDNVPSEEVVKKMKNYWRQLLNAKLITQRKFDNLTKAERGGLSELDKAGFIKRQLVETRQITKHVAQILDSRMNTKYDENDKLIREVKVITLKSKLVSDFRKDFQFYKVREINNYHHAHDAYLNAVVGTALIKKYPKLESEFVYGDYKVYDVRKMIAKSEQEIGKATAKYFFYSNIMNFFKTEITLANGEIRKRPLIETNGETGEIVWDKGRDFATVRKVLSMPQVNIVKKTEVQTGGFSKESILPKRNSDKLIARKKDWDPKKYGGFDSPTVAYSVLVVAKVEKGKSKKLKSVKELLGITIMERSSFEKNPIDFLEAKGYKEVKKDLIIKLPKYSLFELENGRKRMLASAGELQKGNELALPSKYVNFLYLASHYEKLKGSPEDNEQKQLFVEQHKHYLDEIIEQISEFSKRVILADANLDKVLSAYNKHRDKPIREQAENIIHLFTLTNLGAPAAFKYFDTTIDRKRYTSTKEVLDATLIHQSITGLYETRIDLSQLGGDGGEAAAKGGGGGTVSLQDEHRLFDIPVTTSLPDVWLQDFPQAWAETGGLGRAKCQAPIIIDLKPTAVPVSIKQYPMSLEAHMGIRQHIIKFLELGVLRPCRSPWNTPLLPVKKPGTQDYRPVQDLREINKRTVDIHPTVPNPYNLLSTLKPDYSWYTVLDLKDAFFCLPLAPQSQELFAFEWKDPERGISGQLTWTRLPQGFKNSPTLFNEALHRDLTDFRTQHPEVTLLQYVDDLLLAAPTKKACTQGTRHLLQELGEKGYRASAKKAQICQTKVTYLGYILSEGKRWLTPGRIETVARIPPPRNPREVREFLGKAGFCRLFIPGFAELAAPLYALTKPSTPFTWQTEHQLAFEALKKALLSAPALGLPDTSKPFTLFLDERQGIAKGVLTQKLGPWKRPVAYLSKKLDPVAAGWPPCLRIMAATAMLVKDSAKLTLGQPLTVITPHTLEAIVRQPPDRWITNARLTHYQALLLDTDRVQFGPPVTLNPATLLPVPENQPSPHDCRQVLAETHGTREDLKDQELPDADHTWYTDGSSYLDSGTRRAGAAVVDGHNTIWAQSLPPGTSAQKAELIALTKALELSKGKKANIYTDSRYAFATAHTHGSIYERRGWLTSEGKEIKNKAEIIALLKALFLPQEVAIIHCPGHQKGQDPVAVGNRQADRVARQAAMAEVLTLATEPDNTSHITAGKRTADGSEFEKRTADGSEFESPKKKAKVE

SEQ ID NO: 1987 - protein, 2106 aa, synthetic construct
MPAAKRVKLDGGDKKYSIGLDIGTNSVGWAVITDEYKVPSKKFKVLGNTDRHSIKKNLIGALLFDSGETAEATRLKRTARRRYTRRKNRICYLQEIFSNEMAKVDDSFFHRLEESFLVEEDKKHERHPIFGNIVDEVAYHEKYPTIYHLRKKLVDSTDKADLRLIYLALAHMIKFRGHFLIEGDLNPDNSDVDKLFIQLVQTYNQLFEENPINASGVDAKAILSARLSKSRRLENLIAQLPGEKKNGLFGNLIALSLGLTPNFKSNFDLAEDAKLQLSKDTYDDDLDNLLAQIGDQYADLFLAAKNLSDAILLSDILRVNTEITKAPLSASMIKRYDEHHQDLTLLKALVRQQLPEKYKEIFFDQSKNGYAGYIDGGASQEEFYKFIKPILEKMDGTEELLVKLNREDLLRKQRTFDNGSIPHQIHLGELHAILRRQEDFYPFLKDNREKIEKILTFRIPYYVGPLARGNSRFAWMTRKSEETITPWNFEEVVDKGASAQSFIERMTNFDKNLPNEKVLPKHSLLYEYFTVYNELTKVKYVTEGMRKPAFLSGEQKKAIVDLLFKTNRKVTVKQLKEDYFKKIECFDSVEISGVEDRFNASLGTYHDLLKIIKDKDFLDNEENEDILEDIVLTLTLFEDREMIEERLKTYAHLFDDKVMKQLKRRRYTGWGRLSRKLINGIRDKQSGKTILDFLKSDGFANRNFMQLIHDDSLTFKEDIQKAQVSGQGDSLHEHIANLAGSPAIKKGILQTVKVVDELVKVMGRHKPENIVIEMARENQTTQKGQKNSRERMKRIEEGIKELGSQILKEHPVENTQLQNEKLYLYYLQNGRDMYVDQELDINRLSDYDVDHIVPQSFLKDDSIDNKVLTRSDKARGKSDNVPSEEVVKKMKNYWRQLLNAKLITQRKFDNLTKAERGGLSELDKAGFIKRQLVETRQITKHVAQILDSRMNTKYDENDKLIREVKVITLKSKLVSDFRKDFQFYKVREINNYHHAHDAYLNAVVGTALIKKYPKLESEFVYGDYKVYDVRKMIAKSEQEIGKATAKYFFYSNIMNFFKTEITLANGEIRKRPLIETNGETGEIVWDKGRDFATVRKVLSMPQVNIVKKTEVQTGGFSKESILPKRNSDKLIARKKDWDPKKYGGFDSPTVAYSVLVVAKVEKGKSKKLKSVKELLGITIMERSSFEKNPIDFLEAKGYKEVKKDLIIKLPKYSLFELENGRKRMLASAGELQKGNELALPSKYVNFLYLASHYEKLKGSPEDNEQKQLFVEQHKHYLDEIIEQISEFSKRVILADANLDKVLSAYNKHRDKPIREQAENIIHLFTLTNLGAPAAFKYFDTTIDRKRYTSTKEVLDATLIHQSITGLYETRIDLSQLGGDGGGGGGSGGGGSGGGGSGGTVSLQDEHRLFDIPVTTSLPDVWLQDFPQAWAETGGLGRAKCQAPIIIDLKPTAVPVSIKQYPMSLEAHMGIRQHIIKFLELGVLRPCRSPWNTPLLPVKKPGTQDYRPVQDLREINKRTVDIHPTVPNPYNLLSTLKPDYSWYTVLDLKDAFFCLPLAPQSQELFAFEWKDPERGISGQLTWTRLPQGFKNSPTLFNEALHRDLTDFRTQHPEVTLLQYVDDLLLAAPTKKACTQGTRHLLQELGEKGYRASAKKAQICQTKVTYLGYILSEGKRWLTPGRIETVARIPPPRNPREVREFLGKAGFCRLFIPGFAELAAPLYALTKPSTPFTWQTEHQLAFEALKKALLSAPALGLPDTSKPFTLFLDERQGIAKGVLTQKLGPWKRPVAYLSKKLDPVAAGWPPCLRIMAATAMLVKDSAKLTLGQPLTVITPHTLEAIVRQPPDRWITNARLTHYQALLLDTDRVQFGPPVTLNPATLLPVPENQPSPHDCRQVLAETHGTREDLKDQELPDADHTWYTDGSSYLDSGTRRAGAAVVDGHNTIWAQSLPPGTSAQKAELIALTKALELSKGKKANIYTDSRYAFATAHTHGSIYERRGWLTSEGKEIKNKAEIIALLKALFLPQEVAIIHCPGHQKGQDPVAVGNRQADRVARQAAMAEVLTLATEPDNTSHITAGKRTADGSEFEKRTADGSEFESPKKKAKVE

SEQ ID NO: 1988 - protein, 2100 aa, synthetic construct
MPAAKRVKLDGGDKKYSIGLDIGTNSVGWAVITDEYKVPSKKFKVLGNTDRHSIKKNLIGALLFDSGETAEATRLKRTARRRYTRRKNRICYLQEIFSNEMAKVDDSFFHRLEESFLVEEDKKHERHPIFGNIVDEVAYHEKYPTIYHLRKKLVDSTDKADLRLIYLALAHMIKFRGHFLIEGDLNPDNSDVDKLFIQLVQTYNQLFEENPINASGVDAKAILSARLSKSRRLENLIAQLPGEKKNGLFGNLIALSLGLTPNFKSNFDLAEDAKLQLSKDTYDDDLDNLLAQIGDQYADLFLAAKNLSDAILLSDILRVNTEITKAPLSASMIKRYDEHHQDLTLLKALVRQQLPEKYKEIFFDQSKNGYAGYIDGGASQEEFYKFIKPILEKMDGTEELLVKLNREDLLRKQRTFDNGSIPHQIHLGELHAILRRQEDFYPFLKDNREKIEKILTFRIPYYVGPLARGNSRFAWMTRKSEETITPWNFEEVVDKGASAQSFIERMTNFDKNLPNEKVLPKHSLLYEYFTVYNELTKVKYVTEGMRKPAFLSGEQKKAIVDLLFKTNRKVTVKQLKEDYFKKIECFDSVEISGVEDRFNASLGTYHDLLKIIKDKDFLDNEENEDILEDIVLTLTLFEDREMIEERLKTYAHLFDDKVMKQLKRRRYTGWGRLSRKLINGIRDKQSGKTILDFLKSDGFANRNFMQLIHDDSLTFKEDIQKAQVSGQGDSLHEHIANLAGSPAIKKGILQTVKVVDELVKVMGRHKPENIVIEMARENQTTQKGQKNSRERMKRIEEGIKELGSQILKEHPVENTQLQNEKLYLYYLQNGRDMYVDQELDINRLSDYDVDHIVPQSFLKDDSIDNKVLTRSDKARGKSDNVPSEEVVKKMKNYWRQLLNAKLITQRKFDNLTKAERGGLSELDKAGFIKRQLVETRQITKHVAQILDSRMNTKYDENDKLIREVKVITLKSKLVSDFRKDFQFYKVREINNYHHAHDAYLNAVVGTALIKKYPKLESEFVYGDYKVYDVRKMIAKSEQEIGKATAKYFFYSNIMNFFKTEITLANGEIRKRPLIETNGETGEIVWDKGRDFATVRKVLSMPQVNIVKKTEVQTGGFSKESILPKRNSDKLIARKKDWDPKKYGGFDSPTVAYSVLVVAKVEKGKSKKLKSVKELLGITIMERSSFEKNPIDFLEAKGYKEVKKDLIIKLPKYSLFELENGRKRMLASAGELQKGNELALPSKYVNFLYLASHYEKLKGSPEDNEQKQLFVEQHKHYLDEIIEQISEFSKRVILADANLDKVLSAYNKHRDKPIREQAENIIHLFTLTNLGAPAAFKYFDTTIDRKRYTSTKEVLDATLIHQSITGLYETRIDLSQLGGDGGGGGPAPGSSGGTVSLQDEHRLFDIPVTTSLPDVWLQDFPQAWAETGGLGRAKCQAPIIIDLKPTAVPVSIKQYPMSLEAHMGIRQHIIKFLELGVLRPCRSPWNTPLLPVKKPGTQDYRPVQDLREINKRTVDIHPTVPNPYNLLSTLKPDYSWYTVLDLKDAFFCLPLAPQSQELFAFEWKDPERGISGQLTWTRLPQGFKNSPTLFNEALHRDLTDFRTQHPEVTLLQYVDDLLLAAPTKKACTQGTRHLLQELGEKGYRASAKKAQICQTKVTYLGYILSEGKRWLTPGRIETVARIPPPRNPREVREFLGKAGFCRLFIPGFAELAAPLYALTKPSTPFTWQTEHQLAFEALKKALLSAPALGLPDTSKPFTLFLDERQGIAKGVLTQKLGPWKRPVAYLSKKLDPVAAGWPPCLRIMAATAMLVKDSAKLTLGQPLTVITPHTLEAIVRQPPDRWITNARLTHYQALLLDTDRVQFGPPVTLNPATLLPVPENQPSPHDCRQVLAETHGTREDLKDQELPDADHTWYTDGSSYLDSGTRRAGAAVVDGHNTIWAQSLPPGTSAQKAELIALTKALELSKGKKANIYTDSRYAFATAHTHGSIYERRGWLTSEGKEIKNKAEIIALLKALFLPQEVAIIHCPGHQKGQDPVAVGNRQADRVARQAAMAEVLTLATEPDNTSHITAGKRTADGSEFEKRTADGSEFESPKKKAKVE

SEQ ID NO: 1989 - protein, 2102 aa, synthetic construct
MPAAKRVKLDGGDKKYSIGLDIGTNSVGWAVITDEYKVPSKKFKVLGNTDRHSIKKNLIGALLFDSGETAEATRLKRTARRRYTRRKNRICYLQEIFSNEMAKVDDSFFHRLEESFLVEEDKKHERHPIFGNIVDEVAYHEKYPTIYHLRKKLVDSTDKADLRLIYLALAHMIKFRGHFLIEGDLNPDNSDVDKLFIQLVQTYNQLFEENPINASGVDAKAILSARLSKSRRLENLIAQLPGEKKNGLFGNLIALSLGLTPNFKSNFDLAEDAKLQLSKDTYDDDLDNLLAQIGDQYADLFLAAKNLSDAILLSDILRVNTEITKAPLSASMIKRYDEHHQDLTLLKALVRQQLPEKYKEIFFDQSKNGYAGYIDGGASQEEFYKFIKPILEKMDGTEELLVKLNREDLLRKQRTFDNGSIPHQIHLGELHAILRRQEDFYPFLKDNREKIEKILTFRIPYYVGPLARGNSRFAWMTRKSEETITPWNFEEVVDKGASAQSFIERMTNFDKNLPNEKVLPKHSLLYEYFTVYNELTKVKYVTEGMRKPAFLSGEQKKAIVDLLFKTNRKVTVKQLKEDYFKKIECFDSVEISGVEDRFNASLGTYHDLLKIIKDKDFLDNEENEDILEDIVLTLTLFEDREMIEERLKTYAHLFDDKVMKQLKRRRYTGWGRLSRKLINGIRDKQSGKTILDFLKSDGFANRNFMQLIHDDSLTFKEDIQKAQVSGQGDSLHEHIANLAGSPAIKKGILQTVKVVDELVKVMGRHKPENIVIEMARENQTTQKGQKNSRERMKRIEEGIKELGSQILKEHPVENTQLQNEKLYLYYLQNGRDMYVDQELDINRLSDYDVDHIVPQSFLKDDSIDNKVLTRSDKARGKSDNVPSEEVVKKMKNYWRQLLNAKLITQRKFDNLTKAERGGLSELDKAGFIKRQLVETRQITKHVAQILDSRMNTKYDENDKLIREVKVITLKSKLVSDFRKDFQFYKVREINNYHHAHDAYLNAVVGTALIKKYPKLESEFVYGDYKVYDVRKMIAKSEQEIGKATAKYFFYSNIMNFFKTEITLANGEIRKRPLIETNGETGEIVWDKGRDFATVRKVLSMPQVNIVKKTEVQTGGFSKESILPKRNSDKLIARKKDWDPKKYGGFDSPTVAYSVLVVAKVEKGKSKKLKSVKELLGITIMERSSFEKNPIDFLEAKGYKEVKKDLIIKLPKYSLFELENGRKRMLASAGELQKGNELALPSKYVNFLYLASHYEKLKGSPEDNEQKQLFVEQHKHYLDEIIEQISEFSKRVILADANLDKVLSAYNKHRDKPIREQAENIIHLFTLTNLGAPAAFKYFDTTIDRKRYTSTKEVLDATLIHQSITGLYETRIDLSQLGGDGGGGSEAAAKPAPGGTVSLQDEHRLFDIPVTTSLPDVWLQDFPQAWAETGGLGRAKCQAPIIIDLKPTAVPVSIKQYPMSLEAHMGIRQHIIKFLELGVLRPCRSPWNTPLLPVKKPGTQDYRPVQDLREINKRTVDIHPTVPNPYNLLSTLKPDYSWYTVLDLKDAFFCLPLAPQSQELFAFEWKDPERGISGQLTWTRLPQGFKNSPTLFNEALHRDLTDFRTQHPEVTLLQYVDDLLLAAPTKKACTQGTRHLLQELGEKGYRASAKKAQICQTKVTYLGYILSEGKRWLTPGRIETVARIPPPRNPREVREFLGKAGFCRLFIPGFAELAAPLYALTKPSTPFTWQTEHQLAFEALKKALLSAPALGLPDTSKPFTLFLDERQGIAKGVLTQKLGPWKRPVAYLSKKLDPVAAGWPPCLRIMAATAMLVKDSAKLTLGQPLTVITPHTLEAIVRQPPDRWITNARLTHYQALLLDTDRVQFGPPVTLNPATLLPVPENQPSPHDCRQVLAETHGTREDLKDQELPDADHTWYTDGSSYLDSGTRRAGAAVVDGHNTIWAQSLPPGTSAQKAELIALTKALELSKGKKANIYTDSRYAFATAHTHGSIYERRGWLTSEGKEIKNKAEIIALLKALFLPQEVAIIHCPGHQKGQDPVAVGNRQADRVARQAAMAEVLTLATEPDNTSHITAGKRTADGSEFEKRTADGSEFESPKKKAKVE

SEQ ID NO: 1990 - protein, 2100 aa, synthetic construct
MPAAKRVKLDGGDKKYSIGLDIGTNSVGWAVITDEYKVPSKKFKVLGNTDRHSIKKNLIGALLFDSGETAEATRLKRTARRRYTRRKNRICYLQEIFSNEMAKVDDSFFHRLEESFLVEEDKKHERHPIFGNIVDEVAYHEKYPTIYHLRKKLVDSTDKADLRLIYLALAHMIKFRGHFLIEGDLNPDNSDVDKLFIQLVQTYNQLFEENPINASGVDAKAILSARLSKSRRLENLIAQLPGEKKNGLFGNLIALSLGLTPNFKSNFDLAEDAKLQLSKDTYDDDLDNLLAQIGDQYADLFLAAKNLSDAILLSDILRVNTEITKAPLSASMIKRYDEHHQDLTLLKALVRQQLPEKYKEIFFDQSKNGYAGYIDGGASQEEFYKFIKPILEKMDGTEELLVKLNREDLLRKQRTFDNGSIPHQIHLGELHAILRRQEDFYPFLKDNREKIEKILTFRIPYYVGPLARGNSRFAWMTRKSEETITPWNFEEVVDKGASAQSFIERMTNFDKNLPNEKVLPKHSLLYEYFTVYNELTKVKYVTEGMRKPAFLSGEQKKAIVDLLFKTNRKVTVKQLKEDYFKKIECFDSVEISGVEDRFNASLGTYHDLLKIIKDKDFLDNEENEDILEDIVLTLTLFEDREMIEERLKTYAHLFDDKVMKQLKRRRYTGWGRLSRKLINGIRDKQSGKTILDFLKSDGFANRNFMQLIHDDSLTFKEDIQKAQVSGQGDSLHEHIANLAGSPAIKKGILQTVKVVDELVKVMGRHKPENIVIEMARENQTTQKGQKNSRERMKRIEEGIKELGSQILKEHPVENTQLQNEKLYLYYLQNGRDMYVDQELDINRLSDYDVDHIVPQSFLKDDSIDNKVLTRSDKARGKSDNVPSEEVVKKMKNYWRQLLNAKLITQRKFDNLTKAERGGLSELDKAGFIKRQLVETRQITKHVAQILDSRMNTKYDENDKLIREVKVITLKSKLVSDFRKDFQFYKVREINNYHHAHDAYLNAVVGTALIKKYPKLESEFVYGDYKVYDVRKMIAKSEQEIGKATAKYFFYSNIMNFFKTEITLANGEIRKRPLIETNGETGEIVWDKGRDFATVRKVLSMPQVNIVKKTEVQTGGFSKESILPKRNSDKLIARKKDWDPKKYGGFDSPTVAYSVLVVAKVEKGKSKKLKSVKELLGITIMERSSFEKNPIDFLEAKGYKEVKKDLIIKLPKYSLFELENGRKRMLASAGELQKGNELALPSKYVNFLYLASHYEKLKGSPEDNEQKQLFVEQHKHYLDEIIEQISEFSKRVILADANLDKVLSAYNKHRDKPIREQAENIIHLFTLTNLGAPAAFKYFDTTIDRKRYTSTKEVLDATLIHQSITGLYETRIDLSQLGGDGGPAPGGSGSSGGTVSLQDEHRLFDIPVTTSLPDVWLQDFPQAWAETGGLGRAKCQAPIIIDLKPTAVPVSIKQYPMSLEAHMGIRQHIIKFLELGVLRPCRSPWNTPLLPVKKPGTQDYRPVQDLREINKRTVDIHPTVPNPYNLLSTLKPDYSWYTVLDLKDAFFCLPLAPQSQELFAFEWKDPERGISGQLTWTRLPQGFKNSPTLFNEALHRDLTDFRTQHPEVTLLQYVDDLLLAAPTKKACTQGTRHLLQELGEKGYRASAKKAQICQTKVTYLGYILSEGKRWLTPGRIETVARIPPPRNPREVREFLGKAGFCRLFIPGFAELAAPLYALTKPSTPFTWQTEHQLAFEALKKALLSAPALGLPDTSKPFTLFLDERQGIAKGVLTQKLGPWKRPVAYLSKKLDPVAAGWPPCLRIMAATAMLVKDSAKLTLGQPLTVITPHTLEAIVRQPPDRWITNARLTHYQALLLDTDRVQFGPPVTLNPATLLPVPENQPSPHDCRQVLAETHGTREDLKDQELPDADHTWYTDGSSYLDSGTRRAGAAVVDGHNTIWAQSLPPGTSAQKAELIALTKALELSKGKKANIYTDSRYAFATAHTHGSIYERRGWLTSEGKEIKNKAEIIALLKALFLPQEVAIIHCPGHQKGQDPVAVGNRQADRVARQAAMAEVLTLATEPDNTSHITAGKRTADGSEFEKRTADGSEFESPKKKAKVE

SEQ ID NO: 1991 - protein, 2100 aa, synthetic construct
MPAAKRVKLDGGDKKYSIGLDIGTNSVGWAVITDEYKVPSKKFKVLGNTDRHSIKKNLIGALLFDSGETAEATRLKRTARRRYTRRKNRICYLQEIFSNEMAKVDDSFFHRLEESFLVEEDKKHERHPIFGNIVDEVAYHEKYPTIYHLRKKLVDSTDKADLRLIYLALAHMIKFRGHFLIEGDLNPDNSDVDKLFIQLVQTYNQLFEENPINASGVDAKAILSARLSKSRRLENLIAQLPGEKKNGLFGNLIALSLGLTPNFKSNFDLAEDAKLQLSKDTYDDDLDNLLAQIGDQYADLFLAAKNLSDAILLSDILRVNTEITKAPLSASMIKRYDEHHQDLTLLKALVRQQLPEKYKEIFFDQSKNGYAGYIDGGASQEEFYKFIKPILEKMDGTEELLVKLNREDLLRKQRTFDNGSIPHQIHLGELHAILRRQEDFYPFLKDNREKIEKILTFRIPYYVGPLARGNSRFAWMTRKSEETITPWNFEEVVDKGASAQSFIERMTNFDKNLPNEKVLPKHSLLYEYFTVYNELTKVKYVTEGMRKPAFLSGEQKKAIVDLLFKTNRKVTVKQLKEDYFKKIECFDSVEISGVEDRFNASLGTYHDLLKIIKDKDFLDNEENEDILEDIVLTLTLFEDREMIEERLKTYAHLFDDKVMKQLKRRRYTGWGRLSRKLINGIRDKQSGKTILDFLKSDGFANRNFMQLIHDDSLTFKEDIQKAQVSGQGDSLHEHIANLAGSPAIKKGILQTVKVVDELVKVMGRHKPENIVIEMARENQTTQKGQKNSRERMKRIEEGIKELGSQILKEHPVENTQLQNEKLYLYYLQNGRDMYVDQELDINRLSDYDVDHIVPQSFLKDDSIDNKVLTRSDKARGKSDNVPSEEVVKKMKNYWRQLLNAKLITQRKFDNLTKAERGGLSELDKAGFIKRQLVETRQITKHVAQILDSRMNTKYDENDKLIREVKVITLKSKLVSDFRKDFQFYKVREINNYHHAHDAYLNAVVGTALIKKYPKLESEFVYGDYKVYDVRKMIAKSEQEIGKATAKYFFYSNIMNFFKTEITLANGEIRKRPLIETNGETGEIVWDKGRDFATVRKVLSMPQVNIVKKTEVQTGGFSKESILPKRNSDKLIARKKDWDPKKYGGFDSPTVAYSVLVVAKVEKGKSKKLKSVKELLGITIMERSSFEKNPIDFLEAKGYKEVKKDLIIKLPKYSLFELENGRKRMLASAGELQKGNELALPSKYVNFLYLASHYEKLKGSPEDNEQKQLFVEQHKHYLDEIIEQISEFSKRVILADANLDKVLSAYNKHRDKPIREQAENIIHLFTLTNLGAPAAFKYFDTTIDRKRYTSTKEVLDATLIHQSITGLYETRIDLSQLGGDGGGGGGSSGGSGGTVSLQDEHRLFDIPVTTSLPDVWLQDFPQAWAETGGLGRAKCQAPIIIDLKPTAVPVSIKQYPMSLEAHMGIRQHIIKFLELGVLRPCRSPWNTPLLPVKKPGTQDYRPVQDLREINKRTVDIHPTVPNPYNLLSTLKPDYSWYTVLDLKDAFFCLPLAPQSQELFAFEWKDPERGISGQLTWTRLPQGFKNSPTLFNEALHRDLTDFRTQHPEVTLLQYVDDLLLAAPTKKACTQGTRHLLQELGEKGYRASAKKAQICQTKVTYLGYILSEGKRWLTPGRIETVARIPPPRNPREVREFLGKAGFCRLFIPGFAELAAPLYALTKPSTPFTWQTEHQLAFEALKKALLSAPALGLPDTSKPFTLFLDERQGIAKGVLTQKLGPWKRPVAYLSKKLDPVAAGWPPCLRIMAATAMLVKDSAKLTLGQPLTVITPHTLEAIVRQPPDRWITNARLTHYQALLLDTDRVQFGPPVTLNPATLLPVPENQPSPHDCRQVLAETHGTREDLKDQELPDADHTWYTDGSSYLDSGTRRAGAAVVDGHNTIWAQSLPPGTSAQKAELIALTKALELSKGKKANIYTDSRYAFATAHTHGSIYERRGWLTSEGKEIKNKAEIIALLKALFLPQEVAIIHCPGHQKGQDPVAVGNRQADRVARQAAMAEVLTLATEPDNTSHITAGKRTADGSEFEKRTADGSEFESPKKKAKVE

SEQ ID NO: 1992 - protein, 2106 aa, synthetic construct
MPAAKRVKLDGGDKKYSIGLDIGTNSVGWAVITDEYKVPSKKFKVLGNTDRHSIKKNLIGALLFDSGETAEATRLKRTARRRYTRRKNRICYLQEIFSNEMAKVDDSFFHRLEESFLVEEDKKHERHPIFGNIVDEVAYHEKYPTIYHLRKKLVDSTDKADLRLIYLALAHMIKFRGHFLIEGDLNPDNSDVDKLFIQLVQTYNQLFEENPINASGVDAKAILSARLSKSRRLENLIAQLPGEKKNGLFGNLIALSLGLTPNFKSNFDLAEDAKLQLSKDTYDDDLDNLLAQIGDQYADLFLAAKNLSDAILLSDILRVNTEITKAPLSASMIKRYDEHHQDLTLLKALVRQQLPEKYKEIFFDQSKNGYAGYIDGGASQEEFYKFIKPILEKMDGTEELLVKLNREDLLRKQRTFDNGSIPHQIHLGELHAILRRQEDFYPFLKDNREKIEKILTFRIPYYVGPLARGNSRFAWMTRKSEETITPWNFEEVVDKGASAQSFIERMTNFDKNLPNEKVLPKHSLLYEYFTVYNELTKVKYVTEGMRKPAFLSGEQKKAIVDLLFKTNRKVTVKQLKEDYFKKIECFDSVEISGVEDRFNASLGTYHDLLKIIKDKDFLDNEENEDILEDIVLTLTLFEDREMIEERLKTYAHLFDDKVMKQLKRRRYTGWGRLSRKLINGIRDKQSGKTILDFLKSDGFANRNFMQLIHDDSLTFKEDIQKAQVSGQGDSLHEHIANLAGSPAIKKGILQTVKVVDELVKVMGRHKPENIVIEMARENQTTQKGQKNSRERMKRIEEGIKELGSQILKEHPVENTQLQNEKLYLYYLQNGRDMYVDQELDINRLSDYDVDHIVPQSFLKDDSIDNKVLTRSDKARGKSDNVPSEEVVKKMKNYWRQLLNAKLITQRKFDNLTKAERGGLSELDKAGFIKRQLVETRQITKHVAQILDSRMNTKYDENDKLIREVKVITLKSKLVSDFRKDFQFYKVREINNYHHAHDAYLNAVVGTALIKKYPKLESEFVYGDYKVYDVRKMIAKSEQEIGKATAKYFFYSNIMNFFKTEITLANGEIRKRPLIETNGETGEIVWDKGRDFATVRKVLSMPQVNIVKKTEVQTGGFSKESILPKRNSDKLIARKKDWDPKKYGGFDSPTVAYSVLVVAKVEKGKSKKLKSVKELLGITIMERSSFEKNPIDFLEAKGYKEVKKDLIIKLPKYSLFELENGRKRMLASAGELQKGNELALPSKYVNFLYLASHYEKLKGSPEDNEQKQLFVEQHKHYLDEIIEQISEFSKRVILADANLDKVLSAYNKHRDKPIREQAENIIHLFTLTNLGAPAAFKYFDTTIDRKRYTSTKEVLDATLIHQSITGLYETRIDLSQLGGDGGGGSGGSGGSGGSGGSGGTVSLQDEHRLFDIPVTTSLPDVWLQDFPQAWAETGGLGRAKCQAPIIIDLKPTAVPVSIKQYPMSLEAHMGIRQHIIKFLELGVLRPCRSPWNTPLLPVKKPGTQDYRPVQDLREINKRTVDIHPTVPNPYNLLSTLKPDYSWYTVLDLKDAFFCLPLAPQSQELFAFEWKDPERGISGQLTWTRLPQGFKNSPTLFNEALHRDLTDFRTQHPEVTLLQYVDDLLLAAPTKKACTQGTRHLLQELGEKGYRASAKKAQICQTKVTYLGYILSEGKRWLTPGRIETVARIPPPRNPREVREFLGKAGFCRLFIPGFAELAAPLYALTKPSTPFTWQTEHQLAFEALKKALLSAPALGLPDTSKPFTLFLDERQGIAKGVLTQKLGPWKRPVAYLSKKLDPVAAGWPPCLRIMAATAMLVKDSAKLTLGQPLTVITPHTLEAIVRQPPDRWITNARLTHYQALLLDTDRVQFGPPVTLNPATLLPVPENQPSPHDCRQVLAETHGTREDLKDQELPDADHTWYTDGSSYLDSGTRRAGAAVVDGHNTIWAQSLPPGTSAQKAELIALTKALELSKGKKANIYTDSRYAFATAHTHGSIYERRGWLTSEGKEIKNKAEIIALLKALFLPQEVAIIHCPGHQKGQDPVAVGNRQADRVARQAAMAEVLTLATEPDNTSHITAGKRTADGSEFEKRTADGSEFESPKKKAKVE

SEQ ID NO: 1993 - protein, 2100 aa, synthetic construct
MPAAKRVKLDGGDKKYSIGLDIGTNSVGWAVITDEYKVPSKKFKVLGNTDRHSIKKNLIGALLFDSGETAEATRLKRTARRRYTRRKNRICYLQEIFSNEMAKVDDSFFHRLEESFLVEEDKKHERHPIFGNIVDEVAYHEKYPTIYHLRKKLVDSTDKADLRLIYLALAHMIKFRGHFLIEGDLNPDNSDVDKLFIQLVQTYNQLFEENPINASGVDAKAILSARLSKSRRLENLIAQLPGEKKNGLFGNLIALSLGLTPNFKSNFDLAEDAKLQLSKDTYDDDLDNLLAQIGDQYADLFLAAKNLSDAILLSDILRVNTEITKAPLSASMIKRYDEHHQDLTLLKALVRQQLPEKYKEIFFDQSKNGYAGYIDGGASQEEFYKFIKPILEKMDGTEELLVKLNREDLLRKQRTFDNGSIPHQIHLGELHAILRRQEDFYPFLKDNREKIEKILTFRIPYYVGPLARGNSRFAWMTRKSEETITPWNFEEVVDKGASAQSFIERMTNFDKNLPNEKVLPKHSLLYEYFTVYNELTKVKYVTEGMRKPAFLSGEQKKAIVDLLFKTNRKVTVKQLKEDYFKKIECFDSVEISGVEDRFNASLGTYHDLLKIIKDKDFLDNEENEDILEDIVLTLTLFEDREMIEERLKTYAHLFDDKVMKQLKRRRYTGWGRLSRKLINGIRDKQSGKTILDFLKSDGFANRNFMQLIHDDSLTFKEDIQKAQVSGQGDSLHEHIANLAGSPAIKKGILQTVKVVDELVKVMGRHKPENIVIEMARENQTTQKGQKNSRERMKRIEEGIKELGSQILKEHPVENTQLQNEKLYLYYLQNGRDMYVDQELDINRLSDYDVDHIVPQSFLKDDSIDNKVLTRSDKARGKSDNVPSEEVVKKMKNYWRQLLNAKLITQRKFDNLTKAERGGLSELDKAGFIKRQLVETRQITKHVAQILDSRMNTKYDENDKLIREVKVITLKSKLVSDFRKDFQFYKVREINNYHHAHDAYLNAVVGTALIKKYPKLESEFVYGDYKVYDVRKMIAKSEQEIGKATAKYFFYSNIMNFFKTEITLANGEIRKRPLIETNGETGEIVWDKGRDFATVRKVLSMPQVNIVKKTEVQTGGFSKESILPKRNSDKLIARKKDWDPKKYGGFDSPTVAYSVLVVAKVEKGKSKKLKSVKELLGITIMERSSFEKNPIDFLEAKGYKEVKKDLIIKLPKYSLFELENGRKRMLASAGELQKGNELALPSKYVNFLYLASHYEKLKGSPEDNEQKQLFVEQHKHYLDEIIEQISEFSKRVILADANLDKVLSAYNKHRDKPIREQAENIIHLFTLTNLGAPAAFKYFDTTIDRKRYTSTKEVLDATLIHQSITGLYETRIDLSQLGGDGGGSSGGSGGGGGTVSLQDEHRLFDIPVTTSLPDVWLQDFPQAWAETGGLGRAKCQAPIIIDLKPTAVPVSIKQYPMSLEAHMGIRQHIIKFLELGVLRPCRSPWNTPLLPVKKPGTQDYRPVQDLREINKRTVDIHPTVPNPYNLLSTLKPDYSWYTVLDLKDAFFCLPLAPQSQELFAFEWKDPERGISGQLTWTRLPQGFKNSPTLFNEALHRDLTDFRTQHPEVTLLQYVDDLLLAAPTKKACTQGTRHLLQELGEKGYRASAKKAQICQTKVTYLGYILSEGKRWLTPGRIETVARIPPPRNPREVREFLGKAGFCRLFIPGFAELAAPLYALTKPSTPFTWQTEHQLAFEALKKALLSAPALGLPDTSKPFTLFLDERQGIAKGVLTQKLGPWKRPVAYLSKKLDPVAAGWPPCLRIMAATAMLVKDSAKLTLGQPLTVITPHTLEAIVRQPPDRWITNARLTHYQALLLDTDRVQFGPPVTLNPATLLPVPENQPSPHDCRQVLAETHGTREDLKDQELPDADHTWYTDGSSYLDSGTRRAGAAVVDGHNTIWAQSLPPGTSAQKAELIALTKALELSKGKKANIYTDSRYAFATAHTHGSIYERRGWLTSEGKEIKNKAEIIALLKALFLPQEVAIIHCPGHQKGQDPVAVGNRQADRVARQAAMAEVLTLATEPDNTSHITAGKRTADGSEFEKRTADGSEFESPKKKAKVE

SEQ ID NO: 1994 - protein, 2103 aa, synthetic construct
MPAAKRVKLDGGDKKYSIGLDIGTNSVGWAVITDEYKVPSKKFKVLGNTDRHSIKKNLIGALLFDSGETAEATRLKRTARRRYTRRKNRICYLQEIFSNEMAKVDDSFFHRLEESFLVEEDKKHERHPIFGNIVDEVAYHEKYPTIYHLRKKLVDSTDKADLRLIYLALAHMIKFRGHFLIEGDLNPDNSDVDKLFIQLVQTYNQLFEENPINASGVDAKAILSARLSKSRRLENLIAQLPGEKKNGLFGNLIALSLGLTPNFKSNFDLAEDAKLQLSKDTYDDDLDNLLAQIGDQYADLFLAAKNLSDAILLSDILRVNTEITKAPLSASMIKRYDEHHQDLTLLKALVRQQLPEKYKEIFFDQSKNGYAGYIDGGASQEEFYKFIKPILEKMDGTEELLVKLNREDLLRKQRTFDNGSIPHQIHLGELHAILRRQEDFYPFLKDNREKIEKILTFRIPYYVGPLARGNSRFAWMTRKSEETITPWNFEEVVDKGASAQSFIERMTNFDKNLPNEKVLPKHSLLYEYFTVYNELTKVKYVTEGMRKPAFLSGEQKKAIVDLLFKTNRKVTVKQLKEDYFKKIECFDSVEISGVEDRFNASLGTYHDLLKIIKDKDFLDNEENEDILEDIVLTLTLFEDREMIEERLKTYAHLFDDKVMKQLKRRRYTGWGRLSRKLINGIRDKQSGKTILDFLKSDGFANRNFMQLIHDDSLTFKEDIQKAQVSGQGDSLHEHIANLAGSPAIKKGILQTVKVVDELVKVMGRHKPENIVIEMARENQTTQKGQKNSRERMKRIEEGIKELGSQILKEHPVENTQLQNEKLYLYYLQNGRDMYVDQELDINRLSDYDVDHIVPQSFLKDDSIDNKVLTRSDKARGKSDNVPSEEVVKKMKNYWRQLLNAKLITQRKFDNLTKAERGGLSELDKAGFIKRQLVETRQITKHVAQILDSRMNTKYDENDKLIREVKVITLKSKLVSDFRKDFQFYKVREINNYHHAHDAYLNAVVGTALIKKYPKLESEFVYGDYKVYDVRKMIAKSEQEIGKATAKYFFYSNIMNFFKTEITLANGEIRKRPLIETNGETGEIVWDKGRDFATVRKVLSMPQVNIVKKTEVQTGGFSKESILPKRNSDKLIARKKDWDPKKYGGFDSPTVAYSVLVVAKVEKGKSKKLKSVKELLGITIMERSSFEKNPIDFLEAKGYKEVKKDLIIKLPKYSLFELENGRKRMLASAGELQKGNELALPSKYVNFLYLASHYEKLKGSPEDNEQKQLFVEQHKHYLDEIIEQISEFSKRVILADANLDKVLSAYNKHRDKPIREQAENIIHLFTLTNLGAPAAFKYFDTTIDRKRYTSTKEVLDATLIHQSITGLYETRIDLSQLGGDGGGSSGSSGSSGSSGGTVSLQDEHRLFDIPVTTSLPDVWLQDFPQAWAETGGLGRAKCQAPIIIDLKPTAVPVSIKQYPMSLEAHMGIRQHIIKFLELGVLRPCRSPWNTPLLPVKKPGTQDYRPVQDLREINKRTVDIHPTVPNPYNLLSTLKPDYSWYTVLDLKDAFFCLPLAPQSQELFAFEWKDPERGISGQLTWTRLPQGFKNSPTLFNEALHRDLTDFRTQHPEVTLLQYVDDLLLAAPTKKACTQGTRHLLQELGEKGYRASAKKAQICQTKVTYLGYILSEGKRWLTPGRIETVARIPPPRNPREVREFLGKAGFCRLFIPGFAELAAPLYALTKPSTPFTWQTEHQLAFEALKKALLSAPALGLPDTSKPFTLFLDERQGIAKGVLTQKLGPWKRPVAYLSKKLDPVAAGWPPCLRIMAATAMLVKDSAKLTLGQPLTVITPHTLEAIVRQPPDRWITNARLTHYQALLLDTDRVQFGPPVTLNPATLLPVPENQPSPHDCRQVLAETHGTREDLKDQELPDADHTWYTDGSSYLDSGTRRAGAAVVDGHNTIWAQSLPPGTSAQKAELIALTKALELSKGKKANIYTDSRYAFATAHTHGSIYERRGWLTSEGKEIKNKAEIIALLKALFLPQEVAIIHCPGHQKGQDPVAVGNRQADRVARQAAMAEVLTLATEPDNTSHITAGKRTADGSEFEKRTADGSEFESPKKKAKVE

SEQ ID NO: 1995 - protein, 2099 aa, synthetic construct
MPAAKRVKLDGGDKKYSIGLDIGTNSVGWAVITDEYKVPSKKFKVLGNTDRHSIKKNLIGALLFDSGETAEATRLKRTARRRYTRRKNRICYLQEIFSNEMAKVDDSFFHRLEESFLVEEDKKHERHPIFGNIVDEVAYHEKYPTIYHLRKKLVDSTDKADLRLIYLALAHMIKFRGHFLIEGDLNPDNSDVDKLFIQLVQTYNQLFEENPINASGVDAKAILSARLSKSRRLENLIAQLPGEKKNGLFGNLIALSLGLTPNFKSNFDLAEDAKLQLSKDTYDDDLDNLLAQIGDQYADLFLAAKNLSDAILLSDILRVNTEITKAPLSASMIKRYDEHHQDLTLLKALVRQQLPEKYKEIFFDQSKNGYAGYIDGGASQEEFYKFIKPILEKMDGTEELLVKLNREDLLRKQRTFDNGSIPHQIHLGELHAILRRQEDFYPFLKDNREKIEKILTFRIPYYVGPLARGNSRFAWMTRKSEETITPWNFEEVVDKGASAQSFIERMTNFDKNLPNEKVLPKHSLLYEYFTVYNELTKVKYVTEGMRKPAFLSGEQKKAIVDLLFKTNRKVTVKQLKEDYFKKIECFDSVEISGVEDRFNASLGTYHDLLKIIKDKDFLDNEENEDILEDIVLTLTLFEDREMIEERLKTYAHLFDDKVMKQLKRRRYTGWGRLSRKLINGIRDKQSGKTILDFLKSDGFANRNFMQLIHDDSLTFKEDIQKAQVSGQGDSLHEHIANLAGSPAIKKGILQTVKVVDELVKVMGRHKPENIVIEMARENQTTQKGQKNSRERMKRIEEGIKELGSQILKEHPVENTQLQNEKLYLYYLQNGRDMYVDQELDINRLSDYDVDHIVPQSFLKDDSIDNKVLTRSDKARGKSDNVPSEEVVKKMKNYWRQLLNAKLITQRKFDNLTKAERGGLSELDKAGFIKRQLVETRQITKHVAQILDSRMNTKYDENDKLIREVKVITLKSKLVSDFRKDFQFYKVREINNYHHAHDAYLNAVVGTALIKKYPKLESEFVYGDYKVYDVRKMIAKSEQEIGKATAKYFFYSNIMNFFKTEITLANGEIRKRPLIETNGETGEIVWDKGRDFATVRKVLSMPQVNIVKKTEVQTGGFSKESILPKRNSDKLIARKKDWDPKKYGGFDSPTVAYSVLVVAKVEKGKSKKLKSVKELLGITIMERSSFEKNPIDFLEAKGYKEVKKDLIIKLPKYSLFELENGRKRMLASAGELQKGNELALPSKYVNFLYLASHYEKLKGSPEDNEQKQLFVEQHKHYLDEIIEQISEFSKRVILADANLDKVLSAYNKHRDKPIREQAENIIHLFTLTNLGAPAAFKYFDTTIDRKRYTSTKEVLDATLIHQSITGLYETRIDLSQLGGDGGPAPEAAAKGGTVSLQDEHRLFDIPVTTSLPDVWLQDFPQAWAETGGLGRAKCQAPIIIDLKPTAVPVSIKQYPMSLEAHMGIRQHIIKFLELGVLRPCRSPWNTPLLPVKKPGTQDYRPVQDLREINKRTVDIHPTVPNPYNLLSTLKPDYSWYTVLDLKDAFFCLPLAPQSQELFAFEWKDPERGISGQLTWTRLPQGFKNSPTLFNEALHRDLTDFRTQHPEVTLLQYVDDLLLAAPTKKACTQGTRHLLQELGEKGYRASAKKAQICQTKVTYLGYILSEGKRWLTPGRIETVARIPPPRNPREVREFLGKAGFCRLFIPGFAELAAPLYALTKPSTPFTWQTEHQLAFEALKKALLSAPALGLPDTSKPFTLFLDERQGIAKGVLTQKLGPWKRPVAYLSKKLDPVAAGWPPCLRIMAATAMLVKDSAKLTLGQPLTVITPHTLEAIVRQPPDRWITNARLTHYQALLLDTDRVQFGPPVTLNPATLLPVPENQPSPHDCRQVLAETHGTREDLKDQELPDADHTWYTDGSSYLDSGTRRAGAAVVDGHNTIWAQSLPPGTSAQKAELIALTKALELSKGKKANIYTDSRYAFATAHTHGSIYERRGWLTSEGKEIKNKAEIIALLKALFLPQEVAIIHCPGHQKGQDPVAVGNRQADRVARQAAMAEVLTLATEPDNTSHITAGKRTADGSEFEKRTADGSEFESPKKKAKVE

SEQ ID NO: 1996 - protein, 2097 aa, synthetic construct
MPAAKRVKLDGGDKKYSIGLDIGTNSVGWAVITDEYKVPSKKFKVLGNTDRHSIKKNLIGALLFDSGETAEATRLKRTARRRYTRRKNRICYLQEIFSNEMAKVDDSFFHRLEESFLVEEDKKHERHPIFGNIVDEVAYHEKYPTIYHLRKKLVDSTDKADLRLIYLALAHMIKFRGHFLIEGDLNPDNSDVDKLFIQLVQTYNQLFEENPINASGVDAKAILSARLSKSRRLENLIAQLPGEKKNGLFGNLIALSLGLTPNFKSNFDLAEDAKLQLSKDTYDDDLDNLLAQIGDQYADLFLAAKNLSDAILLSDILRVNTEITKAPLSASMIKRYDEHHQDLTLLKALVRQQLPEKYKEIFFDQSKNGYAGYIDGGASQEEFYKFIKPILEKMDGTEELLVKLNREDLLRKQRTFDNGSIPHQIHLGELHAILRRQEDFYPFLKDNREKIEKILTFRIPYYVGPLARGNSRFAWMTRKSEETITPWNFEEVVDKGASAQSFIERMTNFDKNLPNEKVLPKHSLLYEYFTVYNELTKVKYVTEGMRKPAFLSGEQKKAIVDLLFKTNRKVTVKQLKEDYFKKIECFDSVEISGVEDRFNASLGTYHDLLKIIKDKDFLDNEENEDILEDIVLTLTLFEDREMIEERLKTYAHLFDDKVMKQLKRRRYTGWGRLSRKLINGIRDKQSGKTILDFLKSDGFANRNFMQLIHDDSLTFKEDIQKAQVSGQGDSLHEHIANLAGSPAIKKGILQTVKVVDELVKVMGRHKPENIVIEMARENQTTQKGQKNSRERMKRIEEGIKELGSQILKEHPVENTQLQNEKLYLYYLQNGRDMYVDQELDINRLSDYDVDHIVPQSFLKDDSIDNKVLTRSDKARGKSDNVPSEEVVKKMKNYWRQLLNAKLITQRKFDNLTKAERGGLSELDKAGFIKRQLVETRQITKHVAQILDSRMNTKYDENDKLIREVKVITLKSKLVSDFRKDFQFYKVREINNYHHAHDAYLNAVVGTALIKKYPKLESEFVYGDYKVYDVRKMIAKSEQEIGKATAKYFFYSNIMNFFKTEITLANGEIRKRPLIETNGETGEIVWDKGRDFATVRKVLSMPQVNIVKKTEVQTGGFSKESILPKRNSDKLIARKKDWDPKKYGGFDSPTVAYSVLVVAKVEKGKSKKLKSVKELLGITIMERSSFEKNPIDFLEAKGYKEVKKDLIIKLPKYSLFELENGRKRMLASAGELQKGNELALPSKYVNFLYLASHYEKLKGSPEDNEQKQLFVEQHKHYLDEIIEQISEFSKRVILADANLDKVLSAYNKHRDKPIREQAENIIHLFTLTNLGAPAAFKYFDTTIDRKRYTSTKEVLDATLIHQSITGLYETRIDLSQLGGDGGGGGPAPGGTVSLQDEHRLFDIPVTTSLPDVWLQDFPQAWAETGGLGRAKCQAPIIIDLKPTAVPVSIKQYPMSLEAHMGIRQHIIKFLELGVLRPCRSPWNTPLLPVKKPGTQDYRPVQDLREINKRTVDIHPTVPNPYNLLSTLKPDYSWYTVLDLKDAFFCLPLAPQSQELFAFEWKDPERGISGQLTWTRLPQGFKNSPTLFNEALHRDLTDFRTQHPEVTLLQYVDDLLLAAPTKKACTQGTRHLLQELGEKGYRASAKKAQICQTKVTYLGYILSEGKRWLTPGRIETVARIPPPRNPREVREFLGKAGFCRLFIPGFAELAAPLYALTKPSTPFTWQTEHQLAFEALKKALLSAPALGLPDTSKPFTLFLDERQGIAKGVLTQKLGPWKRPVAYLSKKLDPVAAGWPPCLRIMAATAMLVKDSAKLTLGQPLTVITPHTLEAIVRQPPDRWITNARLTHYQALLLDTDRVQFGPPVTLNPATLLPVPENQPSPHDCRQVLAETHGTREDLKDQELPDADHTWYTDGSSYLDSGTRRAGAAVVDGHNTIWAQSLPPGTSAQKAELIALTKALELSKGKKANIYTDSRYAFATAHTHGSIYERRGWLTSEGKEIKNKAEIIALLKALFLPQEVAIIHCPGHQKGQDPVAVGNRQADRVARQAAMAEVLTLATEPDNTSHITAGKRTADGSEFEKRTADGSEFESPKKKAKVE

SEQ ID NO: 1997 - protein, 2099 aa, synthetic construct
MPAAKRVKLDGGDKKYSIGLDIGTNSVGWAVITDEYKVPSKKFKVLGNTDRHSIKKNLIGALLFDSGETAEATRLKRTARRRYTRRKNRICYLQEIFSNEMAKVDDSFFHRLEESFLVEEDKKHERHPIFGNIVDEVAYHEKYPTIYHLRKKLVDSTDKADLRLIYLALAHMIKFRGHFLIEGDLNPDNSDVDKLFIQLVQTYNQLFEENPINASGVDAKAILSARLSKSRRLENLIAQLPGEKKNGLFGNLIALSLGLTPNFKSNFDLAEDAKLQLSKDTYDDDLDNLLAQIGDQYADLFLAAKNLSDAILLSDILRVNTEITKAPLSASMIKRYDEHHQDLTLLKALVRQQLPEKYKEIFFDQSKNGYAGYIDGGASQEEFYKFIKPILEKMDGTEELLVKLNREDLLRKQRTFDNGSIPHQIHLGELHAILRRQEDFYPFLKDNREKIEKILTFRIPYYVGPLARGNSRFAWMTRKSEETITPWNFEEVVDKGASAQSFIERMTNFDKNLPNEKVLPKHSLLYEYFTVYNELTKVKYVTEGMRKPAFLSGEQKKAIVDLLFKTNRKVTVKQLKEDYFKKIECFDSVEISGVEDRFNASLGTYHDLLKIIKDKDFLDNEENEDILEDIVLTLTLFEDREMIEERLKTYAHLFDDKVMKQLKRRRYTGWGRLSRKLINGIRDKQSGKTILDFLKSDGFANRNFMQLIHDDSLTFKEDIQKAQVSGQGDSLHEHIANLAGSPAIKKGILQTVKVVDELVKVMGRHKPENIVIEMARENQTTQKGQKNSRERMKRIEEGIKELGSQILKEHPVENTQLQNEKLYLYYLQNGRDMYVDQELDINRLSDYDVDHIVPQSFLKDDSIDNKVLTRSDKARGKSDNVPSEEVVKKMKNYWRQLLNAKLITQRKFDNLTKAERGGLSELDKAGFIKRQLVETRQITKHVAQILDSRMNTKYDENDKLIREVKVITLKSKLVSDFRKDFQFYKVREINNYHHAHDAYLNAVVGTALIKKYPKLESEFVYGDYKVYDVRKMIAKSEQEIGKATAKYFFYSNIMNFFKTEITLANGEIRKRPLIETNGETGEIVWDKGRDFATVRKVLSMPQVNIVKKTEVQTGGFSKESILPKRNSDKLIARKKDWDPKKYGGFDSPTVAYSVLVVAKVEKGKSKKLKSVKELLGITIMERSSFEKNPIDFLEAKGYKEVKKDLIIKLPKYSLFELENGRKRMLASAGELQKGNELALPSKYVNFLYLASHYEKLKGSPEDNEQKQLFVEQHKHYLDEIIEQISEFSKRVILADANLDKVLSAYNKHRDKPIREQAENIIHLFTLTNLGAPAAFKYFDTTIDRKRYTSTKEVLDATLIHQSITGLYETRIDLSQLGGDGGGGSEAAAKGGTVSLQDEHRLFDIPVTTSLPDVWLQDFPQAWAETGGLGRAKCQAPIIIDLKPTAVPVSIKQYPMSLEAHMGIRQHIIKFLELGVLRPCRSPWNTPLLPVKKPGTQDYRPVQDLREINKRTVDIHPTVPNPYNLLSTLKPDYSWYTVLDLKDAFFCLPLAPQSQELFAFEWKDPERGISGQLTWTRLPQGFKNSPTLFNEALHRDLTDFRTQHPEVTLLQYVDDLLLAAPTKKACTQGTRHLLQELGEKGYRASAKKAQICQTKVTYLGYILSEGKRWLTPGRIETVARIPPPRNPREVREFLGKAGFCRLFIPGFAELAAPLYALTKPSTPFTWQTEHQLAFEALKKALLSAPALGLPDTSKPFTLFLDERQGIAKGVLTQKLGPWKRPVAYLSKKLDPVAAGWPPCLRIMAATAMLVKDSAKLTLGQPLTVITPHTLEAIVRQPPDRWITNARLTHYQALLLDTDRVQFGPPVTLNPATLLPVPENQPSPHDCRQVLAETHGTREDLKDQELPDADHTWYTDGSSYLDSGTRRAGAAVVDGHNTIWAQSLPPGTSAQKAELIALTKALELSKGKKANIYTDSRYAFATAHTHGSIYERRGWLTSEGKEIKNKAEIIALLKALFLPQEVAIIHCPGHQKGQDPVAVGNRQADRVARQAAMAEVLTLATEPDNTSHITAGKRTADGSEFEKRTADGSEFESPKKKAKVE

SEQ ID NO: 1998 - protein, 2096 aa, synthetic construct
MPAAKRVKLDGGDKKYSIGLDIGTNSVGWAVITDEYKVPSKKFKVLGNTDRHSIKKNLIGALLFDSGETAEATRLKRTARRRYTRRKNRICYLQEIFSNEMAKVDDSFFHRLEESFLVEEDKKHERHPIFGNIVDEVAYHEKYPTIYHLRKKLVDSTDKADLRLIYLALAHMIKFRGHFLIEGDLNPDNSDVDKLFIQLVQTYNQLFEENPINASGVDAKAILSARLSKSRRLENLIAQLPGEKKNGLFGNLIALSLGLTPNFKSNFDLAEDAKLQLSKDTYDDDLDNLLAQIGDQYADLFLAAKNLSDAILLSDILRVNTEITKAPLSASMIKRYDEHHQDLTLLKALVRQQLPEKYKEIFFDQSKNGYAGYIDGGASQEEFYKFIKPILEKMDGTEELLVKLNREDLLRKQRTFDNGSIPHQIHLGELHAILRRQEDFYPFLKDNREKIEKILTFRIPYYVGPLARGNSRFAWMTRKSEETITPWNFEEVVDKGASAQSFIERMTNFDKNLPNEKVLPKHSLLYEYFTVYNELTKVKYVTEGMRKPAFLSGEQKKAIVDLLFKTNRKVTVKQLKEDYFKKIECFDSVEISGVEDRFNASLGTYHDLLKIIKDKDFLDNEENEDILEDIVLTLTLFEDREMIEERLKTYAHLFDDKVMKQLKRRRYTGWGRLSRKLINGIRDKQSGKTILDFLKSDGFANRNFMQLIHDDSLTFKEDIQKAQVSGQGDSLHEHIANLAGSPAIKKGILQTVKVVDELVKVMGRHKPENIVIEMARENQTTQKGQKNSRERMKRIEEGIKELGSQILKEHPVENTQLQNEKLYLYYLQNGRDMYVDQELDINRLSDYDVDHIVPQSFLKDDSIDNKVLTRSDKARGKSDNVPSEEVVKKMKNYWRQLLNAKLITQRKFDNLTKAERGGLSELDKAGFIKRQLVETRQITKHVAQILDSRMNTKYDENDKLIREVKVITLKSKLVSDFRKDFQFYKVREINNYHHAHDAYLNAVVGTALIKKYPKLESEFVYGDYKVYDVRKMIAKSEQEIGKATAKYFFYSNIMNFFKTEITLANGEIRKRPLIETNGETGEIVWDKGRDFATVRKVLSMPQVNIVKKTEVQTGGFSKESILPKRNSDKLIARKKDWDPKKYGGFDSPTVAYSVLVVAKVEKGKSKKLKSVKELLGITIMERSSFEKNPIDFLEAKGYKEVKKDLIIKLPKYSLFELENGRKRMLASAGELQKGNELALPSKYVNFLYLASHYEKLKGSPEDNEQKQLFVEQHKHYLDEIIEQISEFSKRVILADANLDKVLSAYNKHRDKPIREQAENIIHLFTLTNLGAPAAFKYFDTTIDRKRYTSTKEVLDATLIHQSITGLYETRIDLSQLGGDGGGGGGGGGTVSLQDEHRLFDIPVTTSLPDVWLQDFPQAWAETGGLGRAKCQAPIIIDLKPTAVPVSIKQYPMSLEAHMGIRQHIIKFLELGVLRPCRSPWNTPLLPVKKPGTQDYRPVQDLREINKRTVDIHPTVPNPYNLLSTLKPDYSWYTVLDLKDAFFCLPLAPQSQELFAFEWKDPERGISGQLTWTRLPQGFKNSPTLFNEALHRDLTDFRTQHPEVTLLQYVDDLLLAAPTKKACTQGTRHLLQELGEKGYRASAKKAQICQTKVTYLGYILSEGKRWLTPGRIETVARIPPPRNPREVREFLGKAGFCRLFIPGFAELAAPLYALTKPSTPFTWQTEHQLAFEALKKALLSAPALGLPDTSKPFTLFLDERQGIAKGVLTQKLGPWKRPVAYLSKKLDPVAAGWPPCLRIMAATAMLVKDSAKLTLGQPLTVITPHTLEAIVRQPPDRWITNARLTHYQALLLDTDRVQFGPPVTLNPATLLPVPENQPSPHDCRQVLAETHGTREDLKDQELPDADHTWYTDGSSYLDSGTRRAGAAVVDGHNTIWAQSLPPGTSAQKAELIALTKALELSKGKKANIYTDSRYAFATAHTHGSIYERRGWLTSEGKEIKNKAEIIALLKALFLPQEVAIIHCPGHQKGQDPVAVGNRQADRVARQAAMAEVLTLATEPDNTSHITAGKRTADGSEFEKRTADGSEFESPKKKAKVE

SEQ ID NO: 1999 - protein, 2094 aa, synthetic construct
MPAAKRVKLDGGDKKYSIGLDIGTNSVGWAVITDEYKVPSKKFKVLGNTDRHSIKKNLIGALLFDSGETAEATRLKRTARRRYTRRKNRICYLQEIFSNEMAKVDDSFFHRLEESFLVEEDKKHERHPIFGNIVDEVAYHEKYPTIYHLRKKLVDSTDKADLRLIYLALAHMIKFRGHFLIEGDLNPDNSDVDKLFIQLVQTYNQLFEENPINASGVDAKAILSARLSKSRRLENLIAQLPGEKKNGLFGNLIALSLGLTPNFKSNFDLAEDAKLQLSKDTYDDDLDNLLAQIGDQYADLFLAAKNLSDAILLSDILRVNTEITKAPLSASMIKRYDEHHQDLTLLKALVRQQLPEKYKEIFFDQSKNGYAGYIDGGASQEEFYKFIKPILEKMDGTEELLVKLNREDLLRKQRTFDNGSIPHQIHLGELHAILRRQEDFYPFLKDNREKIEKILTFRIPYYVGPLARGNSRFAWMTRKSEETITPWNFEEVVDKGASAQSFIERMTNFDKNLPNEKVLPKHSLLYEYFTVYNELTKVKYVTEGMRKPAFLSGEQKKAIVDLLFKTNRKVTVKQLKEDYFKKIECFDSVEISGVEDRFNASLGTYHDLLKIIKDKDFLDNEENEDILEDIVLTLTLFEDREMIEERLKTYAHLFDDKVMKQLKRRRYTGWGRLSRKLINGIRDKQSGKTILDFLKSDGFANRNFMQLIHDDSLTFKEDIQKAQVSGQGDSLHEHIANLAGSPAIKKGILQTVKVVDELVKVMGRHKPENIVIEMARENQTTQKGQKNSRERMKRIEEGIKELGSQILKEHPVENTQLQNEKLYLYYLQNGRDMYVDQELDINRLSDYDVDHIVPQSFLKDDSIDNKVLTRSDKARGKSDNVPSEEVVKKMKNYWRQLLNAKLITQRKFDNLTKAERGGLSELDKAGFIKRQLVETRQITKHVAQILDSRMNTKYDENDKLIREVKVITLKSKLVSDFRKDFQFYKVREINNYHHAHDAYLNAVVGTALIKKYPKLESEFVYGDYKVYDVRKMIAKSEQEIGKATAKYFFYSNIMNFFKTEITLANGEIRKRPLIETNGETGEIVWDKGRDFATVRKVLSMPQVNIVKKTEVQTGGFSKESILPKRNSDKLIARKKDWDPKKYGGFDSPTVAYSVLVVAKVEKGKSKKLKSVKELLGITIMERSSFEKNPIDFLEAKGYKEVKKDLIIKLPKYSLFELENGRKRMLASAGELQKGNELALPSKYVNFLYLASHYEKLKGSPEDNEQKQLFVEQHKHYLDEIIEQISEFSKRVILADANLDKVLSAYNKHRDKPIREQAENIIHLFTLTNLGAPAAFKYFDTTIDRKRYTSTKEVLDATLIHQSITGLYETRIDLSQLGGDGGGGSGGTVSLQDEHRLFDIPVTTSLPDVWLQDFPQAWAETGGLGRAKCQAPIIIDLKPTAVPVSIKQYPMSLEAHMGIRQHIIKFLELGVLRPCRSPWNTPLLPVKKPGTQDYRPVQDLREINKRTVDIHPTVPNPYNLLSTLKPDYSWYTVLDLKDAFFCLPLAPQSQELFAFEWKDPERGISGQLTWTRLPQGFKNSPTLFNEALHRDLTDFRTQHPEVTLLQYVDDLLLAAPTKKACTQGTRHLLQELGEKGYRASAKKAQICQTKVTYLGYILSEGKRWLTPGRIETVARIPPPRNPREVREFLGKAGFCRLFIPGFAELAAPLYALTKPSTPFTWQTEHQLAFEALKKALLSAPALGLPDTSKPFTLFLDERQGIAKGVLTQKLGPWKRPVAYLSKKLDPVAAGWPPCLRIMAATAMLVKDSAKLTLGQPLTVITPHTLEAIVRQPPDRWITNARLTHYQALLLDTDRVQFGPPVTLNPATLLPVPENQPSPHDCRQVLAETHGTREDLKDQELPDADHTWYTDGSSYLDSGTRRAGAAVVDGHNTIWAQSLPPGTSAQKAELIALTKALELSKGKKANIYTDSRYAFATAHTHGSIYERRGWLTSEGKEIKNKAEIIALLKALFLPQEVAIIHCPGHQKGQDPVAVGNRQADRVARQAAMAEVLTLATEPDNTSHITAGKRTADGSEFEKRTADGSEFESPKKKAKVE

SEQ ID NO: 2000 - protein, 2121 aa, synthetic construct
MPAAKRVKLDGGDKKYSIGLDIGTNSVGWAVITDEYKVPSKKFKVLGNTDRHSIKKNLIGALLFDSGETAEATRLKRTARRRYTRRKNRICYLQEIFSNEMAKVDDSFFHRLEESFLVEEDKKHERHPIFGNIVDEVAYHEKYPTIYHLRKKLVDSTDKADLRLIYLALAHMIKFRGHFLIEGDLNPDNSDVDKLFIQLVQTYNQLFEENPINASGVDAKAILSARLSKSRRLENLIAQLPGEKKNGLFGNLIALSLGLTPNFKSNFDLAEDAKLQLSKDTYDDDLDNLLAQIGDQYADLFLAAKNLSDAILLSDILRVNTEITKAPLSASMIKRYDEHHQDLTLLKALVRQQLPEKYKEIFFDQSKNGYAGYIDGGASQEEFYKFIKPILEKMDGTEELLVKLNREDLLRKQRTFDNGSIPHQIHLGELHAILRRQEDFYPFLKDNREKIEKILTFRIPYYVGPLARGNSRFAWMTRKSEETITPWNFEEVVDKGASAQSFIERMTNFDKNLPNEKVLPKHSLLYEYFTVYNELTKVKYVTEGMRKPAFLSGEQKKAIVDLLFKTNRKVTVKQLKEDYFKKIECFDSVEISGVEDRFNASLGTYHDLLKIIKDKDFLDNEENEDILEDIVLTLTLFEDREMIEERLKTYAHLFDDKVMKQLKRRRYTGWGRLSRKLINGIRDKQSGKTILDFLKSDGFANRNFMQLIHDDSLTFKEDIQKAQVSGQGDSLHEHIANLAGSPAIKKGILQTVKVVDELVKVMGRHKPENIVIEMARENQTTQKGQKNSRERMKRIEEGIKELGSQILKEHPVENTQLQNEKLYLYYLQNGRDMYVDQELDINRLSDYDVDHIVPQSFLKDDSIDNKVLTRSDKARGKSDNVPSEEVVKKMKNYWRQLLNAKLITQRKFDNLTKAERGGLSELDKAGFIKRQLVETRQITKHVAQILDSRMNTKYDENDKLIREVKVITLKSKLVSDFRKDFQFYKVREINNYHHAHDAYLNAVVGTALIKKYPKLESEFVYGDYKVYDVRKMIAKSEQEIGKATAKYFFYSNIMNFFKTEITLANGEIRKRPLIETNGETGEIVWDKGRDFATVRKVLSMPQVNIVKKTEVQTGGFSKESILPKRNSDKLIARKKDWDPKKYGGFDSPTVAYSVLVVAKVEKGKSKKLKSVKELLGITIMERSSFEKNPIDFLEAKGYKEVKKDLIIKLPKYSLFELENGRKRMLASAGELQKGNELALPSKYVNFLYLASHYEKLKGSPEDNEQKQLFVEQHKHYLDEIIEQISEFSKRVILADANLDKVLSAYNKHRDKPIREQAENIIHLFTLTNLGAPAAFKYFDTTIDRKRYTSTKEVLDATLIHQSITGLYETRIDLSQLGGDGGEAAAKEAAAKEAAAKEAAAKEAAAKEAAAKGGTVSLQDEHRLFDIPVTTSLPDVWLQDFPQAWAETGGLGRAKCQAPIIIDLKPTAVPVSIKQYPMSLEAHMGIRQHIIKFLELGVLRPCRSPWNTPLLPVKKPGTQDYRPVQDLREINKRTVDIHPTVPNPYNLLSTLKPDYSWYTVLDLKDAFFCLPLAPQSQELFAFEWKDPERGISGQLTWTRLPQGFKNSPTLFNEALHRDLTDFRTQHPEVTLLQYVDDLLLAAPTKKACTQGTRHLLQELGEKGYRASAKKAQICQTKVTYLGYILSEGKRWLTPGRIETVARIPPPRNPREVREFLGKAGFCRLFIPGFAELAAPLYALTKPSTPFTWQTEHQLAFEALKKALLSAPALGLPDTSKPFTLFLDERQGIAKGVLTQKLGPWKRPVAYLSKKLDPVAAGWPPCLRIMAATAMLVKDSAKLTLGQPLTVITPHTLEAIVRQPPDRWITNARLTHYQALLLDTDRVQFGPPVTLNPATLLPVPENQPSPHDCRQVLAETHGTREDLKDQELPDADHTWYTDGSSYLDSGTRRAGAAVVDGHNTIWAQSLPPGTSAQKAELIALTKALELSKGKKANIYTDSRYAFATAHTHGSIYERRGWLTSEGKEIKNKAEIIALLKALFLPQEVAIIHCPGHQKGQDPVAVGNRQADRVARQAAMAEVLTLATEPDNTSHITAGKRTADGSEFEKRTADGSEFESPKKKAKVE

SEQ ID NO: 2001 - protein, 2102 aa, synthetic construct
MPAAKRVKLDGGDKKYSIGLDIGTNSVGWAVITDEYKVPSKKFKVLGNTDRHSIKKNLIGALLFDSGETAEATRLKRTARRRYTRRKNRICYLQEIFSNEMAKVDDSFFHRLEESFLVEEDKKHERHPIFGNIVDEVAYHEKYPTIYHLRKKLVDSTDKADLRLIYLALAHMIKFRGHFLIEGDLNPDNSDVDKLFIQLVQTYNQLFEENPINASGVDAKAILSARLSKSRRLENLIAQLPGEKKNGLFGNLIALSLGLTPNFKSNFDLAEDAKLQLSKDTYDDDLDNLLAQIGDQYADLFLAAKNLSDAILLSDILRVNTEITKAPLSASMIKRYDEHHQDLTLLKALVRQQLPEKYKEIFFDQSKNGYAGYIDGGASQEEFYKFIKPILEKMDGTEELLVKLNREDLLRKQRTFDNGSIPHQIHLGELHAILRRQEDFYPFLKDNREKIEKILTFRIPYYVGPLARGNSRFAWMTRKSEETITPWNFEEVVDKGASAQSFIERMTNFDKNLPNEKVLPKHSLLYEYFTVYNELTKVKYVTEGMRKPAFLSGEQKKAIVDLLFKTNRKVTVKQLKEDYFKKIECFDSVEISGVEDRFNASLGTYHDLLKIIKDKDFLDNEENEDILEDIVLTLTLFEDREMIEERLKTYAHLFDDKVMKQLKRRRYTGWGRLSRKLINGIRDKQSGKTILDFLKSDGFANRNFMQLIHDDSLTFKEDIQKAQVSGQGDSLHEHIANLAGSPAIKKGILQTVKVVDELVKVMGRHKPENIVIEMARENQTTQKGQKNSRERMKRIEEGIKELGSQILKEHPVENTQLQNEKLYLYYLQNGRDMYVDQELDINRLSDYDVDHIVPQSFLKDDSIDNKVLTRSDKARGKSDNVPSEEVVKKMKNYWRQLLNAKLITQRKFDNLTKAERGGLSELDKAGFIKRQLVETRQITKHVAQILDSRMNTKYDENDKLIREVKVITLKSKLVSDFRKDFQFYKVREINNYHHAHDAYLNAVVGTALIKKYPKLESEFVYGDYKVYDVRKMIAKSEQEIGKATAKYFFYSNIMNFFKTEITLANGEIRKRPLIETNGETGEIVWDKGRDFATVRKVLSMPQVNIVKKTEVQTGGFSKESILPKRNSDKLIARKKDWDPKKYGGFDSPTVAYSVLVVAKVEKGKSKKLKSVKELLGITIMERSSFEKNPIDFLEAKGYKEVKKDLIIKLPKYSLFELENGRKRMLASAGELQKGNELALPSKYVNFLYLASHYEKLKGSPEDNEQKQLFVEQHKHYLDEIIEQISEFSKRVILADANLDKVLSAYNKHRDKPIREQAENIIHLFTLTNLGAPAAFKYFDTTIDRKRYTSTKEVLDATLIHQSITGLYETRIDLSQLGGDGGEAAAKGGSGSSGGTVSLQDEHRLFDIPVTTSLPDVWLQDFPQAWAETGGLGRAKCQAPIIIDLKPTAVPVSIKQYPMSLEAHMGIRQHIIKFLELGVLRPCRSPWNTPLLPVKKPGTQDYRPVQDLREINKRTVDIHPTVPNPYNLLSTLKPDYSWYTVLDLKDAFFCLPLAPQSQELFAFEWKDPERGISGQLTWTRLPQGFKNSPTLFNEALHRDLTDFRTQHPEVTLLQYVDDLLLAAPTKKACTQGTRHLLQELGEKGYRASAKKAQICQTKVTYLGYILSEGKRWLTPGRIETVARIPPPRNPREVREFLGKAGFCRLFIPGFAELAAPLYALTKPSTPFTWQTEHQLAFEALKKALLSAPALGLPDTSKPFTLFLDERQGIAKGVLTQKLGPWKRPVAYLSKKLDPVAAGWPPCLRIMAATAMLVKDSAKLTLGQPLTVITPHTLEAIVRQPPDRWITNARLTHYQALLLDTDRVQFGPPVTLNPATLLPVPENQPSPHDCRQVLAETHGTREDLKDQELPDADHTWYTDGSSYLDSGTRRAGAAVVDGHNTIWAQSLPPGTSAQKAELIALTKALELSKGKKANIYTDSRYAFATAHTHGSIYERRGWLTSEGKEIKNKAEIIALLKALFLPQEVAIIHCPGHQKGQDPVAVGNRQADRVARQAAMAEVLTLATEPDNTSHITAGKRTADGSEFEKRTADGSEFESPKKKAKVE

SEQ ID NO: 2002 - protein, 2100 aa, synthetic construct
MPAAKRVKLDGGDKKYSIGLDIGTNSVGWAVITDEYKVPSKKFKVLGNTDRHSIKKNLIGALLFDSGETAEATRLKRTARRRYTRRKNRICYLQEIFSNEMAKVDDSFFHRLEESFLVEEDKKHERHPIFGNIVDEVAYHEKYPTIYHLRKKLVDSTDKADLRLIYLALAHMIKFRGHFLIEGDLNPDNSDVDKLFIQLVQTYNQLFEENPINASGVDAKAILSARLSKSRRLENLIAQLPGEKKNGLFGNLIALSLGLTPNFKSNFDLAEDAKLQLSKDTYDDDLDNLLAQIGDQYADLFLAAKNLSDAILLSDILRVNTEITKAPLSASMIKRYDEHHQDLTLLKALVRQQLPEKYKEIFFDQSKNGYAGYIDGGASQEEFYKFIKPILEKMDGTEELLVKLNREDLLRKQRTFDNGSIPHQIHLGELHAILRRQEDFYPFLKDNREKIEKILTFRIPYYVGPLARGNSRFAWMTRKSEETITPWNFEEVVDKGASAQSFIERMTNFDKNLPNEKVLPKHSLLYEYFTVYNELTKVKYVTEGMRKPAFLSGEQKKAIVDLLFKTNRKVTVKQLKEDYFKKIECFDSVEISGVEDRFNASLGTYHDLLKIIKDKDFLDNEENEDILEDIVLTLTLFEDREMIEERLKTYAHLFDDKVMKQLKRRRYTGWGRLSRKLINGIRDKQSGKTILDFLKSDGFANRNFMQLIHDDSLTFKEDIQKAQVSGQGDSLHEHIANLAGSPAIKKGILQTVKVVDELVKVMGRHKPENIVIEMARENQTTQKGQKNSRERMKRIEEGIKELGSQILKEHPVENTQLQNEKLYLYYLQNGRDMYVDQELDINRLSDYDVDHIVPQSFLKDDSIDNKVLTRSDKARGKSDNVPSEEVVKKMKNYWRQLLNAKLITQRKFDNLTKAERGGLSELDKAGFIKRQLVETRQITKHVAQILDSRMNTKYDENDKLIREVKVITLKSKLVSDFRKDFQFYKVREINNYHHAHDAYLNAVVGTALIKKYPKLESEFVYGDYKVYDVRKMIAKSEQEIGKATAKYFFYSNIMNFFKTEITLANGEIRKRPLIETNGETGEIVWDKGRDFATVRKVLSMPQVNIVKKTEVQTGGFSKESILPKRNSDKLIARKKDWDPKKYGGFDSPTVAYSVLVVAKVEKGKSKKLKSVKELLGITIMERSSFEKNPIDFLEAKGYKEVKKDLIIKLPKYSLFELENGRKRMLASAGELQKGNELALPSKYVNFLYLASHYEKLKGSPEDNEQKQLFVEQHKHYLDEIIEQISEFSKRVILADANLDKVLSAYNKHRDKPIREQAENIIHLFTLTNLGAPAAFKYFDTTIDRKRYTSTKEVLDATLIHQSITGLYETRIDLSQLGGDGGGGGGSSPAPGGTVSLQDEHRLFDIPVTTSLPDVWLQDFPQAWAETGGLGRAKCQAPIIIDLKPTAVPVSIKQYPMSLEAHMGIRQHIIKFLELGVLRPCRSPWNTPLLPVKKPGTQDYRPVQDLREINKRTVDIHPTVPNPYNLLSTLKPDYSWYTVLDLKDAFFCLPLAPQSQELFAFEWKDPERGISGQLTWTRLPQGFKNSPTLFNEALHRDLTDFRTQHPEVTLLQYVDDLLLAAPTKKACTQGTRHLLQELGEKGYRASAKKAQICQTKVTYLGYILSEGKRWLTPGRIETVARIPPPRNPREVREFLGKAGFCRLFIPGFAELAAPLYALTKPSTPFTWQTEHQLAFEALKKALLSAPALGLPDTSKPFTLFLDERQGIAKGVLTQKLGPWKRPVAYLSKKLDPVAAGWPPCLRIMAATAMLVKDSAKLTLGQPLTVITPHTLEAIVRQPPDRWITNARLTHYQALLLDTDRVQFGPPVTLNPATLLPVPENQPSPHDCRQVLAETHGTREDLKDQELPDADHTWYTDGSSYLDSGTRRAGAAVVDGHNTIWAQSLPPGTSAQKAELIALTKALELSKGKKANIYTDSRYAFATAHTHGSIYERRGWLTSEGKEIKNKAEIIALLKALFLPQEVAIIHCPGHQKGQDPVAVGNRQADRVARQAAMAEVLTLATEPDNTSHITAGKRTADGSEFEKRTADGSEFESPKKKAKVE

SEQ ID NO: 2003 - protein, 2102 aa, synthetic construct
MPAAKRVKLDGGDKKYSIGLDIGTNSVGWAVITDEYKVPSKKFKVLGNTDRHSIKKNLIGALLFDSGETAEATRLKRTARRRYTRRKNRICYLQEIFSNEMAKVDDSFFHRLEESFLVEEDKKHERHPIFGNIVDEVAYHEKYPTIYHLRKKLVDSTDKADLRLIYLALAHMIKFRGHFLIEGDLNPDNSDVDKLFIQLVQTYNQLFEENPINASGVDAKAILSARLSKSRRLENLIAQLPGEKKNGLFGNLIALSLGLTPNFKSNFDLAEDAKLQLSKDTYDDDLDNLLAQIGDQYADLFLAAKNLSDAILLSDILRVNTEITKAPLSASMIKRYDEHHQDLTLLKALVRQQLPEKYKEIFFDQSKNGYAGYIDGGASQEEFYKFIKPILEKMDGTEELLVKLNREDLLRKQRTFDNGSIPHQIHLGELHAILRRQEDFYPFLKDNREKIEKILTFRIPYYVGPLARGNSRFAWMTRKSEETITPWNFEEVVDKGASAQSFIERMTNFDKNLPNEKVLPKHSLLYEYFTVYNELTKVKYVTEGMRKPAFLSGEQKKAIVDLLFKTNRKVTVKQLKEDYFKKIECFDSVEISGVEDRFNASLGTYHDLLKIIKDKDFLDNEENEDILEDIVLTLTLFEDREMIEERLKTYAHLFDDKVMKQLKRRRYTGWGRLSRKLINGIRDKQSGKTILDFLKSDGFANRNFMQLIHDDSLTFKEDIQKAQVSGQGDSLHEHIANLAGSPAIKKGILQTVKVVDELVKVMGRHKPENIVIEMARENQTTQKGQKNSRERMKRIEEGIKELGSQILKEHPVENTQLQNEKLYLYYLQNGRDMYVDQELDINRLSDYDVDHIVPQSFLKDDSIDNKVLTRSDKARGKSDNVPSEEVVKKMKNYWRQLLNAKLITQRKFDNLTKAERGGLSELDKAGFIKRQLVETRQITKHVAQILDSRMNTKYDENDKLIREVKVITLKSKLVSDFRKDFQFYKVREINNYHHAHDAYLNAVVGTALIKKYPKLESEFVYGDYKVYDVRKMIAKSEQEIGKATAKYFFYSNIMNFFKTEITLANGEIRKRPLIETNGETGEIVWDKGRDFATVRKVLSMPQVNIVKKTEVQTGGFSKESILPKRNSDKLIARKKDWDPKKYGGFDSPTVAYSVLVVAKVEKGKSKKLKSVKELLGITIMERSSFEKNPIDFLEAKGYKEVKKDLIIKLPKYSLFELENGRKRMLASAGELQKGNELALPSKYVNFLYLASHYEKLKGSPEDNEQKQLFVEQHKHYLDEIIEQISEFSKRVILADANLDKVLSAYNKHRDKPIREQAENIIHLFTLTNLGAPAAFKYFDTTIDRKRYTSTKEVLDATLIHQSITGLYETRIDLSQLGGDGGGGSGGGEAAAKGGTVSLQDEHRLFDIPVTTSLPDVWLQDFPQAWAETGGLGRAKCQAPIIIDLKPTAVPVSIKQYPMSLEAHMGIRQHIIKFLELGVLRPCRSPWNTPLLPVKKPGTQDYRPVQDLREINKRTVDIHPTVPNPYNLLSTLKPDYSWYTVLDLKDAFFCLPLAPQSQELFAFEWKDPERGISGQLTWTRLPQGFKNSPTLFNEALHRDLTDFRTQHPEVTLLQYVDDLLLAAPTKKACTQGTRHLLQELGEKGYRASAKKAQICQTKVTYLGYILSEGKRWLTPGRIETVARIPPPRNPREVREFLGKAGFCRLFIPGFAELAAPLYALTKPSTPFTWQTEHQLAFEALKKALLSAPALGLPDTSKPFTLFLDERQGIAKGVLTQKLGPWKRPVAYLSKKLDPVAAGWPPCLRIMAATAMLVKDSAKLTLGQPLTVITPHTLEAIVRQPPDRWITNARLTHYQALLLDTDRVQFGPPVTLNPATLLPVPENQPSPHDCRQVLAETHGTREDLKDQELPDADHTWYTDGSSYLDSGTRRAGAAVVDGHNTIWAQSLPPGTSAQKAELIALTKALELSKGKKANIYTDSRYAFATAHTHGSIYERRGWLTSEGKEIKNKAEIIALLKALFLPQEVAIIHCPGHQKGQDPVAVGNRQADRVARQAAMAEVLTLATEPDNTSHITAGKRTADGSEFEKRTADGSEFESPKKKAKVE

SEQ ID NO: 2004 - protein, 2099 aa, synthetic construct
MPAAKRVKLDGGDKKYSIGLDIGTNSVGWAVITDEYKVPSKKFKVLGNTDRHSIKKNLIGALLFDSGETAEATRLKRTARRRYTRRKNRICYLQEIFSNEMAKVDDSFFHRLEESFLVEEDKKHERHPIFGNIVDEVAYHEKYPTIYHLRKKLVDSTDKADLRLIYLALAHMIKFRGHFLIEGDLNPDNSDVDKLFIQLVQTYNQLFEENPINASGVDAKAILSARLSKSRRLENLIAQLPGEKKNGLFGNLIALSLGLTPNFKSNFDLAEDAKLQLSKDTYDDDLDNLLAQIGDQYADLFLAAKNLSDAILLSDILRVNTEITKAPLSASMIKRYDEHHQDLTLLKALVRQQLPEKYKEIFFDQSKNGYAGYIDGGASQEEFYKFIKPILEKMDGTEELLVKLNREDLLRKQRTFDNGSIPHQIHLGELHAILRRQEDFYPFLKDNREKIEKILTFRIPYYVGPLARGNSRFAWMTRKSEETITPWNFEEVVDKGASAQSFIERMTNFDKNLPNEKVLPKHSLLYEYFTVYNELTKVKYVTEGMRKPAFLSGEQKKAIVDLLFKTNRKVTVKQLKEDYFKKIECFDSVEISGVEDRFNASLGTYHDLLKIIKDKDFLDNEENEDILEDIVLTLTLFEDREMIEERLKTYAHLFDDKVMKQLKRRRYTGWGRLSRKLINGIRDKQSGKTILDFLKSDGFANRNFMQLIHDDSLTFKEDIQKAQVSGQGDSLHEHIANLAGSPAIKKGILQTVKVVDELVKVMGRHKPENIVIEMARENQTTQKGQKNSRERMKRIEEGIKELGSQILKEHPVENTQLQNEKLYLYYLQNGRDMYVDQELDINRLSDYDVDHIVPQSFLKDDSIDNKVLTRSDKARGKSDNVPSEEVVKKMKNYWRQLLNAKLITQRKFDNLTKAERGGLSELDKAGFIKRQLVETRQITKHVAQILDSRMNTKYDENDKLIREVKVITLKSKLVSDFRKDFQFYKVREINNYHHAHDAYLNAVVGTALIKKYPKLESEFVYGDYKVYDVRKMIAKSEQEIGKATAKYFFYSNIMNFFKTEITLANGEIRKRPLIETNGETGEIVWDKGRDFATVRKVLSMPQVNIVKKTEVQTGGFSKESILPKRNSDKLIARKKDWDPKKYGGFDSPTVAYSVLVVAKVEKGKSKKLKSVKELLGITIMERSSFEKNPIDFLEAKGYKEVKKDLIIKLPKYSLFELENGRKRMLASAGELQKGNELALPSKYVNFLYLASHYEKLKGSPEDNEQKQLFVEQHKHYLDEIIEQISEFSKRVILADANLDKVLSAYNKHRDKPIREQAENIIHLFTLTNLGAPAAFKYFDTTIDRKRYTSTKEVLDATLIHQSITGLYETRIDLSQLGGDGGGGGEAAAKGGTVSLQDEHRLFDIPVTTSLPDVWLQDFPQAWAETGGLGRAKCQAPIIIDLKPTAVPVSIKQYPMSLEAHMGIRQHIIKFLELGVLRPCRSPWNTPLLPVKKPGTQDYRPVQDLREINKRTVDIHPTVPNPYNLLSTLKPDYSWYTVLDLKDAFFCLPLAPQSQELFAFEWKDPERGISGQLTWTRLPQGFKNSPTLFNEALHRDLTDFRTQHPEVTLLQYVDDLLLAAPTKKACTQGTRHLLQELGEKGYRASAKKAQICQTKVTYLGYILSEGKRWLTPGRIETVARIPPPRNPREVREFLGKAGFCRLFIPGFAELAAPLYALTKPSTPFTWQTEHQLAFEALKKALLSAPALGLPDTSKPFTLFLDERQGIAKGVLTQKLGPWKRPVAYLSKKLDPVAAGWPPCLRIMAATAMLVKDSAKLTLGQPLTVITPHTLEAIVRQPPDRWITNARLTHYQALLLDTDRVQFGPPVTLNPATLLPVPENQPSPHDCRQVLAETHGTREDLKDQELPDADHTWYTDGSSYLDSGTRRAGAAVVDGHNTIWAQSLPPGTSAQKAELIALTKALELSKGKKANIYTDSRYAFATAHTHGSIYERRGWLTSEGKEIKNKAEIIALLKALFLPQEVAIIHCPGHQKGQDPVAVGNRQADRVARQAAMAEVLTLATEPDNTSHITAGKRTADGSEFEKRTADGSEFESPKKKAKVE

SEQ ID NO: 2005 - protein, 2103 aa, synthetic construct
MPAAKRVKLDGGDKKYSIGLDIGTNSVGWAVITDEYKVPSKKFKVLGNTDRHSIKKNLIGALLFDSGETAEATRLKRTARRRYTRRKNRICYLQEIFSNEMAKVDDSFFHRLEESFLVEEDKKHERHPIFGNIVDEVAYHEKYPTIYHLRKKLVDSTDKADLRLIYLALAHMIKFRGHFLIEGDLNPDNSDVDKLFIQLVQTYNQLFEENPINASGVDAKAILSARLSKSRRLENLIAQLPGEKKNGLFGNLIALSLGLTPNFKSNFDLAEDAKLQLSKDTYDDDLDNLLAQIGDQYADLFLAAKNLSDAILLSDILRVNTEITKAPLSASMIKRYDEHHQDLTLLKALVRQQLPEKYKEIFFDQSKNGYAGYIDGGASQEEFYKFIKPILEKMDGTEELLVKLNREDLLRKQRTFDNGSIPHQIHLGELHAILRRQEDFYPFLKDNREKIEKILTFRIPYYVGPLARGNSRFAWMTRKSEETITPWNFEEVVDKGASAQSFIERMTNFDKNLPNEKVLPKHSLLYEYFTVYNELTKVKYVTEGMRKPAFLSGEQKKAIVDLLFKTNRKVTVKQLKEDYFKKIECFDSVEISGVEDRFNASLGTYHDLLKIIKDKDFLDNEENEDILEDIVLTLTLFEDREMIEERLKTYAHLFDDKVMKQLKRRRYTGWGRLSRKLINGIRDKQSGKTILDFLKSDGFANRNFMQLIHDDSLTFKEDIQKAQVSGQGDSLHEHIANLAGSPAIKKGILQTVKVVDELVKVMGRHKPENIVIEMARENQTTQKGQKNSRERMKRIEEGIKELGSQILKEHPVENTQLQNEKLYLYYLQNGRDMYVDQELDINRLSDYDVDHIVPQSFLKDDSIDNKVLTRSDKARGKSDNVPSEEVVKKMKNYWRQLLNAKLITQRKFDNLTKAERGGLSELDKAGFIKRQLVETRQITKHVAQILDSRMNTKYDENDKLIREVKVITLKSKLVSDFRKDFQFYKVREINNYHHAHDAYLNAVVGTALIKKYPKLESEFVYGDYKVYDVRKMIAKSEQEIGKATAKYFFYSNIMNFFKTEITLANGEIRKRPLIETNGETGEIVWDKGRDFATVRKVLSMPQVNIVKKTEVQTGGFSKESILPKRNSDKLIARKKDWDPKKYGGFDSPTVAYSVLVVAKVEKGKSKKLKSVKELLGITIMERSSFEKNPIDFLEAKGYKEVKKDLIIKLPKYSLFELENGRKRMLASAGELQKGNELALPSKYVNFLYLASHYEKLKGSPEDNEQKQLFVEQHKHYLDEIIEQISEFSKRVILADANLDKVLSAYNKHRDKPIREQAENIIHLFTLTNLGAPAAFKYFDTTIDRKRYTSTKEVLDATLIHQSITGLYETRIDLSQLGGDGGGSAGSAAGSGEFGGTVSLQDEHRLFDIPVTTSLPDVWLQDFPQAWAETGGLGRAKCQAPIIIDLKPTAVPVSIKQYPMSLEAHMGIRQHIIKFLELGVLRPCRSPWNTPLLPVKKPGTQDYRPVQDLREINKRTVDIHPTVPNPYNLLSTLKPDYSWYTVLDLKDAFFCLPLAPQSQELFAFEWKDPERGISGQLTWTRLPQGFKNSPTLFNEALHRDLTDFRTQHPEVTLLQYVDDLLLAAPTKKACTQGTRHLLQELGEKGYRASAKKAQICQTKVTYLGYILSEGKRWLTPGRIETVARIPPPRNPREVREFLGKAGFCRLFIPGFAELAAPLYALTKPSTPFTWQTEHQLAFEALKKALLSAPALGLPDTSKPFTLFLDERQGIAKGVLTQKLGPWKRPVAYLSKKLDPVAAGWPPCLRIMAATAMLVKDSAKLTLGQPLTVITPHTLEAIVRQPPDRWITNARLTHYQALLLDTDRVQFGPPVTLNPATLLPVPENQPSPHDCRQVLAETHGTREDLKDQELPDADHTWYTDGSSYLDSGTRRAGAAVVDGHNTIWAQSLPPGTSAQKAELIALTKALELSKGKKANIYTDSRYAFATAHTHGSIYERRGWLTSEGKEIKNKAEIIALLKALFLPQEVAIIHCPGHQKGQDPVAVGNRQADRVARQAAMAEVLTLATEPDNTSHITAGKRTADGSEFEKRTADGSEFESPKKKAKVE

SEQ ID NO: 2006 - protein, 2096 aa, synthetic construct
MPAAKRVKLDGGDKKYSIGLDIGTNSVGWAVITDEYKVPSKKFKVLGNTDRHSIKKNLIGALLFDSGETAEATRLKRTARRRYTRRKNRICYLQEIFSNEMAKVDDSFFHRLEESFLVEEDKKHERHPIFGNIVDEVAYHEKYPTIYHLRKKLVDSTDKADLRLIYLALAHMIKFRGHFLIEGDLNPDNSDVDKLFIQLVQTYNQLFEENPINASGVDAKAILSARLSKSRRLENLIAQLPGEKKNGLFGNLIALSLGLTPNFKSNFDLAEDAKLQLSKDTYDDDLDNLLAQIGDQYADLFLAAKNLSDAILLSDILRVNTEITKAPLSASMIKRYDEHHQDLTLLKALVRQQLPEKYKEIFFDQSKNGYAGYIDGGASQEEFYKFIKPILEKMDGTEELLVKLNREDLLRKQRTFDNGSIPHQIHLGELHAILRRQEDFYPFLKDNREKIEKILTFRIPYYVGPLARGNSRFAWMTRKSEETITPWNFEEVVDKGASAQSFIERMTNFDKNLPNEKVLPKHSLLYEYFTVYNELTKVKYVTEGMRKPAFLSGEQKKAIVDLLFKTNRKVTVKQLKEDYFKKIECFDSVEISGVEDRFNASLGTYHDLLKIIKDKDFLDNEENEDILEDIVLTLTLFEDREMIEERLKTYAHLFDDKVMKQLKRRRYTGWGRLSRKLINGIRDKQSGKTILDFLKSDGFANRNFMQLIHDDSLTFKEDIQKAQVSGQGDSLHEHIANLAGSPAIKKGILQTVKVVDELVKVMGRHKPENIVIEMARENQTTQKGQKNSRERMKRIEEGIKELGSQILKEHPVENTQLQNEKLYLYYLQNGRDMYVDQELDINRLSDYDVDHIVPQSFLKDDSIDNKVLTRSDKARGKSDNVPSEEVVKKMKNYWRQLLNAKLITQRKFDNLTKAERGGLSELDKAGFIKRQLVETRQITKHVAQILDSRMNTKYDENDKLIREVKVITLKSKLVSDFRKDFQFYKVREINNYHHAHDAYLNAVVGTALIKKYPKLESEFVYGDYKVYDVRKMIAKSEQEIGKATAKYFFYSNIMNFFKTEITLANGEIRKRPLIETNGETGEIVWDKGRDFATVRKVLSMPQVNIVKKTEVQTGGFSKESILPKRNSDKLIARKKDWDPKKYGGFDSPTVAYSVLVVAKVEKGKSKKLKSVKELLGITIMERSSFEKNPIDFLEAKGYKEVKKDLIIKLPKYSLFELENGRKRMLASAGELQKGNELALPSKYVNFLYLASHYEKLKGSPEDNEQKQLFVEQHKHYLDEIIEQISEFSKRVILADANLDKVLSAYNKHRDKPIREQAENIIHLFTLTNLGAPAAFKYFDTTIDRKRYTSTKEVLDATLIHQSITGLYETRIDLSQLGGDGGGGGGSGGTVSLQDEHRLFDIPVTTSLPDVWLQDFPQAWAETGGLGRAKCQAPIIIDLKPTAVPVSIKQYPMSLEAHMGIRQHIIKFLELGVLRPCRSPWNTPLLPVKKPGTQDYRPVQDLREINKRTVDIHPTVPNPYNLLSTLKPDYSWYTVLDLKDAFFCLPLAPQSQELFAFEWKDPERGISGQLTWTRLPQGFKNSPTLFNEALHRDLTDFRTQHPEVTLLQYVDDLLLAAPTKKACTQGTRHLLQELGEKGYRASAKKAQICQTKVTYLGYILSEGKRWLTPGRIETVARIPPPRNPREVREFLGKAGFCRLFIPGFAELAAPLYALTKPSTPFTWQTEHQLAFEALKKALLSAPALGLPDTSKPFTLFLDERQGIAKGVLTQKLGPWKRPVAYLSKKLDPVAAGWPPCLRIMAATAMLVKDSAKLTLGQPLTVITPHTLEAIVRQPPDRWITNARLTHYQALLLDTDRVQFGPPVTLNPATLLPVPENQPSPHDCRQVLAETHGTREDLKDQELPDADHTWYTDGSSYLDSGTRRAGAAVVDGHNTIWAQSLPPGTSAQKAELIALTKALELSKGKKANIYTDSRYAFATAHTHGSIYERRGWLTSEGKEIKNKAEIIALLKALFLPQEVAIIHCPGHQKGQDPVAVGNRQADRVARQAAMAEVLTLATEPDNTSHITAGKRTADGSEFEKRTADGSEFESPKKKAKVE

SEQ ID NO: 2007 - protein, 2100 aa, synthetic construct
MPAAKRVKLDGGDKKYSIGLDIGTNSVGWAVITDEYKVPSKKFKVLGNTDRHSIKKNLIGALLFDSGETAEATRLKRTARRRYTRRKNRICYLQEIFSNEMAKVDDSFFHRLEESFLVEEDKKHERHPIFGNIVDEVAYHEKYPTIYHLRKKLVDSTDKADLRLIYLALAHMIKFRGHFLIEGDLNPDNSDVDKLFIQLVQTYNQLFEENPINASGVDAKAILSARLSKSRRLENLIAQLPGEKKNGLFGNLIALSLGLTPNFKSNFDLAEDAKLQLSKDTYDDDLDNLLAQIGDQYADLFLAAKNLSDAILLSDILRVNTEITKAPLSASMIKRYDEHHQDLTLLKALVRQQLPEKYKEIFFDQSKNGYAGYIDGGASQEEFYKFIKPILEKMDGTEELLVKLNREDLLRKQRTFDNGSIPHQIHLGELHAILRRQEDFYPFLKDNREKIEKILTFRIPYYVGPLARGNSRFAWMTRKSEETITPWNFEEVVDKGASAQSFIERMTNFDKNLPNEKVLPKHSLLYEYFTVYNELTKVKYVTEGMRKPAFLSGEQKKAIVDLLFKTNRKVTVKQLKEDYFKKIECFDSVEISGVEDRFNASLGTYHDLLKIIKDKDFLDNEENEDILEDIVLTLTLFEDREMIEERLKTYAHLFDDKVMKQLKRRRYTGWGRLSRKLINGIRDKQSGKTILDFLKSDGFANRNFMQLIHDDSLTFKEDIQKAQVSGQGDSLHEHIANLAGSPAIKKGILQTVKVVDELVKVMGRHKPENIVIEMARENQTTQKGQKNSRERMKRIEEGIKELGSQILKEHPVENTQLQNEKLYLYYLQNGRDMYVDQELDINRLSDYDVDHIVPQSFLKDDSIDNKVLTRSDKARGKSDNVPSEEVVKKMKNYWRQLLNAKLITQRKFDNLTKAERGGLSELDKAGFIKRQLVETRQITKHVAQILDSRMNTKYDENDKLIREVKVITLKSKLVSDFRKDFQFYKVREINNYHHAHDAYLNAVVGTALIKKYPKLESEFVYGDYKVYDVRKMIAKSEQEIGKATAKYFFYSNIMNFFKTEITLANGEIRKRPLIETNGETGEIVWDKGRDFATVRKVLSMPQVNIVKKTEVQTGGFSKESILPKRNSDKLIARKKDWDPKKYGGFDSPTVAYSVLVVAKVEKGKSKKLKSVKELLGITIMERSSFEKNPIDFLEAKGYKEVKKDLIIKLPKYSLFELENGRKRMLASAGELQKGNELALPSKYVNFLYLASHYEKLKGSPEDNEQKQLFVEQHKHYLDEIIEQISEFSKRVILADANLDKVLSAYNKHRDKPIREQAENIIHLFTLTNLGAPAAFKYFDTTIDRKRYTSTKEVLDATLIHQSITGLYETRIDLSQLGGDGGGSSGGGPAPGGTVSLQDEHRLFDIPVTTSLPDVWLQDFPQAWAETGGLGRAKCQAPIIIDLKPTAVPVSIKQYPMSLEAHMGIRQHIIKFLELGVLRPCRSPWNTPLLPVKKPGTQDYRPVQDLREINKRTVDIHPTVPNPYNLLSTLKPDYSWYTVLDLKDAFFCLPLAPQSQELFAFEWKDPERGISGQLTWTRLPQGFKNSPTLFNEALHRDLTDFRTQHPEVTLLQYVDDLLLAAPTKKACTQGTRHLLQELGEKGYRASAKKAQICQTKVTYLGYILSEGKRWLTPGRIETVARIPPPRNPREVREFLGKAGFCRLFIPGFAELAAPLYALTKPSTPFTWQTEHQLAFEALKKALLSAPALGLPDTSKPFTLFLDERQGIAKGVLTQKLGPWKRPVAYLSKKLDPVAAGWPPCLRIMAATAMLVKDSAKLTLGQPLTVITPHTLEAIVRQPPDRWITNARLTHYQALLLDTDRVQFGPPVTLNPATLLPVPENQPSPHDCRQVLAETHGTREDLKDQELPDADHTWYTDGSSYLDSGTRRAGAAVVDGHNTIWAQSLPPGTSAQKAELIALTKALELSKGKKANIYTDSRYAFATAHTHGSIYERRGWLTSEGKEIKNKAEIIALLKALFLPQEVAIIHCPGHQKGQDPVAVGNRQADRVARQAAMAEVLTLATEPDNTSHITAGKRTADGSEFEKRTADGSEFESPKKKAKVE

SEQ ID NO: 2008 - protein, 2096 aa, synthetic construct
MPAAKRVKLDGGDKKYSIGLDIGTNSVGWAVITDEYKVPSKKFKVLGNTDRHSIKKNLIGALLFDSGETAEATRLKRTARRRYTRRKNRICYLQEIFSNEMAKVDDSFFHRLEESFLVEEDKKHERHPIFGNIVDEVAYHEKYPTIYHLRKKLVDSTDKADLRLIYLALAHMIKFRGHFLIEGDLNPDNSDVDKLFIQLVQTYNQLFEENPINASGVDAKAILSARLSKSRRLENLIAQLPGEKKNGLFGNLIALSLGLTPNFKSNFDLAEDAKLQLSKDTYDDDLDNLLAQIGDQYADLFLAAKNLSDAILLSDILRVNTEITKAPLSASMIKRYDEHHQDLTLLKALVRQQLPEKYKEIFFDQSKNGYAGYIDGGASQEEFYKFIKPILEKMDGTEELLVKLNREDLLRKQRTFDNGSIPHQIHLGELHAILRRQEDFYPFLKDNREKIEKILTFRIPYYVGPLARGNSRFAWMTRKSEETITPWNFEEVVDKGASAQSFIERMTNFDKNLPNEKVLPKHSLLYEYFTVYNELTKVKYVTEGMRKPAFLSGEQKKAIVDLLFKTNRKVTVKQLKEDYFKKIECFDSVEISGVEDRFNASLGTYHDLLKIIKDKDFLDNEENEDILEDIVLTLTLFEDREMIEERLKTYAHLFDDKVMKQLKRRRYTGWGRLSRKLINGIRDKQSGKTILDFLKSDGFANRNFMQLIHDDSLTFKEDIQKAQVSGQGDSLHEHIANLAGSPAIKKGILQTVKVVDELVKVMGRHKPENIVIEMARENQTTQKGQKNSRERMKRIEEGIKELGSQILKEHPVENTQLQNEKLYLYYLQNGRDMYVDQELDINRLSDYDVDHIVPQSFLKDDSIDNKVLTRSDKARGKSDNVPSEEVVKKMKNYWRQLLNAKLITQRKFDNLTKAERGGLSELDKAGFIKRQLVETRQITKHVAQILDSRMNTKYDENDKLIREVKVITLKSKLVSDFRKDFQFYKVREINNYHHAHDAYLNAVVGTALIKKYPKLESEFVYGDYKVYDVRKMIAKSEQEIGKATAKYFFYSNIMNFFKTEITLANGEIRKRPLIETNGETGEIVWDKGRDFATVRKVLSMPQVNIVKKTEVQTGGFSKESILPKRNSDKLIARKKDWDPKKYGGFDSPTVAYSVLVVAKVEKGKSKKLKSVKELLGITIMERSSFEKNPIDFLEAKGYKEVKKDLIIKLPKYSLFELENGRKRMLASAGELQKGNELALPSKYVNFLYLASHYEKLKGSPEDNEQKQLFVEQHKHYLDEIIEQISEFSKRVILADANLDKVLSAYNKHRDKPIREQAENIIHLFTLTNLGAPAAFKYFDTTIDRKRYTSTKEVLDATLIHQSITGLYETRIDLSQLGGDGGEAAAKGGTVSLQDEHRLFDIPVTTSLPDVWLQDFPQAWAETGGLGRAKCQAPIIIDLKPTAVPVSIKQYPMSLEAHMGIRQHIIKFLELGVLRPCRSPWNTPLLPVKKPGTQDYRPVQDLREINKRTVDIHPTVPNPYNLLSTLKPDYSWYTVLDLKDAFFCLPLAPQSQELFAFEWKDPERGISGQLTWTRLPQGFKNSPTLFNEALHRDLTDFRTQHPEVTLLQYVDDLLLAAPTKKACTQGTRHLLQELGEKGYRASAKKAQICQTKVTYLGYILSEGKRWLTPGRIETVARIPPPRNPREVREFLGKAGFCRLFIPGFAELAAPLYALTKPSTPFTWQTEHQLAFEALKKALLSAPALGLPDTSKPFTLFLDERQGIAKGVLTQKLGPWKRPVAYLSKKLDPVAAGWPPCLRIMAATAMLVKDSAKLTLGQPLTVITPHTLEAIVRQPPDRWITNARLTHYQALLLDTDRVQFGPPVTLNPATLLPVPENQPSPHDCRQVLAETHGTREDLKDQELPDADHTWYTDGSSYLDSGTRRAGAAVVDGHNTIWAQSLPPGTSAQKAELIALTKALELSKGKKANIYTDSRYAFATAHTHGSIYERRGWLTSEGKEIKNKAEIIALLKALFLPQEVAIIHCPGHQKGQDPVAVGNRQADRVARQAAMAEVLTLATEPDNTSHITAGKRTADGSEFEKRTADGSEFESPKKKAKVE

SEQ ID NO: 2009 - protein, 2102 aa, synthetic construct
MPAAKRVKLDGGDKKYSIGLDIGTNSVGWAVITDEYKVPSKKFKVLGNTDRHSIKKNLIGALLFDSGETAEATRLKRTARRRYTRRKNRICYLQEIFSNEMAKVDDSFFHRLEESFLVEEDKKHERHPIFGNIVDEVAYHEKYPTIYHLRKKLVDSTDKADLRLIYLALAHMIKFRGHFLIEGDLNPDNSDVDKLFIQLVQTYNQLFEENPINASGVDAKAILSARLSKSRRLENLIAQLPGEKKNGLFGNLIALSLGLTPNFKSNFDLAEDAKLQLSKDTYDDDLDNLLAQIGDQYADLFLAAKNLSDAILLSDILRVNTEITKAPLSASMIKRYDEHHQDLTLLKALVRQQLPEKYKEIFFDQSKNGYAGYIDGGASQEEFYKFIKPILEKMDGTEELLVKLNREDLLRKQRTFDNGSIPHQIHLGELHAILRRQEDFYPFLKDNREKIEKILTFRIPYYVGPLARGNSRFAWMTRKSEETITPWNFEEVVDKGASAQSFIERMTNFDKNLPNEKVLPKHSLLYEYFTVYNELTKVKYVTEGMRKPAFLSGEQKKAIVDLLFKTNRKVTVKQLKEDYFKKIECFDSVEISGVEDRFNASLGTYHDLLKIIKDKDFLDNEENEDILEDIVLTLTLFEDREMIEERLKTYAHLFDDKVMKQLKRRRYTGWGRLSRKLINGIRDKQSGKTILDFLKSDGFANRNFMQLIHDDSLTFKEDIQKAQVSGQGDSLHEHIANLAGSPAIKKGILQTVKVVDELVKVMGRHKPENIVIEMARENQTTQKGQKNSRERMKRIEEGIKELGSQILKEHPVENTQLQNEKLYLYYLQNGRDMYVDQELDINRLSDYDVDHIVPQSFLKDDSIDNKVLTRSDKARGKSDNVPSEEVVKKMKNYWRQLLNAKLITQRKFDNLTKAERGGLSELDKAGFIKRQLVETRQITKHVAQILDSRMNTKYDENDKLIREVKVITLKSKLVSDFRKDFQFYKVREINNYHHAHDAYLNAVVGTALIKKYPKLESEFVYGDYKVYDVRKMIAKSEQEIGKATAKYFFYSNIMNFFKTEITLANGEIRKRPLIETNGETGEIVWDKGRDFATVRKVLSMPQVNIVKKTEVQTGGFSKESILPKRNSDKLIARKKDWDPKKYGGFDSPTVAYSVLVVAKVEKGKSKKLKSVKELLGITIMERSSFEKNPIDFLEAKGYKEVKKDLIIKLPKYSLFELENGRKRMLASAGELQKGNELALPSKYVNFLYLASHYEKLKGSPEDNEQKQLFVEQHKHYLDEIIEQISEFSKRVILADANLDKVLSAYNKHRDKPIREQAENIIHLFTLTNLGAPAAFKYFDTTIDRKRYTSTKEVLDATLIHQSITGLYETRIDLSQLGGDGGEAAAKGGGGSSGGTVSLQDEHRLFDIPVTTSLPDVWLQDFPQAWAETGGLGRAKCQAPIIIDLKPTAVPVSIKQYPMSLEAHMGIRQHIIKFLELGVLRPCRSPWNTPLLPVKKPGTQDYRPVQDLREINKRTVDIHPTVPNPYNLLSTLKPDYSWYTVLDLKDAFFCLPLAPQSQELFAFEWKDPERGISGQLTWTRLPQGFKNSPTLFNEALHRDLTDFRTQHPEVTLLQYVDDLLLAAPTKKACTQGTRHLLQELGEKGYRASAKKAQICQTKVTYLGYILSEGKRWLTPGRIETVARIPPPRNPREVREFLGKAGFCRLFIPGFAELAAPLYALTKPSTPFTWQTEHQLAFEALKKALLSAPALGLPDTSKPFTLFLDERQGIAKGVLTQKLGPWKRPVAYLSKKLDPVAAGWPPCLRIMAATAMLVKDSAKLTLGQPLTVITPHTLEAIVRQPPDRWITNARLTHYQALLLDTDRVQFGPPVTLNPATLLPVPENQPSPHDCRQVLAETHGTREDLKDQELPDADHTWYTDGSSYLDSGTRRAGAAVVDGHNTIWAQSLPPGTSAQKAELIALTKALELSKGKKANIYTDSRYAFATAHTHGSIYERRGWLTSEGKEIKNKAEIIALLKALFLPQEVAIIHCPGHQKGQDPVAVGNRQADRVARQAAMAEVLTLATEPDNTSHITAGKRTADGSEFEKRTADGSEFESPKKKAKVE

SEQ ID NO: 2010 - protein, 2100 aa, synthetic construct
MPAAKRVKLDGGDKKYSIGLDIGTNSVGWAVITDEYKVPSKKFKVLGNTDRHSIKKNLIGALLFDSGETAEATRLKRTARRRYTRRKNRICYLQEIFSNEMAKVDDSFFHRLEESFLVEEDKKHERHPIFGNIVDEVAYHEKYPTIYHLRKKLVDSTDKADLRLIYLALAHMIKFRGHFLIEGDLNPDNSDVDKLFIQLVQTYNQLFEENPINASGVDAKAILSARLSKSRRLENLIAQLPGEKKNGLFGNLIALSLGLTPNFKSNFDLAEDAKLQLSKDTYDDDLDNLLAQIGDQYADLFLAAKNLSDAILLSDILRVNTEITKAPLSASMIKRYDEHHQDLTLLKALVRQQLPEKYKEIFFDQSKNGYAGYIDGGASQEEFYKFIKPILEKMDGTEELLVKLNREDLLRKQRTFDNGSIPHQIHLGELHAILRRQEDFYPFLKDNREKIEKILTFRIPYYVGPLARGNSRFAWMTRKSEETITPWNFEEVVDKGASAQSFIERMTNFDKNLPNEKVLPKHSLLYEYFTVYNELTKVKYVTEGMRKPAFLSGEQKKAIVDLLFKTNRKVTVKQLKEDYFKKIECFDSVEISGVEDRFNASLGTYHDLLKIIKDKDFLDNEENEDILEDIVLTLTLFEDREMIEERLKTYAHLFDDKVMKQLKRRRYTGWGRLSRKLINGIRDKQSGKTILDFLKSDGFANRNFMQLIHDDSLTFKEDIQKAQVSGQGDSLHEHIANLAGSPAIKKGILQTVKVVDELVKVMGRHKPENIVIEMARENQTTQKGQKNSRERMKRIEEGIKELGSQILKEHPVENTQLQNEKLYLYYLQNGRDMYVDQELDINRLSDYDVDHIVPQSFLKDDSIDNKVLTRSDKARGKSDNVPSEEVVKKMKNYWRQLLNAKLITQRKFDNLTKAERGGLSELDKAGFIKRQLVETRQITKHVAQILDSRMNTKYDENDKLIREVKVITLKSKLVSDFRKDFQFYKVREINNYHHAHDAYLNAVVGTALIKKYPKLESEFVYGDYKVYDVRKMIAKSEQEIGKATAKYFFYSNIMNFFKTEITLANGEIRKRPLIETNGETGEIVWDKGRDFATVRKVLSMPQVNIVKKTEVQTGGFSKESILPKRNSDKLIARKKDWDPKKYGGFDSPTVAYSVLVVAKVEKGKSKKLKSVKELLGITIMERSSFEKNPIDFLEAKGYKEVKKDLIIKLPKYSLFELENGRKRMLASAGELQKGNELALPSKYVNFLYLASHYEKLKGSPEDNEQKQLFVEQHKHYLDEIIEQISEFSKRVILADANLDKVLSAYNKHRDKPIREQAENIIHLFTLTNLGAPAAFKYFDTTIDRKRYTSTKEVLDATLIHQSITGLYETRIDLSQLGGDGGPAPGGSGGGGGTVSLQDEHRLFDIPVTTSLPDVWLQDFPQAWAETGGLGRAKCQAPIIIDLKPTAVPVSIKQYPMSLEAHMGIRQHIIKFLELGVLRPCRSPWNTPLLPVKKPGTQDYRPVQDLREINKRTVDIHPTVPNPYNLLSTLKPDYSWYTVLDLKDAFFCLPLAPQSQELFAFEWKDPERGISGQLTWTRLPQGFKNSPTLFNEALHRDLTDFRTQHPEVTLLQYVDDLLLAAPTKKACTQGTRHLLQELGEKGYRASAKKAQICQTKVTYLGYILSEGKRWLTPGRIETVARIPPPRNPREVREFLGKAGFCRLFIPGFAELAAPLYALTKPSTPFTWQTEHQLAFEALKKALLSAPALGLPDTSKPFTLFLDERQGIAKGVLTQKLGPWKRPVAYLSKKLDPVAAGWPPCLRIMAATAMLVKDSAKLTLGQPLTVITPHTLEAIVRQPPDRWITNARLTHYQALLLDTDRVQFGPPVTLNPATLLPVPENQPSPHDCRQVLAETHGTREDLKDQELPDADHTWYTDGSSYLDSGTRRAGAAVVDGHNTIWAQSLPPGTSAQKAELIALTKALELSKGKKANIYTDSRYAFATAHTHGSIYERRGWLTSEGKEIKNKAEIIALLKALFLPQEVAIIHCPGHQKGQDPVAVGNRQADRVARQAAMAEVLTLATEPDNTSHITAGKRTADGSEFEKRTADGSEFESPKKKAKVE

SEQ ID NO: 2011 - protein, 2100 aa, synthetic construct
MPAAKRVKLDGGDKKYSIGLDIGTNSVGWAVITDEYKVPSKKFKVLGNTDRHSIKKNLIGALLFDSGETAEATRLKRTARRRYTRRKNRICYLQEIFSNEMAKVDDSFFHRLEESFLVEEDKKHERHPIFGNIVDEVAYHEKYPTIYHLRKKLVDSTDKADLRLIYLALAHMIKFRGHFLIEGDLNPDNSDVDKLFIQLVQTYNQLFEENPINASGVDAKAILSARLSKSRRLENLIAQLPGEKKNGLFGNLIALSLGLTPNFKSNFDLAEDAKLQLSKDTYDDDLDNLLAQIGDQYADLFLAAKNLSDAILLSDILRVNTEITKAPLSASMIKRYDEHHQDLTLLKALVRQQLPEKYKEIFFDQSKNGYAGYIDGGASQEEFYKFIKPILEKMDGTEELLVKLNREDLLRKQRTFDNGSIPHQIHLGELHAILRRQEDFYPFLKDNREKIEKILTFRIPYYVGPLARGNSRFAWMTRKSEETITPWNFEEVVDKGASAQSFIERMTNFDKNLPNEKVLPKHSLLYEYFTVYNELTKVKYVTEGMRKPAFLSGEQKKAIVDLLFKTNRKVTVKQLKEDYFKKIECFDSVEISGVEDRFNASLGTYHDLLKIIKDKDFLDNEENEDILEDIVLTLTLFEDREMIEERLKTYAHLFDDKVMKQLKRRRYTGWGRLSRKLINGIRDKQSGKTILDFLKSDGFANRNFMQLIHDDSLTFKEDIQKAQVSGQGDSLHEHIANLAGSPAIKKGILQTVKVVDELVKVMGRHKPENIVIEMARENQTTQKGQKNSRERMKRIEEGIKELGSQILKEHPVENTQLQNEKLYLYYLQNGRDMYVDQELDINRLSDYDVDHIVPQSFLKDDSIDNKVLTRSDKARGKSDNVPSEEVVKKMKNYWRQLLNAKLITQRKFDNLTKAERGGLSELDKAGFIKRQLVETRQITKHVAQILDSRMNTKYDENDKLIREVKVITLKSKLVSDFRKDFQFYKVREINNYHHAHDAYLNAVVGTALIKKYPKLESEFVYGDYKVYDVRKMIAKSEQEIGKATAKYFFYSNIMNFFKTEITLANGEIRKRPLIETNGETGEIVWDKGRDFATVRKVLSMPQVNIVKKTEVQTGGFSKESILPKRNSDKLIARKKDWDPKKYGGFDSPTVAYSVLVVAKVEKGKSKKLKSVKELLGITIMERSSFEKNPIDFLEAKGYKEVKKDLIIKLPKYSLFELENGRKRMLASAGELQKGNELALPSKYVNFLYLASHYEKLKGSPEDNEQKQLFVEQHKHYLDEIIEQISEFSKRVILADANLDKVLSAYNKHRDKPIREQAENIIHLFTLTNLGAPAAFKYFDTTIDRKRYTSTKEVLDATLIHQSITGLYETRIDLSQLGGDGGGGGPAPGGSGGTVSLQDEHRLFDIPVTTSLPDVWLQDFPQAWAETGGLGRAKCQAPIIIDLKPTAVPVSIKQYPMSLEAHMGIRQHIIKFLELGVLRPCRSPWNTPLLPVKKPGTQDYRPVQDLREINKRTVDIHPTVPNPYNLLSTLKPDYSWYTVLDLKDAFFCLPLAPQSQELFAFEWKDPERGISGQLTWTRLPQGFKNSPTLFNEALHRDLTDFRTQHPEVTLLQYVDDLLLAAPTKKACTQGTRHLLQELGEKGYRASAKKAQICQTKVTYLGYILSEGKRWLTPGRIETVARIPPPRNPREVREFLGKAGFCRLFIPGFAELAAPLYALTKPSTPFTWQTEHQLAFEALKKALLSAPALGLPDTSKPFTLFLDERQGIAKGVLTQKLGPWKRPVAYLSKKLDPVAAGWPPCLRIMAATAMLVKDSAKLTLGQPLTVITPHTLEAIVRQPPDRWITNARLTHYQALLLDTDRVQFGPPVTLNPATLLPVPENQPSPHDCRQVLAETHGTREDLKDQELPDADHTWYTDGSSYLDSGTRRAGAAVVDGHNTIWAQSLPPGTSAQKAELIALTKALELSKGKKANIYTDSRYAFATAHTHGSIYERRGWLTSEGKEIKNKAEIIALLKALFLPQEVAIIHCPGHQKGQDPVAVGNRQADRVARQAAMAEVLTLATEPDNTSHITAGKRTADGSEFEKRTADGSEFESPKKKAKVE

SEQ ID NO: 2012 - protein, 2099 aa, synthetic construct
MPAAKRVKLDGGDKKYSIGLDIGTNSVGWAVITDEYKVPSKKFKVLGNTDRHSIKKNLIGALLFDSGETAEATRLKRTARRRYTRRKNRICYLQEIFSNEMAKVDDSFFHRLEESFLVEEDKKHERHPIFGNIVDEVAYHEKYPTIYHLRKKLVDSTDKADLRLIYLALAHMIKFRGHFLIEGDLNPDNSDVDKLFIQLVQTYNQLFEENPINASGVDAKAILSARLSKSRRLENLIAQLPGEKKNGLFGNLIALSLGLTPNFKSNFDLAEDAKLQLSKDTYDDDLDNLLAQIGDQYADLFLAAKNLSDAILLSDILRVNTEITKAPLSASMIKRYDEHHQDLTLLKALVRQQLPEKYKEIFFDQSKNGYAGYIDGGASQEEFYKFIKPILEKMDGTEELLVKLNREDLLRKQRTFDNGSIPHQIHLGELHAILRRQEDFYPFLKDNREKIEKILTFRIPYYVGPLARGNSRFAWMTRKSEETITPWNFEEVVDKGASAQSFIERMTNFDKNLPNEKVLPKHSLLYEYFTVYNELTKVKYVTEGMRKPAFLSGEQKKAIVDLLFKTNRKVTVKQLKEDYFKKIECFDSVEISGVEDRFNASLGTYHDLLKIIKDKDFLDNEENEDILEDIVLTLTLFEDREMIEERLKTYAHLFDDKVMKQLKRRRYTGWGRLSRKLINGIRDKQSGKTILDFLKSDGFANRNFMQLIHDDSLTFKEDIQKAQVSGQGDSLHEHIANLAGSPAIKKGILQTVKVVDELVKVMGRHKPENIVIEMARENQTTQKGQKNSRERMKRIEEGIKELGSQILKEHPVENTQLQNEKLYLYYLQNGRDMYVDQELDINRLSDYDVDHIVPQSFLKDDSIDNKVLTRSDKARGKSDNVPSEEVVKKMKNYWRQLLNAKLITQRKFDNLTKAERGGLSELDKAGFIKRQLVETRQITKHVAQILDSRMNTKYDENDKLIREVKVITLKSKLVSDFRKDFQFYKVREINNYHHAHDAYLNAVVGTALIKKYPKLESEFVYGDYKVYDVRKMIAKSEQEIGKATAKYFFYSNIMNFFKTEITLANGEIRKRPLIETNGETGEIVWDKGRDFATVRKVLSMPQVNIVKKTEVQTGGFSKESILPKRNSDKLIARKKDWDPKKYGGFDSPTVAYSVLVVAKVEKGKSKKLKSVKELLGITIMERSSFEKNPIDFLEAKGYKEVKKDLIIKLPKYSLFELENGRKRMLASAGELQKGNELALPSKYVNFLYLASHYEKLKGSPEDNEQKQLFVEQHKHYLDEIIEQISEFSKRVILADANLDKVLSAYNKHRDKPIREQAENIIHLFTLTNLGAPAAFKYFDTTIDRKRYTSTKEVLDATLIHQSITGLYETRIDLSQLGGDGGEAAAKGGSGGTVSLQDEHRLFDIPVTTSLPDVWLQDFPQAWAETGGLGRAKCQAPIIIDLKPTAVPVSIKQYPMSLEAHMGIRQHIIKFLELGVLRPCRSPWNTPLLPVKKPGTQDYRPVQDLREINKRTVDIHPTVPNPYNLLSTLKPDYSWYTVLDLKDAFFCLPLAPQSQELFAFEWKDPERGISGQLTWTRLPQGFKNSPTLFNEALHRDLTDFRTQHPEVTLLQYVDDLLLAAPTKKACTQGTRHLLQELGEKGYRASAKKAQICQTKVTYLGYILSEGKRWLTPGRIETVARIPPPRNPREVREFLGKAGFCRLFIPGFAELAAPLYALTKPSTPFTWQTEHQLAFEALKKALLSAPALGLPDTSKPFTLFLDERQGIAKGVLTQKLGPWKRPVAYLSKKLDPVAAGWPPCLRIMAATAMLVKDSAKLTLGQPLTVITPHTLEAIVRQPPDRWITNARLTHYQALLLDTDRVQFGPPVTLNPATLLPVPENQPSPHDCRQVLAETHGTREDLKDQELPDADHTWYTDGSSYLDSGTRRAGAAVVDGHNTIWAQSLPPGTSAQKAELIALTKALELSKGKKANIYTDSRYAFATAHTHGSIYERRGWLTSEGKEIKNKAEIIALLKALFLPQEVAIIHCPGHQKGQDPVAVGNRQADRVARQAAMAEVLTLATEPDNTSHITAGKRTADGSEFEKRTADGSEFESPKKKAKVE

SEQ ID NO: 2013 - protein, 2100 aa, synthetic construct
MPAAKRVKLDGGDKKYSIGLDIGTNSVGWAVITDEYKVPSKKFKVLGNTDRHSIKKNLIGALLFDSGETAEATRLKRTARRRYTRRKNRICYLQEIFSNEMAKVDDSFFHRLEESFLVEEDKKHERHPIFGNIVDEVAYHEKYPTIYHLRKKLVDSTDKADLRLIYLALAHMIKFRGHFLIEGDLNPDNSDVDKLFIQLVQTYNQLFEENPINASGVDAKAILSARLSKSRRLENLIAQLPGEKKNGLFGNLIALSLGLTPNFKSNFDLAEDAKLQLSKDTYDDDLDNLLAQIGDQYADLFLAAKNLSDAILLSDILRVNTEITKAPLSASMIKRYDEHHQDLTLLKALVRQQLPEKYKEIFFDQSKNGYAGYIDGGASQEEFYKFIKPILEKMDGTEELLVKLNREDLLRKQRTFDNGSIPHQIHLGELHAILRRQEDFYPFLKDNREKIEKILTFRIPYYVGPLARGNSRFAWMTRKSEETITPWNFEEVVDKGASAQSFIERMTNFDKNLPNEKVLPKHSLLYEYFTVYNELTKVKYVTEGMRKPAFLSGEQKKAIVDLLFKTNRKVTVKQLKEDYFKKIECFDSVEISGVEDRFNASLGTYHDLLKIIKDKDFLDNEENEDILEDIVLTLTLFEDREMIEERLKTYAHLFDDKVMKQLKRRRYTGWGRLSRKLINGIRDKQSGKTILDFLKSDGFANRNFMQLIHDDSLTFKEDIQKAQVSGQGDSLHEHIANLAGSPAIKKGILQTVKVVDELVKVMGRHKPENIVIEMARENQTTQKGQKNSRERMKRIEEGIKELGSQILKEHPVENTQLQNEKLYLYYLQNGRDMYVDQELDINRLSDYDVDHIVPQSFLKDDSIDNKVLTRSDKARGKSDNVPSEEVVKKMKNYWRQLLNAKLITQRKFDNLTKAERGGLSELDKAGFIKRQLVETRQITKHVAQILDSRMNTKYDENDKLIREVKVITLKSKLVSDFRKDFQFYKVREINNYHHAHDAYLNAVVGTALIKKYPKLESEFVYGDYKVYDVRKMIAKSEQEIGKATAKYFFYSNIMNFFKTEITLANGEIRKRPLIETNGETGEIVWDKGRDFATVRKVLSMPQVNIVKKTEVQTGGFSKESILPKRNSDKLIARKKDWDPKKYGGFDSPTVAYSVLVVAKVEKGKSKKLKSVKELLGITIMERSSFEKNPIDFLEAKGYKEVKKDLIIKLPKYSLFELENGRKRMLASAGELQKGNELALPSKYVNFLYLASHYEKLKGSPEDNEQKQLFVEQHKHYLDEIIEQISEFSKRVILADANLDKVLSAYNKHRDKPIREQAENIIHLFTLTNLGAPAAFKYFDTTIDRKRYTSTKEVLDATLIHQSITGLYETRIDLSQLGGDGGPAPGGGGSSGGTVSLQDEHRLFDIPVTTSLPDVWLQDFPQAWAETGGLGRAKCQAPIIIDLKPTAVPVSIKQYPMSLEAHMGIRQHIIKFLELGVLRPCRSPWNTPLLPVKKPGTQDYRPVQDLREINKRTVDIHPTVPNPYNLLSTLKPDYSWYTVLDLKDAFFCLPLAPQSQELFAFEWKDPERGISGQLTWTRLPQGFKNSPTLFNEALHRDLTDFRTQHPEVTLLQYVDDLLLAAPTKKACTQGTRHLLQELGEKGYRASAKKAQICQTKVTYLGYILSEGKRWLTPGRIETVARIPPPRNPREVREFLGKAGFCRLFIPGFAELAAPLYALTKPSTPFTWQTEHQLAFEALKKALLSAPALGLPDTSKPFTLFLDERQGIAKGVLTQKLGPWKRPVAYLSKKLDPVAAGWPPCLRIMAATAMLVKDSAKLTLGQPLTVITPHTLEAIVRQPPDRWITNARLTHYQALLLDTDRVQFGPPVTLNPATLLPVPENQPSPHDCRQVLAETHGTREDLKDQELPDADHTWYTDGSSYLDSGTRRAGAAVVDGHNTIWAQSLPPGTSAQKAELIALTKALELSKGKKANIYTDSRYAFATAHTHGSIYERRGWLTSEGKEIKNKAEIIALLKALFLPQEVAIIHCPGHQKGQDPVAVGNRQADRVARQAAMAEVLTLATEPDNTSHITAGKRTADGSEFEKRTADGSEFESPKKKAKVE

SEQ ID NO: 2014 - protein, 2102 aa, synthetic construct
MPAAKRVKLDGGDKKYSIGLDIGTNSVGWAVITDEYKVPSKKFKVLGNTDRHSIKKNLIGALLFDSGETAEATRLKRTARRRYTRRKNRICYLQEIFSNEMAKVDDSFFHRLEESFLVEEDKKHERHPIFGNIVDEVAYHEKYPTIYHLRKKLVDSTDKADLRLIYLALAHMIKFRGHFLIEGDLNPDNSDVDKLFIQLVQTYNQLFEENPINASGVDAKAILSARLSKSRRLENLIAQLPGEKKNGLFGNLIALSLGLTPNFKSNFDLAEDAKLQLSKDTYDDDLDNLLAQIGDQYADLFLAAKNLSDAILLSDILRVNTEITKAPLSASMIKRYDEHHQDLTLLKALVRQQLPEKYKEIFFDQSKNGYAGYIDGGASQEEFYKFIKPILEKMDGTEELLVKLNREDLLRKQRTFDNGSIPHQIHLGELHAILRRQEDFYPFLKDNREKIEKILTFRIPYYVGPLARGNSRFAWMTRKSEETITPWNFEEVVDKGASAQSFIERMTNFDKNLPNEKVLPKHSLLYEYFTVYNELTKVKYVTEGMRKPAFLSGEQKKAIVDLLFKTNRKVTVKQLKEDYFKKIECFDSVEISGVEDRFNASLGTYHDLLKIIKDKDFLDNEENEDILEDIVLTLTLFEDREMIEERLKTYAHLFDDKVMKQLKRRRYTGWGRLSRKLINGIRDKQSGKTILDFLKSDGFANRNFMQLIHDDSLTFKEDIQKAQVSGQGDSLHEHIANLAGSPAIKKGILQTVKVVDELVKVMGRHKPENIVIEMARENQTTQKGQKNSRERMKRIEEGIKELGSQILKEHPVENTQLQNEKLYLYYLQNGRDMYVDQELDINRLSDYDVDHIVPQSFLKDDSIDNKVLTRSDKARGKSDNVPSEEVVKKMKNYWRQLLNAKLITQRKFDNLTKAERGGLSELDKAGFIKRQLVETRQITKHVAQILDSRMNTKYDENDKLIREVKVITLKSKLVSDFRKDFQFYKVREINNYHHAHDAYLNAVVGTALIKKYPKLESEFVYGDYKVYDVRKMIAKSEQEIGKATAKYFFYSNIMNFFKTEITLANGEIRKRPLIETNGETGEIVWDKGRDFATVRKVLSMPQVNIVKKTEVQTGGFSKESILPKRNSDKLIARKKDWDPKKYGGFDSPTVAYSVLVVAKVEKGKSKKLKSVKELLGITIMERSSFEKNPIDFLEAKGYKEVKKDLIIKLPKYSLFELENGRKRMLASAGELQKGNELALPSKYVNFLYLASHYEKLKGSPEDNEQKQLFVEQHKHYLDEIIEQISEFSKRVILADANLDKVLSAYNKHRDKPIREQAENIIHLFTLTNLGAPAAFKYFDTTIDRKRYTSTKEVLDATLIHQSITGLYETRIDLSQLGGDGGEAAAKGSSGGGGGTVSLQDEHRLFDIPVTTSLPDVWLQDFPQAWAETGGLGRAKCQAPIIIDLKPTAVPVSIKQYPMSLEAHMGIRQHIIKFLELGVLRPCRSPWNTPLLPVKKPGTQDYRPVQDLREINKRTVDIHPTVPNPYNLLSTLKPDYSWYTVLDLKDAFFCLPLAPQSQELFAFEWKDPERGISGQLTWTRLPQGFKNSPTLFNEALHRDLTDFRTQHPEVTLLQYVDDLLLAAPTKKACTQGTRHLLQELGEKGYRASAKKAQICQTKVTYLGYILSEGKRWLTPGRIETVARIPPPRNPREVREFLGKAGFCRLFIPGFAELAAPLYALTKPSTPFTWQTEHQLAFEALKKALLSAPALGLPDTSKPFTLFLDERQGIAKGVLTQKLGPWKRPVAYLSKKLDPVAAGWPPCLRIMAATAMLVKDSAKLTLGQPLTVITPHTLEAIVRQPPDRWITNARLTHYQALLLDTDRVQFGPPVTLNPATLLPVPENQPSPHDCRQVLAETHGTREDLKDQELPDADHTWYTDGSSYLDSGTRRAGAAVVDGHNTIWAQSLPPGTSAQKAELIALTKALELSKGKKANIYTDSRYAFATAHTHGSIYERRGWLTSEGKEIKNKAEIIALLKALFLPQEVAIIHCPGHQKGQDPVAVGNRQADRVARQAAMAEVLTLATEPDNTSHITAGKRTADGSEFEKRTADGSEFESPKKKAKVE

SEQ ID NO: 2015 - protein, 2100 aa, synthetic construct
MPAAKRVKLDGGDKKYSIGLDIGTNSVGWAVITDEYKVPSKKFKVLGNTDRHSIKKNLIGALLFDSGETAEATRLKRTARRRYTRRKNRICYLQEIFSNEMAKVDDSFFHRLEESFLVEEDKKHERHPIFGNIVDEVAYHEKYPTIYHLRKKLVDSTDKADLRLIYLALAHMIKFRGHFLIEGDLNPDNSDVDKLFIQLVQTYNQLFEENPINASGVDAKAILSARLSKSRRLENLIAQLPGEKKNGLFGNLIALSLGLTPNFKSNFDLAEDAKLQLSKDTYDDDLDNLLAQIGDQYADLFLAAKNLSDAILLSDILRVNTEITKAPLSASMIKRYDEHHQDLTLLKALVRQQLPEKYKEIFFDQSKNGYAGYIDGGASQEEFYKFIKPILEKMDGTEELLVKLNREDLLRKQRTFDNGSIPHQIHLGELHAILRRQEDFYPFLKDNREKIEKILTFRIPYYVGPLARGNSRFAWMTRKSEETITPWNFEEVVDKGASAQSFIERMTNFDKNLPNEKVLPKHSLLYEYFTVYNELTKVKYVTEGMRKPAFLSGEQKKAIVDLLFKTNRKVTVKQLKEDYFKKIECFDSVEISGVEDRFNASLGTYHDLLKIIKDKDFLDNEENEDILEDIVLTLTLFEDREMIEERLKTYAHLFDDKVMKQLKRRRYTGWGRLSRKLINGIRDKQSGKTILDFLKSDGFANRNFMQLIHDDSLTFKEDIQKAQVSGQGDSLHEHIANLAGSPAIKKGILQTVKVVDELVKVMGRHKPENIVIEMARENQTTQKGQKNSRERMKRIEEGIKELGSQILKEHPVENTQLQNEKLYLYYLQNGRDMYVDQELDINRLSDYDVDHIVPQSFLKDDSIDNKVLTRSDKARGKSDNVPSEEVVKKMKNYWRQLLNAKLITQRKFDNLTKAERGGLSELDKAGFIKRQLVETRQITKHVAQILDSRMNTKYDENDKLIREVKVITLKSKLVSDFRKDFQFYKVREINNYHHAHDAYLNAVVGTALIKKYPKLESEFVYGDYKVYDVRKMIAKSEQEIGKATAKYFFYSNIMNFFKTEITLANGEIRKRPLIETNGETGEIVWDKGRDFATVRKVLSMPQVNIVKKTEVQTGGFSKESILPKRNSDKLIARKKDWDPKKYGGFDSPTVAYSVLVVAKVEKGKSKKLKSVKELLGITIMERSSFEKNPIDFLEAKGYKEVKKDLIIKLPKYSLFELENGRKRMLASAGELQKGNELALPSKYVNFLYLASHYEKLKGSPEDNEQKQLFVEQHKHYLDEIIEQISEFSKRVILADANLDKVLSAYNKHRDKPIREQAENIIHLFTLTNLGAPAAFKYFDTTIDRKRYTSTKEVLDATLIHQSITGLYETRIDLSQLGGDGGPAPGGGGGSGGTVSLQDEHRLFDIPVTTSLPDVWLQDFPQAWAETGGLGRAKCQAPIIIDLKPTAVPVSIKQYPMSLEAHMGIRQHIIKFLELGVLRPCRSPWNTPLLPVKKPGTQDYRPVQDLREINKRTVDIHPTVPNPYNLLSTLKPDYSWYTVLDLKDAFFCLPLAPQSQELFAFEWKDPERGISGQLTWTRLPQGFKNSPTLFNEALHRDLTDFRTQHPEVTLLQYVDDLLLAAPTKKACTQGTRHLLQELGEKGYRASAKKAQICQTKVTYLGYILSEGKRWLTPGRIETVARIPPPRNPREVREFLGKAGFCRLFIPGFAELAAPLYALTKPSTPFTWQTEHQLAFEALKKALLSAPALGLPDTSKPFTLFLDERQGIAKGVLTQKLGPWKRPVAYLSKKLDPVAAGWPPCLRIMAATAMLVKDSAKLTLGQPLTVITPHTLEAIVRQPPDRWITNARLTHYQALLLDTDRVQFGPPVTLNPATLLPVPENQPSPHDCRQVLAETHGTREDLKDQELPDADHTWYTDGSSYLDSGTRRAGAAVVDGHNTIWAQSLPPGTSAQKAELIALTKALELSKGKKANIYTDSRYAFATAHTHGSIYERRGWLTSEGKEIKNKAEIIALLKALFLPQEVAIIHCPGHQKGQDPVAVGNRQADRVARQAAMAEVLTLATEPDNTSHITAGKRTADGSEFEKRTADGSEFESPKKKAKVE

SEQ ID NO: 2016 - protein, 2095 aa, synthetic construct
MPAAKRVKLDGGDKKYSIGLDIGTNSVGWAVITDEYKVPSKKFKVLGNTDRHSIKKNLIGALLFDSGETAEATRLKRTARRRYTRRKNRICYLQEIFSNEMAKVDDSFFHRLEESFLVEEDKKHERHPIFGNIVDEVAYHEKYPTIYHLRKKLVDSTDKADLRLIYLALAHMIKFRGHFLIEGDLNPDNSDVDKLFIQLVQTYNQLFEENPINASGVDAKAILSARLSKSRRLENLIAQLPGEKKNGLFGNLIALSLGLTPNFKSNFDLAEDAKLQLSKDTYDDDLDNLLAQIGDQYADLFLAAKNLSDAILLSDILRVNTEITKAPLSASMIKRYDEHHQDLTLLKALVRQQLPEKYKEIFFDQSKNGYAGYIDGGASQEEFYKFIKPILEKMDGTEELLVKLNREDLLRKQRTFDNGSIPHQIHLGELHAILRRQEDFYPFLKDNREKIEKILTFRIPYYVGPLARGNSRFAWMTRKSEETITPWNFEEVVDKGASAQSFIERMTNFDKNLPNEKVLPKHSLLYEYFTVYNELTKVKYVTEGMRKPAFLSGEQKKAIVDLLFKTNRKVTVKQLKEDYFKKIECFDSVEISGVEDRFNASLGTYHDLLKIIKDKDFLDNEENEDILEDIVLTLTLFEDREMIEERLKTYAHLFDDKVMKQLKRRRYTGWGRLSRKLINGIRDKQSGKTILDFLKSDGFANRNFMQLIHDDSLTFKEDIQKAQVSGQGDSLHEHIANLAGSPAIKKGILQTVKVVDELVKVMGRHKPENIVIEMARENQTTQKGQKNSRERMKRIEEGIKELGSQILKEHPVENTQLQNEKLYLYYLQNGRDMYVDQELDINRLSDYDVDHIVPQSFLKDDSIDNKVLTRSDKARGKSDNVPSEEVVKKMKNYWRQLLNAKLITQRKFDNLTKAERGGLSELDKAGFIKRQLVETRQITKHVAQILDSRMNTKYDENDKLIREVKVITLKSKLVSDFRKDFQFYKVREINNYHHAHDAYLNAVVGTALIKKYPKLESEFVYGDYKVYDVRKMIAKSEQEIGKATAKYFFYSNIMNFFKTEITLANGEIRKRPLIETNGETGEIVWDKGRDFATVRKVLSMPQVNIVKKTEVQTGGFSKESILPKRNSDKLIARKKDWDPKKYGGFDSPTVAYSVLVVAKVEKGKSKKLKSVKELLGITIMERSSFEKNPIDFLEAKGYKEVKKDLIIKLPKYSLFELENGRKRMLASAGELQKGNELALPSKYVNFLYLASHYEKLKGSPEDNEQKQLFVEQHKHYLDEIIEQISEFSKRVILADANLDKVLSAYNKHRDKPIREQAENIIHLFTLTNLGAPAAFKYFDTTIDRKRYTSTKEVLDATLIHQSITGLYETRIDLSQLGGDGGGGGGGGTVSLQDEHRLFDIPVTTSLPDVWLQDFPQAWAETGGLGRAKCQAPIIIDLKPTAVPVSIKQYPMSLEAHMGIRQHIIKFLELGVLRPCRSPWNTPLLPVKKPGTQDYRPVQDLREINKRTVDIHPTVPNPYNLLSTLKPDYSWYTVLDLKDAFFCLPLAPQSQELFAFEWKDPERGISGQLTWTRLPQGFKNSPTLFNEALHRDLTDFRTQHPEVTLLQYVDDLLLAAPTKKACTQGTRHLLQELGEKGYRASAKKAQICQTKVTYLGYILSEGKRWLTPGRIETVARIPPPRNPREVREFLGKAGFCRLFIPGFAELAAPLYALTKPSTPFTWQTEHQLAFEALKKALLSAPALGLPDTSKPFTLFLDERQGIAKGVLTQKLGPWKRPVAYLSKKLDPVAAGWPPCLRIMAATAMLVKDSAKLTLGQPLTVITPHTLEAIVRQPPDRWITNARLTHYQALLLDTDRVQFGPPVTLNPATLLPVPENQPSPHDCRQVLAETHGTREDLKDQELPDADHTWYTDGSSYLDSGTRRAGAAVVDGHNTIWAQSLPPGTSAQKAELIALTKALELSKGKKANIYTDSRYAFATAHTHGSIYERRGWLTSEGKEIKNKAEIIALLKALFLPQEVAIIHCPGHQKGQDPVAVGNRQADRVARQAAMAEVLTLATEPDNTSHITAGKRTADGSEFEKRTADGSEFESPKKKAKVE

SEQ ID NO: 2017 - protein, 2102 aa, synthetic construct
MPAAKRVKLDGGDKKYSIGLDIGTNSVGWAVITDEYKVPSKKFKVLGNTDRHSIKKNLIGALLFDSGETAEATRLKRTARRRYTRRKNRICYLQEIFSNEMAKVDDSFFHRLEESFLVEEDKKHERHPIFGNIVDEVAYHEKYPTIYHLRKKLVDSTDKADLRLIYLALAHMIKFRGHFLIEGDLNPDNSDVDKLFIQLVQTYNQLFEENPINASGVDAKAILSARLSKSRRLENLIAQLPGEKKNGLFGNLIALSLGLTPNFKSNFDLAEDAKLQLSKDTYDDDLDNLLAQIGDQYADLFLAAKNLSDAILLSDILRVNTEITKAPLSASMIKRYDEHHQDLTLLKALVRQQLPEKYKEIFFDQSKNGYAGYIDGGASQEEFYKFIKPILEKMDGTEELLVKLNREDLLRKQRTFDNGSIPHQIHLGELHAILRRQEDFYPFLKDNREKIEKILTFRIPYYVGPLARGNSRFAWMTRKSEETITPWNFEEVVDKGASAQSFIERMTNFDKNLPNEKVLPKHSLLYEYFTVYNELTKVKYVTEGMRKPAFLSGEQKKAIVDLLFKTNRKVTVKQLKEDYFKKIECFDSVEISGVEDRFNASLGTYHDLLKIIKDKDFLDNEENEDILEDIVLTLTLFEDREMIEERLKTYAHLFDDKVMKQLKRRRYTGWGRLSRKLINGIRDKQSGKTILDFLKSDGFANRNFMQLIHDDSLTFKEDIQKAQVSGQGDSLHEHIANLAGSPAIKKGILQTVKVVDELVKVMGRHKPENIVIEMARENQTTQKGQKNSRERMKRIEEGIKELGSQILKEHPVENTQLQNEKLYLYYLQNGRDMYVDQELDINRLSDYDVDHIVPQSFLKDDSIDNKVLTRSDKARGKSDNVPSEEVVKKMKNYWRQLLNAKLITQRKFDNLTKAERGGLSELDKAGFIKRQLVETRQITKHVAQILDSRMNTKYDENDKLIREVKVITLKSKLVSDFRKDFQFYKVREINNYHHAHDAYLNAVVGTALIKKYPKLESEFVYGDYKVYDVRKMIAKSEQEIGKATAKYFFYSNIMNFFKTEITLANGEIRKRPLIETNGETGEIVWDKGRDFATVRKVLSMPQVNIVKKTEVQTGGFSKESILPKRNSDKLIARKKDWDPKKYGGFDSPTVAYSVLVVAKVEKGKSKKLKSVKELLGITIMERSSFEKNPIDFLEAKGYKEVKKDLIIKLPKYSLFELENGRKRMLASAGELQKGNELALPSKYVNFLYLASHYEKLKGSPEDNEQKQLFVEQHKHYLDEIIEQISEFSKRVILADANLDKVLSAYNKHRDKPIREQAENIIHLFTLTNLGAPAAFKYFDTTIDRKRYTSTKEVLDATLIHQSITGLYETRIDLSQLGGDGGGGGEAAAKGSSGGTVSLQDEHRLFDIPVTTSLPDVWLQDFPQAWAETGGLGRAKCQAPIIIDLKPTAVPVSIKQYPMSLEAHMGIRQHIIKFLELGVLRPCRSPWNTPLLPVKKPGTQDYRPVQDLREINKRTVDIHPTVPNPYNLLSTLKPDYSWYTVLDLKDAFFCLPLAPQSQELFAFEWKDPERGISGQLTWTRLPQGFKNSPTLFNEALHRDLTDFRTQHPEVTLLQYVDDLLLAAPTKKACTQGTRHLLQELGEKGYRASAKKAQICQTKVTYLGYILSEGKRWLTPGRIETVARIPPPRNPREVREFLGKAGFCRLFIPGFAELAAPLYALTKPSTPFTWQTEHQLAFEALKKALLSAPALGLPDTSKPFTLFLDERQGIAKGVLTQKLGPWKRPVAYLSKKLDPVAAGWPPCLRIMAATAMLVKDSAKLTLGQPLTVITPHTLEAIVRQPPDRWITNARLTHYQALLLDTDRVQFGPPVTLNPATLLPVPENQPSPHDCRQVLAETHGTREDLKDQELPDADHTWYTDGSSYLDSGTRRAGAAVVDGHNTIWAQSLPPGTSAQKAELIALTKALELSKGKKANIYTDSRYAFATAHTHGSIYERRGWLTSEGKEIKNKAEIIALLKALFLPQEVAIIHCPGHQKGQDPVAVGNRQADRVARQAAMAEVLTLATEPDNTSHITAGKRTADGSEFEKRTADGSEFESPKKKAKVE

SEQ ID NO: 2018 - protein, 2104 aa, synthetic construct
MPAAKRVKLDGGDKKYSIGLDIGTNSVGWAVITDEYKVPSKKFKVLGNTDRHSIKKNLIGALLFDSGETAEATRLKRTARRRYTRRKNRICYLQEIFSNEMAKVDDSFFHRLEESFLVEEDKKHERHPIFGNIVDEVAYHEKYPTIYHLRKKLVDSTDKADLRLIYLALAHMIKFRGHFLIEGDLNPDNSDVDKLFIQLVQTYNQLFEENPINASGVDAKAILSARLSKSRRLENLIAQLPGEKKNGLFGNLIALSLGLTPNFKSNFDLAEDAKLQLSKDTYDDDLDNLLAQIGDQYADLFLAAKNLSDAILLSDILRVNTEITKAPLSASMIKRYDEHHQDLTLLKALVRQQLPEKYKEIFFDQSKNGYAGYIDGGASQEEFYKFIKPILEKMDGTEELLVKLNREDLLRKQRTFDNGSIPHQIHLGELHAILRRQEDFYPFLKDNREKIEKILTFRIPYYVGPLARGNSRFAWMTRKSEETITPWNFEEVVDKGASAQSFIERMTNFDKNLPNEKVLPKHSLLYEYFTVYNELTKVKYVTEGMRKPAFLSGEQKKAIVDLLFKTNRKVTVKQLKEDYFKKIECFDSVEISGVEDRFNASLGTYHDLLKIIKDKDFLDNEENEDILEDIVLTLTLFEDREMIEERLKTYAHLFDDKVMKQLKRRRYTGWGRLSRKLINGIRDKQSGKTILDFLKSDGFANRNFMQLIHDDSLTFKEDIQKAQVSGQGDSLHEHIANLAGSPAIKKGILQTVKVVDELVKVMGRHKPENIVIEMARENQTTQKGQKNSRERMKRIEEGIKELGSQILKEHPVENTQLQNEKLYLYYLQNGRDMYVDQELDINRLSDYDVDHIVPQSFLKDDSIDNKVLTRSDKARGKSDNVPSEEVVKKMKNYWRQLLNAKLITQRKFDNLTKAERGGLSELDKAGFIKRQLVETRQITKHVAQILDSRMNTKYDENDKLIREVKVITLKSKLVSDFRKDFQFYKVREINNYHHAHDAYLNAVVGTALIKKYPKLESEFVYGDYKVYDVRKMIAKSEQEIGKATAKYFFYSNIMNFFKTEITLANGEIRKRPLIETNGETGEIVWDKGRDFATVRKVLSMPQVNIVKKTEVQTGGFSKESILPKRNSDKLIARKKDWDPKKYGGFDSPTVAYSVLVVAKVEKGKSKKLKSVKELLGITIMERSSFEKNPIDFLEAKGYKEVKKDLIIKLPKYSLFELENGRKRMLASAGELQKGNELALPSKYVNFLYLASHYEKLKGSPEDNEQKQLFVEQHKHYLDEIIEQISEFSKRVILADANLDKVLSAYNKHRDKPIREQAENIIHLFTLTNLGAPAAFKYFDTTIDRKRYTSTKEVLDATLIHQSITGLYETRIDLSQLGGDGGPAPAPAPAPAPAPGGTVSLQDEHRLFDIPVTTSLPDVWLQDFPQAWAETGGLGRAKCQAPIIIDLKPTAVPVSIKQYPMSLEAHMGIRQHIIKFLELGVLRPCRSPWNTPLLPVKKPGTQDYRPVQDLREINKRTVDIHPTVPNPYNLLSTLKPDYSWYTVLDLKDAFFCLPLAPQSQELFAFEWKDPERGISGQLTWTRLPQGFKNSPTLFNEALHRDLTDFRTQHPEVTLLQYVDDLLLAAPTKKACTQGTRHLLQELGEKGYRASAKKAQICQTKVTYLGYILSEGKRWLTPGRIETVARIPPPRNPREVREFLGKAGFCRLFIPGFAELAAPLYALTKPSTPFTWQTEHQLAFEALKKALLSAPALGLPDTSKPFTLFLDERQGIAKGVLTQKLGPWKRPVAYLSKKLDPVAAGWPPCLRIMAATAMLVKDSAKLTLGQPLTVITPHTLEAIVRQPPDRWITNARLTHYQALLLDTDRVQFGPPVTLNPATLLPVPENQPSPHDCRQVLAETHGTREDLKDQELPDADHTWYTDGSSYLDSGTRRAGAAVVDGHNTIWAQSLPPGTSAQKAELIALTKALELSKGKKANIYTDSRYAFATAHTHGSIYERRGWLTSEGKEIKNKAEIIALLKALFLPQEVAIIHCPGHQKGQDPVAVGNRQADRVARQAAMAEVLTLATEPDNTSHITAGKRTADGSEFEKRTADGSEFESPKKKAKVE

SEQ ID NO: 2019 - protein, 2100 aa, synthetic construct
MPAAKRVKLDGGDKKYSIGLDIGTNSVGWAVITDEYKVPSKKFKVLGNTDRHSIKKNLIGALLFDSGETAEATRLKRTARRRYTRRKNRICYLQEIFSNEMAKVDDSFFHRLEESFLVEEDKKHERHPIFGNIVDEVAYHEKYPTIYHLRKKLVDSTDKADLRLIYLALAHMIKFRGHFLIEGDLNPDNSDVDKLFIQLVQTYNQLFEENPINASGVDAKAILSARLSKSRRLENLIAQLPGEKKNGLFGNLIALSLGLTPNFKSNFDLAEDAKLQLSKDTYDDDLDNLLAQIGDQYADLFLAAKNLSDAILLSDILRVNTEITKAPLSASMIKRYDEHHQDLTLLKALVRQQLPEKYKEIFFDQSKNGYAGYIDGGASQEEFYKFIKPILEKMDGTEELLVKLNREDLLRKQRTFDNGSIPHQIHLGELHAILRRQEDFYPFLKDNREKIEKILTFRIPYYVGPLARGNSRFAWMTRKSEETITPWNFEEVVDKGASAQSFIERMTNFDKNLPNEKVLPKHSLLYEYFTVYNELTKVKYVTEGMRKPAFLSGEQKKAIVDLLFKTNRKVTVKQLKEDYFKKIECFDSVEISGVEDRFNASLGTYHDLLKIIKDKDFLDNEENEDILEDIVLTLTLFEDREMIEERLKTYAHLFDDKVMKQLKRRRYTGWGRLSRKLINGIRDKQSGKTILDFLKSDGFANRNFMQLIHDDSLTFKEDIQKAQVSGQGDSLHEHIANLAGSPAIKKGILQTVKVVDELVKVMGRHKPENIVIEMARENQTTQKGQKNSRERMKRIEEGIKELGSQILKEHPVENTQLQNEKLYLYYLQNGRDMYVDQELDINRLSDYDVDHIVPQSFLKDDSIDNKVLTRSDKARGKSDNVPSEEVVKKMKNYWRQLLNAKLITQRKFDNLTKAERGGLSELDKAGFIKRQLVETRQITKHVAQILDSRMNTKYDENDKLIREVKVITLKSKLVSDFRKDFQFYKVREINNYHHAHDAYLNAVVGTALIKKYPKLESEFVYGDYKVYDVRKMIAKSEQEIGKATAKYFFYSNIMNFFKTEITLANGEIRKRPLIETNGETGEIVWDKGRDFATVRKVLSMPQVNIVKKTEVQTGGFSKESILPKRNSDKLIARKKDWDPKKYGGFDSPTVAYSVLVVAKVEKGKSKKLKSVKELLGITIMERSSFEKNPIDFLEAKGYKEVKKDLIIKLPKYSLFELENGRKRMLASAGELQKGNELALPSKYVNFLYLASHYEKLKGSPEDNEQKQLFVEQHKHYLDEIIEQISEFSKRVILADANLDKVLSAYNKHRDKPIREQAENIIHLFTLTNLGAPAAFKYFDTTIDRKRYTSTKEVLDATLIHQSITGLYETRIDLSQLGGDGGPAPGSSGGGGGTVSLQDEHRLFDIPVTTSLPDVWLQDFPQAWAETGGLGRAKCQAPIIIDLKPTAVPVSIKQYPMSLEAHMGIRQHIIKFLELGVLRPCRSPWNTPLLPVKKPGTQDYRPVQDLREINKRTVDIHPTVPNPYNLLSTLKPDYSWYTVLDLKDAFFCLPLAPQSQELFAFEWKDPERGISGQLTWTRLPQGFKNSPTLFNEALHRDLTDFRTQHPEVTLLQYVDDLLLAAPTKKACTQGTRHLLQELGEKGYRASAKKAQICQTKVTYLGYILSEGKRWLTPGRIETVARIPPPRNPREVREFLGKAGFCRLFIPGFAELAAPLYALTKPSTPFTWQTEHQLAFEALKKALLSAPALGLPDTSKPFTLFLDERQGIAKGVLTQKLGPWKRPVAYLSKKLDPVAAGWPPCLRIMAATAMLVKDSAKLTLGQPLTVITPHTLEAIVRQPPDRWITNARLTHYQALLLDTDRVQFGPPVTLNPATLLPVPENQPSPHDCRQVLAETHGTREDLKDQELPDADHTWYTDGSSYLDSGTRRAGAAVVDGHNTIWAQSLPPGTSAQKAELIALTKALELSKGKKANIYTDSRYAFATAHTHGSIYERRGWLTSEGKEIKNKAEIIALLKALFLPQEVAIIHCPGHQKGQDPVAVGNRQADRVARQAAMAEVLTLATEPDNTSHITAGKRTADGSEFEKRTADGSEFESPKKKAKVE

SEQ ID NO: 2020 - protein, 2100 aa, synthetic construct
MPAAKRVKLDGGDKKYSIGLDIGTNSVGWAVITDEYKVPSKKFKVLGNTDRHSIKKNLIGALLFDSGETAEATRLKRTARRRYTRRKNRICYLQEIFSNEMAKVDDSFFHRLEESFLVEEDKKHERHPIFGNIVDEVAYHEKYPTIYHLRKKLVDSTDKADLRLIYLALAHMIKFRGHFLIEGDLNPDNSDVDKLFIQLVQTYNQLFEENPINASGVDAKAILSARLSKSRRLENLIAQLPGEKKNGLFGNLIALSLGLTPNFKSNFDLAEDAKLQLSKDTYDDDLDNLLAQIGDQYADLFLAAKNLSDAILLSDILRVNTEITKAPLSASMIKRYDEHHQDLTLLKALVRQQLPEKYKEIFFDQSKNGYAGYIDGGASQEEFYKFIKPILEKMDGTEELLVKLNREDLLRKQRTFDNGSIPHQIHLGELHAILRRQEDFYPFLKDNREKIEKILTFRIPYYVGPLARGNSRFAWMTRKSEETITPWNFEEVVDKGASAQSFIERMTNFDKNLPNEKVLPKHSLLYEYFTVYNELTKVKYVTEGMRKPAFLSGEQKKAIVDLLFKTNRKVTVKQLKEDYFKKIECFDSVEISGVEDRFNASLGTYHDLLKIIKDKDFLDNEENEDILEDIVLTLTLFEDREMIEERLKTYAHLFDDKVMKQLKRRRYTGWGRLSRKLINGIRDKQSGKTILDFLKSDGFANRNFMQLIHDDSLTFKEDIQKAQVSGQGDSLHEHIANLAGSPAIKKGILQTVKVVDELVKVMGRHKPENIVIEMARENQTTQKGQKNSRERMKRIEEGIKELGSQILKEHPVENTQLQNEKLYLYYLQNGRDMYVDQELDINRLSDYDVDHIVPQSFLKDDSIDNKVLTRSDKARGKSDNVPSEEVVKKMKNYWRQLLNAKLITQRKFDNLTKAERGGLSELDKAGFIKRQLVETRQITKHVAQILDSRMNTKYDENDKLIREVKVITLKSKLVSDFRKDFQFYKVREINNYHHAHDAYLNAVVGTALIKKYPKLESEFVYGDYKVYDVRKMIAKSEQEIGKATAKYFFYSNIMNFFKTEITLANGEIRKRPLIETNGETGEIVWDKGRDFATVRKVLSMPQVNIVKKTEVQTGGFSKESILPKRNSDKLIARKKDWDPKKYGGFDSPTVAYSVLVVAKVEKGKSKKLKSVKELLGITIMERSSFEKNPIDFLEAKGYKEVKKDLIIKLPKYSLFELENGRKRMLASAGELQKGNELALPSKYVNFLYLASHYEKLKGSPEDNEQKQLFVEQHKHYLDEIIEQISEFSKRVILADANLDKVLSAYNKHRDKPIREQAENIIHLFTLTNLGAPAAFKYFDTTIDRKRYTSTKEVLDATLIHQSITGLYETRIDLSQLGGDGGGSSGGSPAPGGTVSLQDEHRLFDIPVTTSLPDVWLQDFPQAWAETGGLGRAKCQAPIIIDLKPTAVPVSIKQYPMSLEAHMGIRQHIIKFLELGVLRPCRSPWNTPLLPVKKPGTQDYRPVQDLREINKRTVDIHPTVPNPYNLLSTLKPDYSWYTVLDLKDAFFCLPLAPQSQELFAFEWKDPERGISGQLTWTRLPQGFKNSPTLFNEALHRDLTDFRTQHPEVTLLQYVDDLLLAAPTKKACTQGTRHLLQELGEKGYRASAKKAQICQTKVTYLGYILSEGKRWLTPGRIETVARIPPPRNPREVREFLGKAGFCRLFIPGFAELAAPLYALTKPSTPFTWQTEHQLAFEALKKALLSAPALGLPDTSKPFTLFLDERQGIAKGVLTQKLGPWKRPVAYLSKKLDPVAAGWPPCLRIMAATAMLVKDSAKLTLGQPLTVITPHTLEAIVRQPPDRWITNARLTHYQALLLDTDRVQFGPPVTLNPATLLPVPENQPSPHDCRQVLAETHGTREDLKDQELPDADHTWYTDGSSYLDSGTRRAGAAVVDGHNTIWAQSLPPGTSAQKAELIALTKALELSKGKKANIYTDSRYAFATAHTHGSIYERRGWLTSEGKEIKNKAEIIALLKALFLPQEVAIIHCPGHQKGQDPVAVGNRQADRVARQAAMAEVLTLATEPDNTSHITAGKRTADGSEFEKRTADGSEFESPKKKAKVE

SEQ ID NO: 2021 - protein, 2097 aa, synthetic construct
MPAAKRVKLDGGDKKYSIGLDIGTNSVGWAVITDEYKVPSKKFKVLGNTDRHSIKKNLIGALLFDSGETAEATRLKRTARRRYTRRKNRICYLQEIFSNEMAKVDDSFFHRLEESFLVEEDKKHERHPIFGNIVDEVAYHEKYPTIYHLRKKLVDSTDKADLRLIYLALAHMIKFRGHFLIEGDLNPDNSDVDKLFIQLVQTYNQLFEENPINASGVDAKAILSARLSKSRRLENLIAQLPGEKKNGLFGNLIALSLGLTPNFKSNFDLAEDAKLQLSKDTYDDDLDNLLAQIGDQYADLFLAAKNLSDAILLSDILRVNTEITKAPLSASMIKRYDEHHQDLTLLKALVRQQLPEKYKEIFFDQSKNGYAGYIDGGASQEEFYKFIKPILEKMDGTEELLVKLNREDLLRKQRTFDNGSIPHQIHLGELHAILRRQEDFYPFLKDNREKIEKILTFRIPYYVGPLARGNSRFAWMTRKSEETITPWNFEEVVDKGASAQSFIERMTNFDKNLPNEKVLPKHSLLYEYFTVYNELTKVKYVTEGMRKPAFLSGEQKKAIVDLLFKTNRKVTVKQLKEDYFKKIECFDSVEISGVEDRFNASLGTYHDLLKIIKDKDFLDNEENEDILEDIVLTLTLFEDREMIEERLKTYAHLFDDKVMKQLKRRRYTGWGRLSRKLINGIRDKQSGKTILDFLKSDGFANRNFMQLIHDDSLTFKEDIQKAQVSGQGDSLHEHIANLAGSPAIKKGILQTVKVVDELVKVMGRHKPENIVIEMARENQTTQKGQKNSRERMKRIEEGIKELGSQILKEHPVENTQLQNEKLYLYYLQNGRDMYVDQELDINRLSDYDVDHIVPQSFLKDDSIDNKVLTRSDKARGKSDNVPSEEVVKKMKNYWRQLLNAKLITQRKFDNLTKAERGGLSELDKAGFIKRQLVETRQITKHVAQILDSRMNTKYDENDKLIREVKVITLKSKLVSDFRKDFQFYKVREINNYHHAHDAYLNAVVGTALIKKYPKLESEFVYGDYKVYDVRKMIAKSEQEIGKATAKYFFYSNIMNFFKTEITLANGEIRKRPLIETNGETGEIVWDKGRDFATVRKVLSMPQVNIVKKTEVQTGGFSKESILPKRNSDKLIARKKDWDPKKYGGFDSPTVAYSVLVVAKVEKGKSKKLKSVKELLGITIMERSSFEKNPIDFLEAKGYKEVKKDLIIKLPKYSLFELENGRKRMLASAGELQKGNELALPSKYVNFLYLASHYEKLKGSPEDNEQKQLFVEQHKHYLDEIIEQISEFSKRVILADANLDKVLSAYNKHRDKPIREQAENIIHLFTLTNLGAPAAFKYFDTTIDRKRYTSTKEVLDATLIHQSITGLYETRIDLSQLGGDGGGGSPAPGGTVSLQDEHRLFDIPVTTSLPDVWLQDFPQAWAETGGLGRAKCQAPIIIDLKPTAVPVSIKQYPMSLEAHMGIRQHIIKFLELGVLRPCRSPWNTPLLPVKKPGTQDYRPVQDLREINKRTVDIHPTVPNPYNLLSTLKPDYSWYTVLDLKDAFFCLPLAPQSQELFAFEWKDPERGISGQLTWTRLPQGFKNSPTLFNEALHRDLTDFRTQHPEVTLLQYVDDLLLAAPTKKACTQGTRHLLQELGEKGYRASAKKAQICQTKVTYLGYILSEGKRWLTPGRIETVARIPPPRNPREVREFLGKAGFCRLFIPGFAELAAPLYALTKPSTPFTWQTEHQLAFEALKKALLSAPALGLPDTSKPFTLFLDERQGIAKGVLTQKLGPWKRPVAYLSKKLDPVAAGWPPCLRIMAATAMLVKDSAKLTLGQPLTVITPHTLEAIVRQPPDRWITNARLTHYQALLLDTDRVQFGPPVTLNPATLLPVPENQPSPHDCRQVLAETHGTREDLKDQELPDADHTWYTDGSSYLDSGTRRAGAAVVDGHNTIWAQSLPPGTSAQKAELIALTKALELSKGKKANIYTDSRYAFATAHTHGSIYERRGWLTSEGKEIKNKAEIIALLKALFLPQEVAIIHCPGHQKGQDPVAVGNRQADRVARQAAMAEVLTLATEPDNTSHITAGKRTADGSEFEKRTADGSEFESPKKKAKVE

SEQ ID NO: 2022 - protein, 2102 aa, synthetic construct
MPAAKRVKLDGGDKKYSIGLDIGTNSVGWAVITDEYKVPSKKFKVLGNTDRHSIKKNLIGALLFDSGETAEATRLKRTARRRYTRRKNRICYLQEIFSNEMAKVDDSFFHRLEESFLVEEDKKHERHPIFGNIVDEVAYHEKYPTIYHLRKKLVDSTDKADLRLIYLALAHMIKFRGHFLIEGDLNPDNSDVDKLFIQLVQTYNQLFEENPINASGVDAKAILSARLSKSRRLENLIAQLPGEKKNGLFGNLIALSLGLTPNFKSNFDLAEDAKLQLSKDTYDDDLDNLLAQIGDQYADLFLAAKNLSDAILLSDILRVNTEITKAPLSASMIKRYDEHHQDLTLLKALVRQQLPEKYKEIFFDQSKNGYAGYIDGGASQEEFYKFIKPILEKMDGTEELLVKLNREDLLRKQRTFDNGSIPHQIHLGELHAILRRQEDFYPFLKDNREKIEKILTFRIPYYVGPLARGNSRFAWMTRKSEETITPWNFEEVVDKGASAQSFIERMTNFDKNLPNEKVLPKHSLLYEYFTVYNELTKVKYVTEGMRKPAFLSGEQKKAIVDLLFKTNRKVTVKQLKEDYFKKIECFDSVEISGVEDRFNASLGTYHDLLKIIKDKDFLDNEENEDILEDIVLTLTLFEDREMIEERLKTYAHLFDDKVMKQLKRRRYTGWGRLSRKLINGIRDKQSGKTILDFLKSDGFANRNFMQLIHDDSLTFKEDIQKAQVSGQGDSLHEHIANLAGSPAIKKGILQTVKVVDELVKVMGRHKPENIVIEMARENQTTQKGQKNSRERMKRIEEGIKELGSQILKEHPVENTQLQNEKLYLYYLQNGRDMYVDQELDINRLSDYDVDHIVPQSFLKDDSIDNKVLTRSDKARGKSDNVPSEEVVKKMKNYWRQLLNAKLITQRKFDNLTKAERGGLSELDKAGFIKRQLVETRQITKHVAQILDSRMNTKYDENDKLIREVKVITLKSKLVSDFRKDFQFYKVREINNYHHAHDAYLNAVVGTALIKKYPKLESEFVYGDYKVYDVRKMIAKSEQEIGKATAKYFFYSNIMNFFKTEITLANGEIRKRPLIETNGETGEIVWDKGRDFATVRKVLSMPQVNIVKKTEVQTGGFSKESILPKRNSDKLIARKKDWDPKKYGGFDSPTVAYSVLVVAKVEKGKSKKLKSVKELLGITIMERSSFEKNPIDFLEAKGYKEVKKDLIIKLPKYSLFELENGRKRMLASAGELQKGNELALPSKYVNFLYLASHYEKLKGSPEDNEQKQLFVEQHKHYLDEIIEQISEFSKRVILADANLDKVLSAYNKHRDKPIREQAENIIHLFTLTNLGAPAAFKYFDTTIDRKRYTSTKEVLDATLIHQSITGLYETRIDLSQLGGDGGEAAAKPAPGSSGGTVSLQDEHRLFDIPVTTSLPDVWLQDFPQAWAETGGLGRAKCQAPIIIDLKPTAVPVSIKQYPMSLEAHMGIRQHIIKFLELGVLRPCRSPWNTPLLPVKKPGTQDYRPVQDLREINKRTVDIHPTVPNPYNLLSTLKPDYSWYTVLDLKDAFFCLPLAPQSQELFAFEWKDPERGISGQLTWTRLPQGFKNSPTLFNEALHRDLTDFRTQHPEVTLLQYVDDLLLAAPTKKACTQGTRHLLQELGEKGYRASAKKAQICQTKVTYLGYILSEGKRWLTPGRIETVARIPPPRNPREVREFLGKAGFCRLFIPGFAELAAPLYALTKPSTPFTWQTEHQLAFEALKKALLSAPALGLPDTSKPFTLFLDERQGIAKGVLTQKLGPWKRPVAYLSKKLDPVAAGWPPCLRIMAATAMLVKDSAKLTLGQPLTVITPHTLEAIVRQPPDRWITNARLTHYQALLLDTDRVQFGPPVTLNPATLLPVPENQPSPHDCRQVLAETHGTREDLKDQELPDADHTWYTDGSSYLDSGTRRAGAAVVDGHNTIWAQSLPPGTSAQKAELIALTKALELSKGKKANIYTDSRYAFATAHTHGSIYERRGWLTSEGKEIKNKAEIIALLKALFLPQEVAIIHCPGHQKGQDPVAVGNRQADRVARQAAMAEVLTLATEPDNTSHITAGKRTADGSEFEKRTADGSEFESPKKKAKVE

SEQ ID NO: 2023 - protein, 2094 aa, synthetic construct
MPAAKRVKLDGGDKKYSIGLDIGTNSVGWAVITDEYKVPSKKFKVLGNTDRHSIKKNLIGALLFDSGETAEATRLKRTARRRYTRRKNRICYLQEIFSNEMAKVDDSFFHRLEESFLVEEDKKHERHPIFGNIVDEVAYHEKYPTIYHLRKKLVDSTDKADLRLIYLALAHMIKFRGHFLIEGDLNPDNSDVDKLFIQLVQTYNQLFEENPINASGVDAKAILSARLSKSRRLENLIAQLPGEKKNGLFGNLIALSLGLTPNFKSNFDLAEDAKLQLSKDTYDDDLDNLLAQIGDQYADLFLAAKNLSDAILLSDILRVNTEITKAPLSASMIKRYDEHHQDLTLLKALVRQQLPEKYKEIFFDQSKNGYAGYIDGGASQEEFYKFIKPILEKMDGTEELLVKLNREDLLRKQRTFDNGSIPHQIHLGELHAILRRQEDFYPFLKDNREKIEKILTFRIPYYVGPLARGNSRFAWMTRKSEETITPWNFEEVVDKGASAQSFIERMTNFDKNLPNEKVLPKHSLLYEYFTVYNELTKVKYVTEGMRKPAFLSGEQKKAIVDLLFKTNRKVTVKQLKEDYFKKIECFDSVEISGVEDRFNASLGTYHDLLKIIKDKDFLDNEENEDILEDIVLTLTLFEDREMIEERLKTYAHLFDDKVMKQLKRRRYTGWGRLSRKLINGIRDKQSGKTILDFLKSDGFANRNFMQLIHDDSLTFKEDIQKAQVSGQGDSLHEHIANLAGSPAIKKGILQTVKVVDELVKVMGRHKPENIVIEMARENQTTQKGQKNSRERMKRIEEGIKELGSQILKEHPVENTQLQNEKLYLYYLQNGRDMYVDQELDINRLSDYDVDHIVPQSFLKDDSIDNKVLTRSDKARGKSDNVPSEEVVKKMKNYWRQLLNAKLITQRKFDNLTKAERGGLSELDKAGFIKRQLVETRQITKHVAQILDSRMNTKYDENDKLIREVKVITLKSKLVSDFRKDFQFYKVREINNYHHAHDAYLNAVVGTALIKKYPKLESEFVYGDYKVYDVRKMIAKSEQEIGKATAKYFFYSNIMNFFKTEITLANGEIRKRPLIETNGETGEIVWDKGRDFATVRKVLSMPQVNIVKKTEVQTGGFSKESILPKRNSDKLIARKKDWDPKKYGGFDSPTVAYSVLVVAKVEKGKSKKLKSVKELLGITIMERSSFEKNPIDFLEAKGYKEVKKDLIIKLPKYSLFELENGRKRMLASAGELQKGNELALPSKYVNFLYLASHYEKLKGSPEDNEQKQLFVEQHKHYLDEIIEQISEFSKRVILADANLDKVLSAYNKHRDKPIREQAENIIHLFTLTNLGAPAAFKYFDTTIDRKRYTSTKEVLDATLIHQSITGLYETRIDLSQLGGDGGPAPGGTVSLQDEHRLFDIPVTTSLPDVWLQDFPQAWAETGGLGRAKCQAPIIIDLKPTAVPVSIKQYPMSLEAHMGIRQHIIKFLELGVLRPCRSPWNTPLLPVKKPGTQDYRPVQDLREINKRTVDIHPTVPNPYNLLSTLKPDYSWYTVLDLKDAFFCLPLAPQSQELFAFEWKDPERGISGQLTWTRLPQGFKNSPTLFNEALHRDLTDFRTQHPEVTLLQYVDDLLLAAPTKKACTQGTRHLLQELGEKGYRASAKKAQICQTKVTYLGYILSEGKRWLTPGRIETVARIPPPRNPREVREFLGKAGFCRLFIPGFAELAAPLYALTKPSTPFTWQTEHQLAFEALKKALLSAPALGLPDTSKPFTLFLDERQGIAKGVLTQKLGPWKRPVAYLSKKLDPVAAGWPPCLRIMAATAMLVKDSAKLTLGQPLTVITPHTLEAIVRQPPDRWITNARLTHYQALLLDTDRVQFGPPVTLNPATLLPVPENQPSPHDCRQVLAETHGTREDLKDQELPDADHTWYTDGSSYLDSGTRRAGAAVVDGHNTIWAQSLPPGTSAQKAELIALTKALELSKGKKANIYTDSRYAFATAHTHGSIYERRGWLTSEGKEIKNKAEIIALLKALFLPQEVAIIHCPGHQKGQDPVAVGNRQADRVARQAAMAEVLTLATEPDNTSHITAGKRTADGSEFEKRTADGSEFESPKKKAKVE

SEQ ID NO: 2024 - protein, 2097 aa, synthetic construct
MPAAKRVKLDGGDKKYSIGLDIGTNSVGWAVITDEYKVPSKKFKVLGNTDRHSIKKNLIGALLFDSGETAEATRLKRTARRRYTRRKNRICYLQEIFSNEMAKVDDSFFHRLEESFLVEEDKKHERHPIFGNIVDEVAYHEKYPTIYHLRKKLVDSTDKADLRLIYLALAHMIKFRGHFLIEGDLNPDNSDVDKLFIQLVQTYNQLFEENPINASGVDAKAILSARLSKSRRLENLIAQLPGEKKNGLFGNLIALSLGLTPNFKSNFDLAEDAKLQLSKDTYDDDLDNLLAQIGDQYADLFLAAKNLSDAILLSDILRVNTEITKAPLSASMIKRYDEHHQDLTLLKALVRQQLPEKYKEIFFDQSKNGYAGYIDGGASQEEFYKFIKPILEKMDGTEELLVKLNREDLLRKQRTFDNGSIPHQIHLGELHAILRRQEDFYPFLKDNREKIEKILTFRIPYYVGPLARGNSRFAWMTRKSEETITPWNFEEVVDKGASAQSFIERMTNFDKNLPNEKVLPKHSLLYEYFTVYNELTKVKYVTEGMRKPAFLSGEQKKAIVDLLFKTNRKVTVKQLKEDYFKKIECFDSVEISGVEDRFNASLGTYHDLLKIIKDKDFLDNEENEDILEDIVLTLTLFEDREMIEERLKTYAHLFDDKVMKQLKRRRYTGWGRLSRKLINGIRDKQSGKTILDFLKSDGFANRNFMQLIHDDSLTFKEDIQKAQVSGQGDSLHEHIANLAGSPAIKKGILQTVKVVDELVKVMGRHKPENIVIEMARENQTTQKGQKNSRERMKRIEEGIKELGSQILKEHPVENTQLQNEKLYLYYLQNGRDMYVDQELDINRLSDYDVDHIVPQSFLKDDSIDNKVLTRSDKARGKSDNVPSEEVVKKMKNYWRQLLNAKLITQRKFDNLTKAERGGLSELDKAGFIKRQLVETRQITKHVAQILDSRMNTKYDENDKLIREVKVITLKSKLVSDFRKDFQFYKVREINNYHHAHDAYLNAVVGTALIKKYPKLESEFVYGDYKVYDVRKMIAKSEQEIGKATAKYFFYSNIMNFFKTEITLANGEIRKRPLIETNGETGEIVWDKGRDFATVRKVLSMPQVNIVKKTEVQTGGFSKESILPKRNSDKLIARKKDWDPKKYGGFDSPTVAYSVLVVAKVEKGKSKKLKSVKELLGITIMERSSFEKNPIDFLEAKGYKEVKKDLIIKLPKYSLFELENGRKRMLASAGELQKGNELALPSKYVNFLYLASHYEKLKGSPEDNEQKQLFVEQHKHYLDEIIEQISEFSKRVILADANLDKVLSAYNKHRDKPIREQAENIIHLFTLTNLGAPAAFKYFDTTIDRKRYTSTKEVLDATLIHQSITGLYETRIDLSQLGGDGGGGSGGSGGTVSLQDEHRLFDIPVTTSLPDVWLQDFPQAWAETGGLGRAKCQAPIIIDLKPTAVPVSIKQYPMSLEAHMGIRQHIIKFLELGVLRPCRSPWNTPLLPVKKPGTQDYRPVQDLREINKRTVDIHPTVPNPYNLLSTLKPDYSWYTVLDLKDAFFCLPLAPQSQELFAFEWKDPERGISGQLTWTRLPQGFKNSPTLFNEALHRDLTDFRTQHPEVTLLQYVDDLLLAAPTKKACTQGTRHLLQELGEKGYRASAKKAQICQTKVTYLGYILSEGKRWLTPGRIETVARIPPPRNPREVREFLGKAGFCRLFIPGFAELAAPLYALTKPSTPFTWQTEHQLAFEALKKALLSAPALGLPDTSKPFTLFLDERQGIAKGVLTQKLGPWKRPVAYLSKKLDPVAAGWPPCLRIMAATAMLVKDSAKLTLGQPLTVITPHTLEAIVRQPPDRWITNARLTHYQALLLDTDRVQFGPPVTLNPATLLPVPENQPSPHDCRQVLAETHGTREDLKDQELPDADHTWYTDGSSYLDSGTRRAGAAVVDGHNTIWAQSLPPGTSAQKAELIALTKALELSKGKKANIYTDSRYAFATAHTHGSIYERRGWLTSEGKEIKNKAEIIALLKALFLPQEVAIIHCPGHQKGQDPVAVGNRQADRVARQAAMAEVLTLATEPDNTSHITAGKRTADGSEFEKRTADGSEFESPKKKAKVE

SEQ ID NO: 2025 - protein, 2102 aa, synthetic construct
MPAAKRVKLDGGDKKYSIGLDIGTNSVGWAVITDEYKVPSKKFKVLGNTDRHSIKKNLIGALLFDSGETAEATRLKRTARRRYTRRKNRICYLQEIFSNEMAKVDDSFFHRLEESFLVEEDKKHERHPIFGNIVDEVAYHEKYPTIYHLRKKLVDSTDKADLRLIYLALAHMIKFRGHFLIEGDLNPDNSDVDKLFIQLVQTYNQLFEENPINASGVDAKAILSARLSKSRRLENLIAQLPGEKKNGLFGNLIALSLGLTPNFKSNFDLAEDAKLQLSKDTYDDDLDNLLAQIGDQYADLFLAAKNLSDAILLSDILRVNTEITKAPLSASMIKRYDEHHQDLTLLKALVRQQLPEKYKEIFFDQSKNGYAGYIDGGASQEEFYKFIKPILEKMDGTEELLVKLNREDLLRKQRTFDNGSIPHQIHLGELHAILRRQEDFYPFLKDNREKIEKILTFRIPYYVGPLARGNSRFAWMTRKSEETITPWNFEEVVDKGASAQSFIERMTNFDKNLPNEKVLPKHSLLYEYFTVYNELTKVKYVTEGMRKPAFLSGEQKKAIVDLLFKTNRKVTVKQLKEDYFKKIECFDSVEISGVEDRFNASLGTYHDLLKIIKDKDFLDNEENEDILEDIVLTLTLFEDREMIEERLKTYAHLFDDKVMKQLKRRRYTGWGRLSRKLINGIRDKQSGKTILDFLKSDGFANRNFMQLIHDDSLTFKEDIQKAQVSGQGDSLHEHIANLAGSPAIKKGILQTVKVVDELVKVMGRHKPENIVIEMARENQTTQKGQKNSRERMKRIEEGIKELGSQILKEHPVENTQLQNEKLYLYYLQNGRDMYVDQELDINRLSDYDVDHIVPQSFLKDDSIDNKVLTRSDKARGKSDNVPSEEVVKKMKNYWRQLLNAKLITQRKFDNLTKAERGGLSELDKAGFIKRQLVETRQITKHVAQILDSRMNTKYDENDKLIREVKVITLKSKLVSDFRKDFQFYKVREINNYHHAHDAYLNAVVGTALIKKYPKLESEFVYGDYKVYDVRKMIAKSEQEIGKATAKYFFYSNIMNFFKTEITLANGEIRKRPLIETNGETGEIVWDKGRDFATVRKVLSMPQVNIVKKTEVQTGGFSKESILPKRNSDKLIARKKDWDPKKYGGFDSPTVAYSVLVVAKVEKGKSKKLKSVKELLGITIMERSSFEKNPIDFLEAKGYKEVKKDLIIKLPKYSLFELENGRKRMLASAGELQKGNELALPSKYVNFLYLASHYEKLKGSPEDNEQKQLFVEQHKHYLDEIIEQISEFSKRVILADANLDKVLSAYNKHRDKPIREQAENIIHLFTLTNLGAPAAFKYFDTTIDRKRYTSTKEVLDATLIHQSITGLYETRIDLSQLGGDGGGSSGGSEAAAKGGTVSLQDEHRLFDIPVTTSLPDVWLQDFPQAWAETGGLGRAKCQAPIIIDLKPTAVPVSIKQYPMSLEAHMGIRQHIIKFLELGVLRPCRSPWNTPLLPVKKPGTQDYRPVQDLREINKRTVDIHPTVPNPYNLLSTLKPDYSWYTVLDLKDAFFCLPLAPQSQELFAFEWKDPERGISGQLTWTRLPQGFKNSPTLFNEALHRDLTDFRTQHPEVTLLQYVDDLLLAAPTKKACTQGTRHLLQELGEKGYRASAKKAQICQTKVTYLGYILSEGKRWLTPGRIETVARIPPPRNPREVREFLGKAGFCRLFIPGFAELAAPLYALTKPSTPFTWQTEHQLAFEALKKALLSAPALGLPDTSKPFTLFLDERQGIAKGVLTQKLGPWKRPVAYLSKKLDPVAAGWPPCLRIMAATAMLVKDSAKLTLGQPLTVITPHTLEAIVRQPPDRWITNARLTHYQALLLDTDRVQFGPPVTLNPATLLPVPENQPSPHDCRQVLAETHGTREDLKDQELPDADHTWYTDGSSYLDSGTRRAGAAVVDGHNTIWAQSLPPGTSAQKAELIALTKALELSKGKKANIYTDSRYAFATAHTHGSIYERRGWLTSEGKEIKNKAEIIALLKALFLPQEVAIIHCPGHQKGQDPVAVGNRQADRVARQAAMAEVLTLATEPDNTSHITAGKRTADGSEFEKRTADGSEFESPKKKAKVE

SEQ ID NO: 2026 - protein, 2100 aa, synthetic construct
MPAAKRVKLDGGDKKYSIGLDIGTNSVGWAVITDEYKVPSKKFKVLGNTDRHSIKKNLIGALLFDSGETAEATRLKRTARRRYTRRKNRICYLQEIFSNEMAKVDDSFFHRLEESFLVEEDKKHERHPIFGNIVDEVAYHEKYPTIYHLRKKLVDSTDKADLRLIYLALAHMIKFRGHFLIEGDLNPDNSDVDKLFIQLVQTYNQLFEENPINASGVDAKAILSARLSKSRRLENLIAQLPGEKKNGLFGNLIALSLGLTPNFKSNFDLAEDAKLQLSKDTYDDDLDNLLAQIGDQYADLFLAAKNLSDAILLSDILRVNTEITKAPLSASMIKRYDEHHQDLTLLKALVRQQLPEKYKEIFFDQSKNGYAGYIDGGASQEEFYKFIKPILEKMDGTEELLVKLNREDLLRKQRTFDNGSIPHQIHLGELHAILRRQEDFYPFLKDNREKIEKILTFRIPYYVGPLARGNSRFAWMTRKSEETITPWNFEEVVDKGASAQSFIERMTNFDKNLPNEKVLPKHSLLYEYFTVYNELTKVKYVTEGMRKPAFLSGEQKKAIVDLLFKTNRKVTVKQLKEDYFKKIECFDSVEISGVEDRFNASLGTYHDLLKIIKDKDFLDNEENEDILEDIVLTLTLFEDREMIEERLKTYAHLFDDKVMKQLKRRRYTGWGRLSRKLINGIRDKQSGKTILDFLKSDGFANRNFMQLIHDDSLTFKEDIQKAQVSGQGDSLHEHIANLAGSPAIKKGILQTVKVVDELVKVMGRHKPENIVIEMARENQTTQKGQKNSRERMKRIEEGIKELGSQILKEHPVENTQLQNEKLYLYYLQNGRDMYVDQELDINRLSDYDVDHIVPQSFLKDDSIDNKVLTRSDKARGKSDNVPSEEVVKKMKNYWRQLLNAKLITQRKFDNLTKAERGGLSELDKAGFIKRQLVETRQITKHVAQILDSRMNTKYDENDKLIREVKVITLKSKLVSDFRKDFQFYKVREINNYHHAHDAYLNAVVGTALIKKYPKLESEFVYGDYKVYDVRKMIAKSEQEIGKATAKYFFYSNIMNFFKTEITLANGEIRKRPLIETNGETGEIVWDKGRDFATVRKVLSMPQVNIVKKTEVQTGGFSKESILPKRNSDKLIARKKDWDPKKYGGFDSPTVAYSVLVVAKVEKGKSKKLKSVKELLGITIMERSSFEKNPIDFLEAKGYKEVKKDLIIKLPKYSLFELENGRKRMLASAGELQKGNELALPSKYVNFLYLASHYEKLKGSPEDNEQKQLFVEQHKHYLDEIIEQISEFSKRVILADANLDKVLSAYNKHRDKPIREQAENIIHLFTLTNLGAPAAFKYFDTTIDRKRYTSTKEVLDATLIHQSITGLYETRIDLSQLGGDGGGGGGGSGSSGGTVSLQDEHRLFDIPVTTSLPDVWLQDFPQAWAETGGLGRAKCQAPIIIDLKPTAVPVSIKQYPMSLEAHMGIRQHIIKFLELGVLRPCRSPWNTPLLPVKKPGTQDYRPVQDLREINKRTVDIHPTVPNPYNLLSTLKPDYSWYTVLDLKDAFFCLPLAPQSQELFAFEWKDPERGISGQLTWTRLPQGFKNSPTLFNEALHRDLTDFRTQHPEVTLLQYVDDLLLAAPTKKACTQGTRHLLQELGEKGYRASAKKAQICQTKVTYLGYILSEGKRWLTPGRIETVARIPPPRNPREVREFLGKAGFCRLFIPGFAELAAPLYALTKPSTPFTWQTEHQLAFEALKKALLSAPALGLPDTSKPFTLFLDERQGIAKGVLTQKLGPWKRPVAYLSKKLDPVAAGWPPCLRIMAATAMLVKDSAKLTLGQPLTVITPHTLEAIVRQPPDRWITNARLTHYQALLLDTDRVQFGPPVTLNPATLLPVPENQPSPHDCRQVLAETHGTREDLKDQELPDADHTWYTDGSSYLDSGTRRAGAAVVDGHNTIWAQSLPPGTSAQKAELIALTKALELSKGKKANIYTDSRYAFATAHTHGSIYERRGWLTSEGKEIKNKAEIIALLKALFLPQEVAIIHCPGHQKGQDPVAVGNRQADRVARQAAMAEVLTLATEPDNTSHITAGKRTADGSEFEKRTADGSEFESPKKKAKVE

SEQ ID NO: 2027 - protein, 2102 aa, synthetic construct
MPAAKRVKLDGGDKKYSIGLDIGTNSVGWAVITDEYKVPSKKFKVLGNTDRHSIKKNLIGALLFDSGETAEATRLKRTARRRYTRRKNRICYLQEIFSNEMAKVDDSFFHRLEESFLVEEDKKHERHPIFGNIVDEVAYHEKYPTIYHLRKKLVDSTDKADLRLIYLALAHMIKFRGHFLIEGDLNPDNSDVDKLFIQLVQTYNQLFEENPINASGVDAKAILSARLSKSRRLENLIAQLPGEKKNGLFGNLIALSLGLTPNFKSNFDLAEDAKLQLSKDTYDDDLDNLLAQIGDQYADLFLAAKNLSDAILLSDILRVNTEITKAPLSASMIKRYDEHHQDLTLLKALVRQQLPEKYKEIFFDQSKNGYAGYIDGGASQEEFYKFIKPILEKMDGTEELLVKLNREDLLRKQRTFDNGSIPHQIHLGELHAILRRQEDFYPFLKDNREKIEKILTFRIPYYVGPLARGNSRFAWMTRKSEETITPWNFEEVVDKGASAQSFIERMTNFDKNLPNEKVLPKHSLLYEYFTVYNELTKVKYVTEGMRKPAFLSGEQKKAIVDLLFKTNRKVTVKQLKEDYFKKIECFDSVEISGVEDRFNASLGTYHDLLKIIKDKDFLDNEENEDILEDIVLTLTLFEDREMIEERLKTYAHLFDDKVMKQLKRRRYTGWGRLSRKLINGIRDKQSGKTILDFLKSDGFANRNFMQLIHDDSLTFKEDIQKAQVSGQGDSLHEHIANLAGSPAIKKGILQTVKVVDELVKVMGRHKPENIVIEMARENQTTQKGQKNSRERMKRIEEGIKELGSQILKEHPVENTQLQNEKLYLYYLQNGRDMYVDQELDINRLSDYDVDHIVPQSFLKDDSIDNKVLTRSDKARGKSDNVPSEEVVKKMKNYWRQLLNAKLITQRKFDNLTKAERGGLSELDKAGFIKRQLVETRQITKHVAQILDSRMNTKYDENDKLIREVKVITLKSKLVSDFRKDFQFYKVREINNYHHAHDAYLNAVVGTALIKKYPKLESEFVYGDYKVYDVRKMIAKSEQEIGKATAKYFFYSNIMNFFKTEITLANGEIRKRPLIETNGETGEIVWDKGRDFATVRKVLSMPQVNIVKKTEVQTGGFSKESILPKRNSDKLIARKKDWDPKKYGGFDSPTVAYSVLVVAKVEKGKSKKLKSVKELLGITIMERSSFEKNPIDFLEAKGYKEVKKDLIIKLPKYSLFELENGRKRMLASAGELQKGNELALPSKYVNFLYLASHYEKLKGSPEDNEQKQLFVEQHKHYLDEIIEQISEFSKRVILADANLDKVLSAYNKHRDKPIREQAENIIHLFTLTNLGAPAAFKYFDTTIDRKRYTSTKEVLDATLIHQSITGLYETRIDLSQLGGDGGEAAAKGGSPAPGGTVSLQDEHRLFDIPVTTSLPDVWLQDFPQAWAETGGLGRAKCQAPIIIDLKPTAVPVSIKQYPMSLEAHMGIRQHIIKFLELGVLRPCRSPWNTPLLPVKKPGTQDYRPVQDLREINKRTVDIHPTVPNPYNLLSTLKPDYSWYTVLDLKDAFFCLPLAPQSQELFAFEWKDPERGISGQLTWTRLPQGFKNSPTLFNEALHRDLTDFRTQHPEVTLLQYVDDLLLAAPTKKACTQGTRHLLQELGEKGYRASAKKAQICQTKVTYLGYILSEGKRWLTPGRIETVARIPPPRNPREVREFLGKAGFCRLFIPGFAELAAPLYALTKPSTPFTWQTEHQLAFEALKKALLSAPALGLPDTSKPFTLFLDERQGIAKGVLTQKLGPWKRPVAYLSKKLDPVAAGWPPCLRIMAATAMLVKDSAKLTLGQPLTVITPHTLEAIVRQPPDRWITNARLTHYQALLLDTDRVQFGPPVTLNPATLLPVPENQPSPHDCRQVLAETHGTREDLKDQELPDADHTWYTDGSSYLDSGTRRAGAAVVDGHNTIWAQSLPPGTSAQKAELIALTKALELSKGKKANIYTDSRYAFATAHTHGSIYERRGWLTSEGKEIKNKAEIIALLKALFLPQEVAIIHCPGHQKGQDPVAVGNRQADRVARQAAMAEVLTLATEPDNTSHITAGKRTADGSEFEKRTADGSEFESPKKKAKVE

SEQ ID NO: 2028 - protein, 2102 aa, synthetic construct
MPAAKRVKLDGGDKKYSIGLDIGTNSVGWAVITDEYKVPSKKFKVLGNTDRHSIKKNLIGALLFDSGETAEATRLKRTARRRYTRRKNRICYLQEIFSNEMAKVDDSFFHRLEESFLVEEDKKHERHPIFGNIVDEVAYHEKYPTIYHLRKKLVDSTDKADLRLIYLALAHMIKFRGHFLIEGDLNPDNSDVDKLFIQLVQTYNQLFEENPINASGVDAKAILSARLSKSRRLENLIAQLPGEKKNGLFGNLIALSLGLTPNFKSNFDLAEDAKLQLSKDTYDDDLDNLLAQIGDQYADLFLAAKNLSDAILLSDILRVNTEITKAPLSASMIKRYDEHHQDLTLLKALVRQQLPEKYKEIFFDQSKNGYAGYIDGGASQEEFYKFIKPILEKMDGTEELLVKLNREDLLRKQRTFDNGSIPHQIHLGELHAILRRQEDFYPFLKDNREKIEKILTFRIPYYVGPLARGNSRFAWMTRKSEETITPWNFEEVVDKGASAQSFIERMTNFDKNLPNEKVLPKHSLLYEYFTVYNELTKVKYVTEGMRKPAFLSGEQKKAIVDLLFKTNRKVTVKQLKEDYFKKIECFDSVEISGVEDRFNASLGTYHDLLKIIKDKDFLDNEENEDILEDIVLTLTLFEDREMIEERLKTYAHLFDDKVMKQLKRRRYTGWGRLSRKLINGIRDKQSGKTILDFLKSDGFANRNFMQLIHDDSLTFKEDIQKAQVSGQGDSLHEHIANLAGSPAIKKGILQTVKVVDELVKVMGRHKPENIVIEMARENQTTQKGQKNSRERMKRIEEGIKELGSQILKEHPVENTQLQNEKLYLYYLQNGRDMYVDQELDINRLSDYDVDHIVPQSFLKDDSIDNKVLTRSDKARGKSDNVPSEEVVKKMKNYWRQLLNAKLITQRKFDNLTKAERGGLSELDKAGFIKRQLVETRQITKHVAQILDSRMNTKYDENDKLIREVKVITLKSKLVSDFRKDFQFYKVREINNYHHAHDAYLNAVVGTALIKKYPKLESEFVYGDYKVYDVRKMIAKSEQEIGKATAKYFFYSNIMNFFKTEITLANGEIRKRPLIETNGETGEIVWDKGRDFATVRKVLSMPQVNIVKKTEVQTGGFSKESILPKRNSDKLIARKKDWDPKKYGGFDSPTVAYSVLVVAKVEKGKSKKLKSVKELLGITIMERSSFEKNPIDFLEAKGYKEVKKDLIIKLPKYSLFELENGRKRMLASAGELQKGNELALPSKYVNFLYLASHYEKLKGSPEDNEQKQLFVEQHKHYLDEIIEQISEFSKRVILADANLDKVLSAYNKHRDKPIREQAENIIHLFTLTNLGAPAAFKYFDTTIDRKRYTSTKEVLDATLIHQSITGLYETRIDLSQLGGDGGEAAAKPAPGGSGGTVSLQDEHRLFDIPVTTSLPDVWLQDFPQAWAETGGLGRAKCQAPIIIDLKPTAVPVSIKQYPMSLEAHMGIRQHIIKFLELGVLRPCRSPWNTPLLPVKKPGTQDYRPVQDLREINKRTVDIHPTVPNPYNLLSTLKPDYSWYTVLDLKDAFFCLPLAPQSQELFAFEWKDPERGISGQLTWTRLPQGFKNSPTLFNEALHRDLTDFRTQHPEVTLLQYVDDLLLAAPTKKACTQGTRHLLQELGEKGYRASAKKAQICQTKVTYLGYILSEGKRWLTPGRIETVARIPPPRNPREVREFLGKAGFCRLFIPGFAELAAPLYALTKPSTPFTWQTEHQLAFEALKKALLSAPALGLPDTSKPFTLFLDERQGIAKGVLTQKLGPWKRPVAYLSKKLDPVAAGWPPCLRIMAATAMLVKDSAKLTLGQPLTVITPHTLEAIVRQPPDRWITNARLTHYQALLLDTDRVQFGPPVTLNPATLLPVPENQPSPHDCRQVLAETHGTREDLKDQELPDADHTWYTDGSSYLDSGTRRAGAAVVDGHNTIWAQSLPPGTSAQKAELIALTKALELSKGKKANIYTDSRYAFATAHTHGSIYERRGWLTSEGKEIKNKAEIIALLKALFLPQEVAIIHCPGHQKGQDPVAVGNRQADRVARQAAMAEVLTLATEPDNTSHITAGKRTADGSEFEKRTADGSEFESPKKKAKVE

SEQ ID NO: 2029 - protein, 2097 aa, synthetic construct
MPAAKRVKLDGGDKKYSIGLDIGTNSVGWAVITDEYKVPSKKFKVLGNTDRHSIKKNLIGALLFDSGETAEATRLKRTARRRYTRRKNRICYLQEIFSNEMAKVDDSFFHRLEESFLVEEDKKHERHPIFGNIVDEVAYHEKYPTIYHLRKKLVDSTDKADLRLIYLALAHMIKFRGHFLIEGDLNPDNSDVDKLFIQLVQTYNQLFEENPINASGVDAKAILSARLSKSRRLENLIAQLPGEKKNGLFGNLIALSLGLTPNFKSNFDLAEDAKLQLSKDTYDDDLDNLLAQIGDQYADLFLAAKNLSDAILLSDILRVNTEITKAPLSASMIKRYDEHHQDLTLLKALVRQQLPEKYKEIFFDQSKNGYAGYIDGGASQEEFYKFIKPILEKMDGTEELLVKLNREDLLRKQRTFDNGSIPHQIHLGELHAILRRQEDFYPFLKDNREKIEKILTFRIPYYVGPLARGNSRFAWMTRKSEETITPWNFEEVVDKGASAQSFIERMTNFDKNLPNEKVLPKHSLLYEYFTVYNELTKVKYVTEGMRKPAFLSGEQKKAIVDLLFKTNRKVTVKQLKEDYFKKIECFDSVEISGVEDRFNASLGTYHDLLKIIKDKDFLDNEENEDILEDIVLTLTLFEDREMIEERLKTYAHLFDDKVMKQLKRRRYTGWGRLSRKLINGIRDKQSGKTILDFLKSDGFANRNFMQLIHDDSLTFKEDIQKAQVSGQGDSLHEHIANLAGSPAIKKGILQTVKVVDELVKVMGRHKPENIVIEMARENQTTQKGQKNSRERMKRIEEGIKELGSQILKEHPVENTQLQNEKLYLYYLQNGRDMYVDQELDINRLSDYDVDHIVPQSFLKDDSIDNKVLTRSDKARGKSDNVPSEEVVKKMKNYWRQLLNAKLITQRKFDNLTKAERGGLSELDKAGFIKRQLVETRQITKHVAQILDSRMNTKYDENDKLIREVKVITLKSKLVSDFRKDFQFYKVREINNYHHAHDAYLNAVVGTALIKKYPKLESEFVYGDYKVYDVRKMIAKSEQEIGKATAKYFFYSNIMNFFKTEITLANGEIRKRPLIETNGETGEIVWDKGRDFATVRKVLSMPQVNIVKKTEVQTGGFSKESILPKRNSDKLIARKKDWDPKKYGGFDSPTVAYSVLVVAKVEKGKSKKLKSVKELLGITIMERSSFEKNPIDFLEAKGYKEVKKDLIIKLPKYSLFELENGRKRMLASAGELQKGNELALPSKYVNFLYLASHYEKLKGSPEDNEQKQLFVEQHKHYLDEIIEQISEFSKRVILADANLDKVLSAYNKHRDKPIREQAENIIHLFTLTNLGAPAAFKYFDTTIDRKRYTSTKEVLDATLIHQSITGLYETRIDLSQLGGDGGGGGGGSGGTVSLQDEHRLFDIPVTTSLPDVWLQDFPQAWAETGGLGRAKCQAPIIIDLKPTAVPVSIKQYPMSLEAHMGIRQHIIKFLELGVLRPCRSPWNTPLLPVKKPGTQDYRPVQDLREINKRTVDIHPTVPNPYNLLSTLKPDYSWYTVLDLKDAFFCLPLAPQSQELFAFEWKDPERGISGQLTWTRLPQGFKNSPTLFNEALHRDLTDFRTQHPEVTLLQYVDDLLLAAPTKKACTQGTRHLLQELGEKGYRASAKKAQICQTKVTYLGYILSEGKRWLTPGRIETVARIPPPRNPREVREFLGKAGFCRLFIPGFAELAAPLYALTKPSTPFTWQTEHQLAFEALKKALLSAPALGLPDTSKPFTLFLDERQGIAKGVLTQKLGPWKRPVAYLSKKLDPVAAGWPPCLRIMAATAMLVKDSAKLTLGQPLTVITPHTLEAIVRQPPDRWITNARLTHYQALLLDTDRVQFGPPVTLNPATLLPVPENQPSPHDCRQVLAETHGTREDLKDQELPDADHTWYTDGSSYLDSGTRRAGAAVVDGHNTIWAQSLPPGTSAQKAELIALTKALELSKGKKANIYTDSRYAFATAHTHGSIYERRGWLTSEGKEIKNKAEIIALLKALFLPQEVAIIHCPGHQKGQDPVAVGNRQADRVARQAAMAEVLTLATEPDNTSHITAGKRTADGSEFEKRTADGSEFESPKKKAKVE

SEQ ID NO: 2030 - protein, 2100 aa, synthetic construct
MPAAKRVKLDGGDKKYSIGLDIGTNSVGWAVITDEYKVPSKKFKVLGNTDRHSIKKNLIGALLFDSGETAEATRLKRTARRRYTRRKNRICYLQEIFSNEMAKVDDSFFHRLEESFLVEEDKKHERHPIFGNIVDEVAYHEKYPTIYHLRKKLVDSTDKADLRLIYLALAHMIKFRGHFLIEGDLNPDNSDVDKLFIQLVQTYNQLFEENPINASGVDAKAILSARLSKSRRLENLIAQLPGEKKNGLFGNLIALSLGLTPNFKSNFDLAEDAKLQLSKDTYDDDLDNLLAQIGDQYADLFLAAKNLSDAILLSDILRVNTEITKAPLSASMIKRYDEHHQDLTLLKALVRQQLPEKYKEIFFDQSKNGYAGYIDGGASQEEFYKFIKPILEKMDGTEELLVKLNREDLLRKQRTFDNGSIPHQIHLGELHAILRRQEDFYPFLKDNREKIEKILTFRIPYYVGPLARGNSRFAWMTRKSEETITPWNFEEVVDKGASAQSFIERMTNFDKNLPNEKVLPKHSLLYEYFTVYNELTKVKYVTEGMRKPAFLSGEQKKAIVDLLFKTNRKVTVKQLKEDYFKKIECFDSVEISGVEDRFNASLGTYHDLLKIIKDKDFLDNEENEDILEDIVLTLTLFEDREMIEERLKTYAHLFDDKVMKQLKRRRYTGWGRLSRKLINGIRDKQSGKTILDFLKSDGFANRNFMQLIHDDSLTFKEDIQKAQVSGQGDSLHEHIANLAGSPAIKKGILQTVKVVDELVKVMGRHKPENIVIEMARENQTTQKGQKNSRERMKRIEEGIKELGSQILKEHPVENTQLQNEKLYLYYLQNGRDMYVDQELDINRLSDYDVDHIVPQSFLKDDSIDNKVLTRSDKARGKSDNVPSEEVVKKMKNYWRQLLNAKLITQRKFDNLTKAERGGLSELDKAGFIKRQLVETRQITKHVAQILDSRMNTKYDENDKLIREVKVITLKSKLVSDFRKDFQFYKVREINNYHHAHDAYLNAVVGTALIKKYPKLESEFVYGDYKVYDVRKMIAKSEQEIGKATAKYFFYSNIMNFFKTEITLANGEIRKRPLIETNGETGEIVWDKGRDFATVRKVLSMPQVNIVKKTEVQTGGFSKESILPKRNSDKLIARKKDWDPKKYGGFDSPTVAYSVLVVAKVEKGKSKKLKSVKELLGITIMERSSFEKNPIDFLEAKGYKEVKKDLIIKLPKYSLFELENGRKRMLASAGELQKGNELALPSKYVNFLYLASHYEKLKGSPEDNEQKQLFVEQHKHYLDEIIEQISEFSKRVILADANLDKVLSAYNKHRDKPIREQAENIIHLFTLTNLGAPAAFKYFDTTIDRKRYTSTKEVLDATLIHQSITGLYETRIDLSQLGGDGGGGSGGSGGSGGTVSLQDEHRLFDIPVTTSLPDVWLQDFPQAWAETGGLGRAKCQAPIIIDLKPTAVPVSIKQYPMSLEAHMGIRQHIIKFLELGVLRPCRSPWNTPLLPVKKPGTQDYRPVQDLREINKRTVDIHPTVPNPYNLLSTLKPDYSWYTVLDLKDAFFCLPLAPQSQELFAFEWKDPERGISGQLTWTRLPQGFKNSPTLFNEALHRDLTDFRTQHPEVTLLQYVDDLLLAAPTKKACTQGTRHLLQELGEKGYRASAKKAQICQTKVTYLGYILSEGKRWLTPGRIETVARIPPPRNPREVREFLGKAGFCRLFIPGFAELAAPLYALTKPSTPFTWQTEHQLAFEALKKALLSAPALGLPDTSKPFTLFLDERQGIAKGVLTQKLGPWKRPVAYLSKKLDPVAAGWPPCLRIMAATAMLVKDSAKLTLGQPLTVITPHTLEAIVRQPPDRWITNARLTHYQALLLDTDRVQFGPPVTLNPATLLPVPENQPSPHDCRQVLAETHGTREDLKDQELPDADHTWYTDGSSYLDSGTRRAGAAVVDGHNTIWAQSLPPGTSAQKAELIALTKALELSKGKKANIYTDSRYAFATAHTHGSIYERRGWLTSEGKEIKNKAEIIALLKALFLPQEVAIIHCPGHQKGQDPVAVGNRQADRVARQAAMAEVLTLATEPDNTSHITAGKRTADGSEFEKRTADGSEFESPKKKAKVE

SEQ ID NO: 2031 - protein, 2097 aa, synthetic construct
MPAAKRVKLDGGDKKYSIGLDIGTNSVGWAVITDEYKVPSKKFKVLGNTDRHSIKKNLIGALLFDSGETAEATRLKRTARRRYTRRKNRICYLQEIFSNEMAKVDDSFFHRLEESFLVEEDKKHERHPIFGNIVDEVAYHEKYPTIYHLRKKLVDSTDKADLRLIYLALAHMIKFRGHFLIEGDLNPDNSDVDKLFIQLVQTYNQLFEENPINASGVDAKAILSARLSKSRRLENLIAQLPGEKKNGLFGNLIALSLGLTPNFKSNFDLAEDAKLQLSKDTYDDDLDNLLAQIGDQYADLFLAAKNLSDAILLSDILRVNTEITKAPLSASMIKRYDEHHQDLTLLKALVRQQLPEKYKEIFFDQSKNGYAGYIDGGASQEEFYKFIKPILEKMDGTEELLVKLNREDLLRKQRTFDNGSIPHQIHLGELHAILRRQEDFYPFLKDNREKIEKILTFRIPYYVGPLARGNSRFAWMTRKSEETITPWNFEEVVDKGASAQSFIERMTNFDKNLPNEKVLPKHSLLYEYFTVYNELTKVKYVTEGMRKPAFLSGEQKKAIVDLLFKTNRKVTVKQLKEDYFKKIECFDSVEISGVEDRFNASLGTYHDLLKIIKDKDFLDNEENEDILEDIVLTLTLFEDREMIEERLKTYAHLFDDKVMKQLKRRRYTGWGRLSRKLINGIRDKQSGKTILDFLKSDGFANRNFMQLIHDDSLTFKEDIQKAQVSGQGDSLHEHIANLAGSPAIKKGILQTVKVVDELVKVMGRHKPENIVIEMARENQTTQKGQKNSRERMKRIEEGIKELGSQILKEHPVENTQLQNEKLYLYYLQNGRDMYVDQELDINRLSDYDVDHIVPQSFLKDDSIDNKVLTRSDKARGKSDNVPSEEVVKKMKNYWRQLLNAKLITQRKFDNLTKAERGGLSELDKAGFIKRQLVETRQITKHVAQILDSRMNTKYDENDKLIREVKVITLKSKLVSDFRKDFQFYKVREINNYHHAHDAYLNAVVGTALIKKYPKLESEFVYGDYKVYDVRKMIAKSEQEIGKATAKYFFYSNIMNFFKTEITLANGEIRKRPLIETNGETGEIVWDKGRDFATVRKVLSMPQVNIVKKTEVQTGGFSKESILPKRNSDKLIARKKDWDPKKYGGFDSPTVAYSVLVVAKVEKGKSKKLKSVKELLGITIMERSSFEKNPIDFLEAKGYKEVKKDLIIKLPKYSLFELENGRKRMLASAGELQKGNELALPSKYVNFLYLASHYEKLKGSPEDNEQKQLFVEQHKHYLDEIIEQISEFSKRVILADANLDKVLSAYNKHRDKPIREQAENIIHLFTLTNLGAPAAFKYFDTTIDRKRYTSTKEVLDATLIHQSITGLYETRIDLSQLGGDGGGGSGSSGGTVSLQDEHRLFDIPVTTSLPDVWLQDFPQAWAETGGLGRAKCQAPIIIDLKPTAVPVSIKQYPMSLEAHMGIRQHIIKFLELGVLRPCRSPWNTPLLPVKKPGTQDYRPVQDLREINKRTVDIHPTVPNPYNLLSTLKPDYSWYTVLDLKDAFFCLPLAPQSQELFAFEWKDPERGISGQLTWTRLPQGFKNSPTLFNEALHRDLTDFRTQHPEVTLLQYVDDLLLAAPTKKACTQGTRHLLQELGEKGYRASAKKAQICQTKVTYLGYILSEGKRWLTPGRIETVARIPPPRNPREVREFLGKAGFCRLFIPGFAELAAPLYALTKPSTPFTWQTEHQLAFEALKKALLSAPALGLPDTSKPFTLFLDERQGIAKGVLTQKLGPWKRPVAYLSKKLDPVAAGWPPCLRIMAATAMLVKDSAKLTLGQPLTVITPHTLEAIVRQPPDRWITNARLTHYQALLLDTDRVQFGPPVTLNPATLLPVPENQPSPHDCRQVLAETHGTREDLKDQELPDADHTWYTDGSSYLDSGTRRAGAAVVDGHNTIWAQSLPPGTSAQKAELIALTKALELSKGKKANIYTDSRYAFATAHTHGSIYERRGWLTSEGKEIKNKAEIIALLKALFLPQEVAIIHCPGHQKGQDPVAVGNRQADRVARQAAMAEVLTLATEPDNTSHITAGKRTADGSEFEKRTADGSEFESPKKKAKVE

SEQ ID NO: 2032 - protein, 2097 aa, synthetic construct
MPAAKRVKLDGGDKKYSIGLDIGTNSVGWAVITDEYKVPSKKFKVLGNTDRHSIKKNLIGALLFDSGETAEATRLKRTARRRYTRRKNRICYLQEIFSNEMAKVDDSFFHRLEESFLVEEDKKHERHPIFGNIVDEVAYHEKYPTIYHLRKKLVDSTDKADLRLIYLALAHMIKFRGHFLIEGDLNPDNSDVDKLFIQLVQTYNQLFEENPINASGVDAKAILSARLSKSRRLENLIAQLPGEKKNGLFGNLIALSLGLTPNFKSNFDLAEDAKLQLSKDTYDDDLDNLLAQIGDQYADLFLAAKNLSDAILLSDILRVNTEITKAPLSASMIKRYDEHHQDLTLLKALVRQQLPEKYKEIFFDQSKNGYAGYIDGGASQEEFYKFIKPILEKMDGTEELLVKLNREDLLRKQRTFDNGSIPHQIHLGELHAILRRQEDFYPFLKDNREKIEKILTFRIPYYVGPLARGNSRFAWMTRKSEETITPWNFEEVVDKGASAQSFIERMTNFDKNLPNEKVLPKHSLLYEYFTVYNELTKVKYVTEGMRKPAFLSGEQKKAIVDLLFKTNRKVTVKQLKEDYFKKIECFDSVEISGVEDRFNASLGTYHDLLKIIKDKDFLDNEENEDILEDIVLTLTLFEDREMIEERLKTYAHLFDDKVMKQLKRRRYTGWGRLSRKLINGIRDKQSGKTILDFLKSDGFANRNFMQLIHDDSLTFKEDIQKAQVSGQGDSLHEHIANLAGSPAIKKGILQTVKVVDELVKVMGRHKPENIVIEMARENQTTQKGQKNSRERMKRIEEGIKELGSQILKEHPVENTQLQNEKLYLYYLQNGRDMYVDQELDINRLSDYDVDHIVPQSFLKDDSIDNKVLTRSDKARGKSDNVPSEEVVKKMKNYWRQLLNAKLITQRKFDNLTKAERGGLSELDKAGFIKRQLVETRQITKHVAQILDSRMNTKYDENDKLIREVKVITLKSKLVSDFRKDFQFYKVREINNYHHAHDAYLNAVVGTALIKKYPKLESEFVYGDYKVYDVRKMIAKSEQEIGKATAKYFFYSNIMNFFKTEITLANGEIRKRPLIETNGETGEIVWDKGRDFATVRKVLSMPQVNIVKKTEVQTGGFSKESILPKRNSDKLIARKKDWDPKKYGGFDSPTVAYSVLVVAKVEKGKSKKLKSVKELLGITIMERSSFEKNPIDFLEAKGYKEVKKDLIIKLPKYSLFELENGRKRMLASAGELQKGNELALPSKYVNFLYLASHYEKLKGSPEDNEQKQLFVEQHKHYLDEIIEQISEFSKRVILADANLDKVLSAYNKHRDKPIREQAENIIHLFTLTNLGAPAAFKYFDTTIDRKRYTSTKEVLDATLIHQSITGLYETRIDLSQLGGDGGPAPGGSGGTVSLQDEHRLFDIPVTTSLPDVWLQDFPQAWAETGGLGRAKCQAPIIIDLKPTAVPVSIKQYPMSLEAHMGIRQHIIKFLELGVLRPCRSPWNTPLLPVKKPGTQDYRPVQDLREINKRTVDIHPTVPNPYNLLSTLKPDYSWYTVLDLKDAFFCLPLAPQSQELFAFEWKDPERGISGQLTWTRLPQGFKNSPTLFNEALHRDLTDFRTQHPEVTLLQYVDDLLLAAPTKKACTQGTRHLLQELGEKGYRASAKKAQICQTKVTYLGYILSEGKRWLTPGRIETVARIPPPRNPREVREFLGKAGFCRLFIPGFAELAAPLYALTKPSTPFTWQTEHQLAFEALKKALLSAPALGLPDTSKPFTLFLDERQGIAKGVLTQKLGPWKRPVAYLSKKLDPVAAGWPPCLRIMAATAMLVKDSAKLTLGQPLTVITPHTLEAIVRQPPDRWITNARLTHYQALLLDTDRVQFGPPVTLNPATLLPVPENQPSPHDCRQVLAETHGTREDLKDQELPDADHTWYTDGSSYLDSGTRRAGAAVVDGHNTIWAQSLPPGTSAQKAELIALTKALELSKGKKANIYTDSRYAFATAHTHGSIYERRGWLTSEGKEIKNKAEIIALLKALFLPQEVAIIHCPGHQKGQDPVAVGNRQADRVARQAAMAEVLTLATEPDNTSHITAGKRTADGSEFEKRTADGSEFESPKKKAKVE

SEQ ID NO: 2033 - protein, 2094 aa, synthetic construct
MPAAKRVKLDGGDKKYSIGLDIGTNSVGWAVITDEYKVPSKKFKVLGNTDRHSIKKNLIGALLFDSGETAEATRLKRTARRRYTRRKNRICYLQEIFSNEMAKVDDSFFHRLEESFLVEEDKKHERHPIFGNIVDEVAYHEKYPTIYHLRKKLVDSTDKADLRLIYLALAHMIKFRGHFLIEGDLNPDNSDVDKLFIQLVQTYNQLFEENPINASGVDAKAILSARLSKSRRLENLIAQLPGEKKNGLFGNLIALSLGLTPNFKSNFDLAEDAKLQLSKDTYDDDLDNLLAQIGDQYADLFLAAKNLSDAILLSDILRVNTEITKAPLSASMIKRYDEHHQDLTLLKALVRQQLPEKYKEIFFDQSKNGYAGYIDGGASQEEFYKFIKPILEKMDGTEELLVKLNREDLLRKQRTFDNGSIPHQIHLGELHAILRRQEDFYPFLKDNREKIEKILTFRIPYYVGPLARGNSRFAWMTRKSEETITPWNFEEVVDKGASAQSFIERMTNFDKNLPNEKVLPKHSLLYEYFTVYNELTKVKYVTEGMRKPAFLSGEQKKAIVDLLFKTNRKVTVKQLKEDYFKKIECFDSVEISGVEDRFNASLGTYHDLLKIIKDKDFLDNEENEDILEDIVLTLTLFEDREMIEERLKTYAHLFDDKVMKQLKRRRYTGWGRLSRKLINGIRDKQSGKTILDFLKSDGFANRNFMQLIHDDSLTFKEDIQKAQVSGQGDSLHEHIANLAGSPAIKKGILQTVKVVDELVKVMGRHKPENIVIEMARENQTTQKGQKNSRERMKRIEEGIKELGSQILKEHPVENTQLQNEKLYLYYLQNGRDMYVDQELDINRLSDYDVDHIVPQSFLKDDSIDNKVLTRSDKARGKSDNVPSEEVVKKMKNYWRQLLNAKLITQRKFDNLTKAERGGLSELDKAGFIKRQLVETRQITKHVAQILDSRMNTKYDENDKLIREVKVITLKSKLVSDFRKDFQFYKVREINNYHHAHDAYLNAVVGTALIKKYPKLESEFVYGDYKVYDVRKMIAKSEQEIGKATAKYFFYSNIMNFFKTEITLANGEIRKRPLIETNGETGEIVWDKGRDFATVRKVLSMPQVNIVKKTEVQTGGFSKESILPKRNSDKLIARKKDWDPKKYGGFDSPTVAYSVLVVAKVEKGKSKKLKSVKELLGITIMERSSFEKNPIDFLEAKGYKEVKKDLIIKLPKYSLFELENGRKRMLASAGELQKGNELALPSKYVNFLYLASHYEKLKGSPEDNEQKQLFVEQHKHYLDEIIEQISEFSKRVILADANLDKVLSAYNKHRDKPIREQAENIIHLFTLTNLGAPAAFKYFDTTIDRKRYTSTKEVLDATLIHQSITGLYETRIDLSQLGGDGGGSSGGTVSLQDEHRLFDIPVTTSLPDVWLQDFPQAWAETGGLGRAKCQAPIIIDLKPTAVPVSIKQYPMSLEAHMGIRQHIIKFLELGVLRPCRSPWNTPLLPVKKPGTQDYRPVQDLREINKRTVDIHPTVPNPYNLLSTLKPDYSWYTVLDLKDAFFCLPLAPQSQELFAFEWKDPERGISGQLTWTRLPQGFKNSPTLFNEALHRDLTDFRTQHPEVTLLQYVDDLLLAAPTKKACTQGTRHLLQELGEKGYRASAKKAQICQTKVTYLGYILSEGKRWLTPGRIETVARIPPPRNPREVREFLGKAGFCRLFIPGFAELAAPLYALTKPSTPFTWQTEHQLAFEALKKALLSAPALGLPDTSKPFTLFLDERQGIAKGVLTQKLGPWKRPVAYLSKKLDPVAAGWPPCLRIMAATAMLVKDSAKLTLGQPLTVITPHTLEAIVRQPPDRWITNARLTHYQALLLDTDRVQFGPPVTLNPATLLPVPENQPSPHDCRQVLAETHGTREDLKDQELPDADHTWYTDGSSYLDSGTRRAGAAVVDGHNTIWAQSLPPGTSAQKAELIALTKALELSKGKKANIYTDSRYAFATAHTHGSIYERRGWLTSEGKEIKNKAEIIALLKALFLPQEVAIIHCPGHQKGQDPVAVGNRQADRVARQAAMAEVLTLATEPDNTSHITAGKRTADGSEFEKRTADGSEFESPKKKAKVE

SEQ ID NO: 2034 - protein, 2100 aa, synthetic construct
MPAAKRVKLDGGDKKYSIGLDIGTNSVGWAVITDEYKVPSKKFKVLGNTDRHSIKKNLIGALLFDSGETAEATRLKRTARRRYTRRKNRICYLQEIFSNEMAKVDDSFFHRLEESFLVEEDKKHERHPIFGNIVDEVAYHEKYPTIYHLRKKLVDSTDKADLRLIYLALAHMIKFRGHFLIEGDLNPDNSDVDKLFIQLVQTYNQLFEENPINASGVDAKAILSARLSKSRRLENLIAQLPGEKKNGLFGNLIALSLGLTPNFKSNFDLAEDAKLQLSKDTYDDDLDNLLAQIGDQYADLFLAAKNLSDAILLSDILRVNTEITKAPLSASMIKRYDEHHQDLTLLKALVRQQLPEKYKEIFFDQSKNGYAGYIDGGASQEEFYKFIKPILEKMDGTEELLVKLNREDLLRKQRTFDNGSIPHQIHLGELHAILRRQEDFYPFLKDNREKIEKILTFRIPYYVGPLARGNSRFAWMTRKSEETITPWNFEEVVDKGASAQSFIERMTNFDKNLPNEKVLPKHSLLYEYFTVYNELTKVKYVTEGMRKPAFLSGEQKKAIVDLLFKTNRKVTVKQLKEDYFKKIECFDSVEISGVEDRFNASLGTYHDLLKIIKDKDFLDNEENEDILEDIVLTLTLFEDREMIEERLKTYAHLFDDKVMKQLKRRRYTGWGRLSRKLINGIRDKQSGKTILDFLKSDGFANRNFMQLIHDDSLTFKEDIQKAQVSGQGDSLHEHIANLAGSPAIKKGILQTVKVVDELVKVMGRHKPENIVIEMARENQTTQKGQKNSRERMKRIEEGIKELGSQILKEHPVENTQLQNEKLYLYYLQNGRDMYVDQELDINRLSDYDVDHIVPQSFLKDDSIDNKVLTRSDKARGKSDNVPSEEVVKKMKNYWRQLLNAKLITQRKFDNLTKAERGGLSELDKAGFIKRQLVETRQITKHVAQILDSRMNTKYDENDKLIREVKVITLKSKLVSDFRKDFQFYKVREINNYHHAHDAYLNAVVGTALIKKYPKLESEFVYGDYKVYDVRKMIAKSEQEIGKATAKYFFYSNIMNFFKTEITLANGEIRKRPLIETNGETGEIVWDKGRDFATVRKVLSMPQVNIVKKTEVQTGGFSKESILPKRNSDKLIARKKDWDPKKYGGFDSPTVAYSVLVVAKVEKGKSKKLKSVKELLGITIMERSSFEKNPIDFLEAKGYKEVKKDLIIKLPKYSLFELENGRKRMLASAGELQKGNELALPSKYVNFLYLASHYEKLKGSPEDNEQKQLFVEQHKHYLDEIIEQISEFSKRVILADANLDKVLSAYNKHRDKPIREQAENIIHLFTLTNLGAPAAFKYFDTTIDRKRYTSTKEVLDATLIHQSITGLYETRIDLSQLGGDGGGGGGGSPAPGGTVSLQDEHRLFDIPVTTSLPDVWLQDFPQAWAETGGLGRAKCQAPIIIDLKPTAVPVSIKQYPMSLEAHMGIRQHIIKFLELGVLRPCRSPWNTPLLPVKKPGTQDYRPVQDLREINKRTVDIHPTVPNPYNLLSTLKPDYSWYTVLDLKDAFFCLPLAPQSQELFAFEWKDPERGISGQLTWTRLPQGFKNSPTLFNEALHRDLTDFRTQHPEVTLLQYVDDLLLAAPTKKACTQGTRHLLQELGEKGYRASAKKAQICQTKVTYLGYILSEGKRWLTPGRIETVARIPPPRNPREVREFLGKAGFCRLFIPGFAELAAPLYALTKPSTPFTWQTEHQLAFEALKKALLSAPALGLPDTSKPFTLFLDERQGIAKGVLTQKLGPWKRPVAYLSKKLDPVAAGWPPCLRIMAATAMLVKDSAKLTLGQPLTVITPHTLEAIVRQPPDRWITNARLTHYQALLLDTDRVQFGPPVTLNPATLLPVPENQPSPHDCRQVLAETHGTREDLKDQELPDADHTWYTDGSSYLDSGTRRAGAAVVDGHNTIWAQSLPPGTSAQKAELIALTKALELSKGKKANIYTDSRYAFATAHTHGSIYERRGWLTSEGKEIKNKAEIIALLKALFLPQEVAIIHCPGHQKGQDPVAVGNRQADRVARQAAMAEVLTLATEPDNTSHITAGKRTADGSEFEKRTADGSEFESPKKKAKVE

SEQ ID NO: 2035 - protein, 2109 aa, synthetic construct
MPAAKRVKLDGGDKKYSIGLDIGTNSVGWAVITDEYKVPSKKFKVLGNTDRHSIKKNLIGALLFDSGETAEATRLKRTARRRYTRRKNRICYLQEIFSNEMAKVDDSFFHRLEESFLVEEDKKHERHPIFGNIVDEVAYHEKYPTIYHLRKKLVDSTDKADLRLIYLALAHMIKFRGHFLIEGDLNPDNSDVDKLFIQLVQTYNQLFEENPINASGVDAKAILSARLSKSRRLENLIAQLPGEKKNGLFGNLIALSLGLTPNFKSNFDLAEDAKLQLSKDTYDDDLDNLLAQIGDQYADLFLAAKNLSDAILLSDILRVNTEITKAPLSASMIKRYDEHHQDLTLLKALVRQQLPEKYKEIFFDQSKNGYAGYIDGGASQEEFYKFIKPILEKMDGTEELLVKLNREDLLRKQRTFDNGSIPHQIHLGELHAILRRQEDFYPFLKDNREKIEKILTFRIPYYVGPLARGNSRFAWMTRKSEETITPWNFEEVVDKGASAQSFIERMTNFDKNLPNEKVLPKHSLLYEYFTVYNELTKVKYVTEGMRKPAFLSGEQKKAIVDLLFKTNRKVTVKQLKEDYFKKIECFDSVEISGVEDRFNASLGTYHDLLKIIKDKDFLDNEENEDILEDIVLTLTLFEDREMIEERLKTYAHLFDDKVMKQLKRRRYTGWGRLSRKLINGIRDKQSGKTILDFLKSDGFANRNFMQLIHDDSLTFKEDIQKAQVSGQGDSLHEHIANLAGSPAIKKGILQTVKVVDELVKVMGRHKPENIVIEMARENQTTQKGQKNSRERMKRIEEGIKELGSQILKEHPVENTQLQNEKLYLYYLQNGRDMYVDQELDINRLSDYDVDHIVPQSFLKDDSIDNKVLTRSDKARGKSDNVPSEEVVKKMKNYWRQLLNAKLITQRKFDNLTKAERGGLSELDKAGFIKRQLVETRQITKHVAQILDSRMNTKYDENDKLIREVKVITLKSKLVSDFRKDFQFYKVREINNYHHAHDAYLNAVVGTALIKKYPKLESEFVYGDYKVYDVRKMIAKSEQEIGKATAKYFFYSNIMNFFKTEITLANGEIRKRPLIETNGETGEIVWDKGRDFATVRKVLSMPQVNIVKKTEVQTGGFSKESILPKRNSDKLIARKKDWDPKKYGGFDSPTVAYSVLVVAKVEKGKSKKLKSVKELLGITIMERSSFEKNPIDFLEAKGYKEVKKDLIIKLPKYSLFELENGRKRMLASAGELQKGNELALPSKYVNFLYLASHYEKLKGSPEDNEQKQLFVEQHKHYLDEIIEQISEFSKRVILADANLDKVLSAYNKHRDKPIREQAENIIHLFTLTNLGAPAAFKYFDTTIDRKRYTSTKEVLDATLIHQSITGLYETRIDLSQLGGDGGGSSGSSGSSGSSGSSGSSGGTVSLQDEHRLFDIPVTTSLPDVWLQDFPQAWAETGGLGRAKCQAPIIIDLKPTAVPVSIKQYPMSLEAHMGIRQHIIKFLELGVLRPCRSPWNTPLLPVKKPGTQDYRPVQDLREINKRTVDIHPTVPNPYNLLSTLKPDYSWYTVLDLKDAFFCLPLAPQSQELFAFEWKDPERGISGQLTWTRLPQGFKNSPTLFNEALHRDLTDFRTQHPEVTLLQYVDDLLLAAPTKKACTQGTRHLLQELGEKGYRASAKKAQICQTKVTYLGYILSEGKRWLTPGRIETVARIPPPRNPREVREFLGKAGFCRLFIPGFAELAAPLYALTKPSTPFTWQTEHQLAFEALKKALLSAPALGLPDTSKPFTLFLDERQGIAKGVLTQKLGPWKRPVAYLSKKLDPVAAGWPPCLRIMAATAMLVKDSAKLTLGQPLTVITPHTLEAIVRQPPDRWITNARLTHYQALLLDTDRVQFGPPVTLNPATLLPVPENQPSPHDCRQVLAETHGTREDLKDQELPDADHTWYTDGSSYLDSGTRRAGAAVVDGHNTIWAQSLPPGTSAQKAELIALTKALELSKGKKANIYTDSRYAFATAHTHGSIYERRGWLTSEGKEIKNKAEIIALLKALFLPQEVAIIHCPGHQKGQDPVAVGNRQADRVARQAAMAEVLTLATEPDNTSHITAGKRTADGSEFEKRTADGSEFESPKKKAKVE

SEQ ID NO: 2036 - protein, 2097 aa, synthetic construct
MPAAKRVKLDGGDKKYSIGLDIGTNSVGWAVITDEYKVPSKKFKVLGNTDRHSIKKNLIGALLFDSGETAEATRLKRTARRRYTRRKNRICYLQEIFSNEMAKVDDSFFHRLEESFLVEEDKKHERHPIFGNIVDEVAYHEKYPTIYHLRKKLVDSTDKADLRLIYLALAHMIKFRGHFLIEGDLNPDNSDVDKLFIQLVQTYNQLFEENPINASGVDAKAILSARLSKSRRLENLIAQLPGEKKNGLFGNLIALSLGLTPNFKSNFDLAEDAKLQLSKDTYDDDLDNLLAQIGDQYADLFLAAKNLSDAILLSDILRVNTEITKAPLSASMIKRYDEHHQDLTLLKALVRQQLPEKYKEIFFDQSKNGYAGYIDGGASQEEFYKFIKPILEKMDGTEELLVKLNREDLLRKQRTFDNGSIPHQIHLGELHAILRRQEDFYPFLKDNREKIEKILTFRIPYYVGPLARGNSRFAWMTRKSEETITPWNFEEVVDKGASAQSFIERMTNFDKNLPNEKVLPKHSLLYEYFTVYNELTKVKYVTEGMRKPAFLSGEQKKAIVDLLFKTNRKVTVKQLKEDYFKKIECFDSVEISGVEDRFNASLGTYHDLLKIIKDKDFLDNEENEDILEDIVLTLTLFEDREMIEERLKTYAHLFDDKVMKQLKRRRYTGWGRLSRKLINGIRDKQSGKTILDFLKSDGFANRNFMQLIHDDSLTFKEDIQKAQVSGQGDSLHEHIANLAGSPAIKKGILQTVKVVDELVKVMGRHKPENIVIEMARENQTTQKGQKNSRERMKRIEEGIKELGSQILKEHPVENTQLQNEKLYLYYLQNGRDMYVDQELDINRLSDYDVDHIVPQSFLKDDSIDNKVLTRSDKARGKSDNVPSEEVVKKMKNYWRQLLNAKLITQRKFDNLTKAERGGLSELDKAGFIKRQLVETRQITKHVAQILDSRMNTKYDENDKLIREVKVITLKSKLVSDFRKDFQFYKVREINNYHHAHDAYLNAVVGTALIKKYPKLESEFVYGDYKVYDVRKMIAKSEQEIGKATAKYFFYSNIMNFFKTEITLANGEIRKRPLIETNGETGEIVWDKGRDFATVRKVLSMPQVNIVKKTEVQTGGFSKESILPKRNSDKLIARKKDWDPKKYGGFDSPTVAYSVLVVAKVEKGKSKKLKSVKELLGITIMERSSFEKNPIDFLEAKGYKEVKKDLIIKLPKYSLFELENGRKRMLASAGELQKGNELALPSKYVNFLYLASHYEKLKGSPEDNEQKQLFVEQHKHYLDEIIEQISEFSKRVILADANLDKVLSAYNKHRDKPIREQAENIIHLFTLTNLGAPAAFKYFDTTIDRKRYTSTKEVLDATLIHQSITGLYETRIDLSQLGGDGGPAPGSSGGTVSLQDEHRLFDIPVTTSLPDVWLQDFPQAWAETGGLGRAKCQAPIIIDLKPTAVPVSIKQYPMSLEAHMGIRQHIIKFLELGVLRPCRSPWNTPLLPVKKPGTQDYRPVQDLREINKRTVDIHPTVPNPYNLLSTLKPDYSWYTVLDLKDAFFCLPLAPQSQELFAFEWKDPERGISGQLTWTRLPQGFKNSPTLFNEALHRDLTDFRTQHPEVTLLQYVDDLLLAAPTKKACTQGTRHLLQELGEKGYRASAKKAQICQTKVTYLGYILSEGKRWLTPGRIETVARIPPPRNPREVREFLGKAGFCRLFIPGFAELAAPLYALTKPSTPFTWQTEHQLAFEALKKALLSAPALGLPDTSKPFTLFLDERQGIAKGVLTQKLGPWKRPVAYLSKKLDPVAAGWPPCLRIMAATAMLVKDSAKLTLGQPLTVITPHTLEAIVRQPPDRWITNARLTHYQALLLDTDRVQFGPPVTLNPATLLPVPENQPSPHDCRQVLAETHGTREDLKDQELPDADHTWYTDGSSYLDSGTRRAGAAVVDGHNTIWAQSLPPGTSAQKAELIALTKALELSKGKKANIYTDSRYAFATAHTHGSIYERRGWLTSEGKEIKNKAEIIALLKALFLPQEVAIIHCPGHQKGQDPVAVGNRQADRVARQAAMAEVLTLATEPDNTSHITAGKRTADGSEFEKRTADGSEFESPKKKAKVE

SEQ ID NO: 2037 - protein, 2102 aa, synthetic construct
MPAAKRVKLDGGDKKYSIGLDIGTNSVGWAVITDEYKVPSKKFKVLGNTDRHSIKKNLIGALLFDSGETAEATRLKRTARRRYTRRKNRICYLQEIFSNEMAKVDDSFFHRLEESFLVEEDKKHERHPIFGNIVDEVAYHEKYPTIYHLRKKLVDSTDKADLRLIYLALAHMIKFRGHFLIEGDLNPDNSDVDKLFIQLVQTYNQLFEENPINASGVDAKAILSARLSKSRRLENLIAQLPGEKKNGLFGNLIALSLGLTPNFKSNFDLAEDAKLQLSKDTYDDDLDNLLAQIGDQYADLFLAAKNLSDAILLSDILRVNTEITKAPLSASMIKRYDEHHQDLTLLKALVRQQLPEKYKEIFFDQSKNGYAGYIDGGASQEEFYKFIKPILEKMDGTEELLVKLNREDLLRKQRTFDNGSIPHQIHLGELHAILRRQEDFYPFLKDNREKIEKILTFRIPYYVGPLARGNSRFAWMTRKSEETITPWNFEEVVDKGASAQSFIERMTNFDKNLPNEKVLPKHSLLYEYFTVYNELTKVKYVTEGMRKPAFLSGEQKKAIVDLLFKTNRKVTVKQLKEDYFKKIECFDSVEISGVEDRFNASLGTYHDLLKIIKDKDFLDNEENEDILEDIVLTLTLFEDREMIEERLKTYAHLFDDKVMKQLKRRRYTGWGRLSRKLINGIRDKQSGKTILDFLKSDGFANRNFMQLIHDDSLTFKEDIQKAQVSGQGDSLHEHIANLAGSPAIKKGILQTVKVVDELVKVMGRHKPENIVIEMARENQTTQKGQKNSRERMKRIEEGIKELGSQILKEHPVENTQLQNEKLYLYYLQNGRDMYVDQELDINRLSDYDVDHIVPQSFLKDDSIDNKVLTRSDKARGKSDNVPSEEVVKKMKNYWRQLLNAKLITQRKFDNLTKAERGGLSELDKAGFIKRQLVETRQITKHVAQILDSRMNTKYDENDKLIREVKVITLKSKLVSDFRKDFQFYKVREINNYHHAHDAYLNAVVGTALIKKYPKLESEFVYGDYKVYDVRKMIAKSEQEIGKATAKYFFYSNIMNFFKTEITLANGEIRKRPLIETNGETGEIVWDKGRDFATVRKVLSMPQVNIVKKTEVQTGGFSKESILPKRNSDKLIARKKDWDPKKYGGFDSPTVAYSVLVVAKVEKGKSKKLKSVKELLGITIMERSSFEKNPIDFLEAKGYKEVKKDLIIKLPKYSLFELENGRKRMLASAGELQKGNELALPSKYVNFLYLASHYEKLKGSPEDNEQKQLFVEQHKHYLDEIIEQISEFSKRVILADANLDKVLSAYNKHRDKPIREQAENIIHLFTLTNLGAPAAFKYFDTTIDRKRYTSTKEVLDATLIHQSITGLYETRIDLSQLGGDGGGSSEAAAKPAPGGTVSLQDEHRLFDIPVTTSLPDVWLQDFPQAWAETGGLGRAKCQAPIIIDLKPTAVPVSIKQYPMSLEAHMGIRQHIIKFLELGVLRPCRSPWNTPLLPVKKPGTQDYRPVQDLREINKRTVDIHPTVPNPYNLLSTLKPDYSWYTVLDLKDAFFCLPLAPQSQELFAFEWKDPERGISGQLTWTRLPQGFKNSPTLFNEALHRDLTDFRTQHPEVTLLQYVDDLLLAAPTKKACTQGTRHLLQELGEKGYRASAKKAQICQTKVTYLGYILSEGKRWLTPGRIETVARIPPPRNPREVREFLGKAGFCRLFIPGFAELAAPLYALTKPSTPFTWQTEHQLAFEALKKALLSAPALGLPDTSKPFTLFLDERQGIAKGVLTQKLGPWKRPVAYLSKKLDPVAAGWPPCLRIMAATAMLVKDSAKLTLGQPLTVITPHTLEAIVRQPPDRWITNARLTHYQALLLDTDRVQFGPPVTLNPATLLPVPENQPSPHDCRQVLAETHGTREDLKDQELPDADHTWYTDGSSYLDSGTRRAGAAVVDGHNTIWAQSLPPGTSAQKAELIALTKALELSKGKKANIYTDSRYAFATAHTHGSIYERRGWLTSEGKEIKNKAEIIALLKALFLPQEVAIIHCPGHQKGQDPVAVGNRQADRVARQAAMAEVLTLATEPDNTSHITAGKRTADGSEFEKRTADGSEFESPKKKAKVE

SEQ ID NO: 2038 - protein, 2100 aa, synthetic construct
MPAAKRVKLDGGDKKYSIGLDIGTNSVGWAVITDEYKVPSKKFKVLGNTDRHSIKKNLIGALLFDSGETAEATRLKRTARRRYTRRKNRICYLQEIFSNEMAKVDDSFFHRLEESFLVEEDKKHERHPIFGNIVDEVAYHEKYPTIYHLRKKLVDSTDKADLRLIYLALAHMIKFRGHFLIEGDLNPDNSDVDKLFIQLVQTYNQLFEENPINASGVDAKAILSARLSKSRRLENLIAQLPGEKKNGLFGNLIALSLGLTPNFKSNFDLAEDAKLQLSKDTYDDDLDNLLAQIGDQYADLFLAAKNLSDAILLSDILRVNTEITKAPLSASMIKRYDEHHQDLTLLKALVRQQLPEKYKEIFFDQSKNGYAGYIDGGASQEEFYKFIKPILEKMDGTEELLVKLNREDLLRKQRTFDNGSIPHQIHLGELHAILRRQEDFYPFLKDNREKIEKILTFRIPYYVGPLARGNSRFAWMTRKSEETITPWNFEEVVDKGASAQSFIERMTNFDKNLPNEKVLPKHSLLYEYFTVYNELTKVKYVTEGMRKPAFLSGEQKKAIVDLLFKTNRKVTVKQLKEDYFKKIECFDSVEISGVEDRFNASLGTYHDLLKIIKDKDFLDNEENEDILEDIVLTLTLFEDREMIEERLKTYAHLFDDKVMKQLKRRRYTGWGRLSRKLINGIRDKQSGKTILDFLKSDGFANRNFMQLIHDDSLTFKEDIQKAQVSGQGDSLHEHIANLAGSPAIKKGILQTVKVVDELVKVMGRHKPENIVIEMARENQTTQKGQKNSRERMKRIEEGIKELGSQILKEHPVENTQLQNEKLYLYYLQNGRDMYVDQELDINRLSDYDVDHIVPQSFLKDDSIDNKVLTRSDKARGKSDNVPSEEVVKKMKNYWRQLLNAKLITQRKFDNLTKAERGGLSELDKAGFIKRQLVETRQITKHVAQILDSRMNTKYDENDKLIREVKVITLKSKLVSDFRKDFQFYKVREINNYHHAHDAYLNAVVGTALIKKYPKLESEFVYGDYKVYDVRKMIAKSEQEIGKATAKYFFYSNIMNFFKTEITLANGEIRKRPLIETNGETGEIVWDKGRDFATVRKVLSMPQVNIVKKTEVQTGGFSKESILPKRNSDKLIARKKDWDPKKYGGFDSPTVAYSVLVVAKVEKGKSKKLKSVKELLGITIMERSSFEKNPIDFLEAKGYKEVKKDLIIKLPKYSLFELENGRKRMLASAGELQKGNELALPSKYVNFLYLASHYEKLKGSPEDNEQKQLFVEQHKHYLDEIIEQISEFSKRVILADANLDKVLSAYNKHRDKPIREQAENIIHLFTLTNLGAPAAFKYFDTTIDRKRYTSTKEVLDATLIHQSITGLYETRIDLSQLGGDGGGGSGGGGSSGGTVSLQDEHRLFDIPVTTSLPDVWLQDFPQAWAETGGLGRAKCQAPIIIDLKPTAVPVSIKQYPMSLEAHMGIRQHIIKFLELGVLRPCRSPWNTPLLPVKKPGTQDYRPVQDLREINKRTVDIHPTVPNPYNLLSTLKPDYSWYTVLDLKDAFFCLPLAPQSQELFAFEWKDPERGISGQLTWTRLPQGFKNSPTLFNEALHRDLTDFRTQHPEVTLLQYVDDLLLAAPTKKACTQGTRHLLQELGEKGYRASAKKAQICQTKVTYLGYILSEGKRWLTPGRIETVARIPPPRNPREVREFLGKAGFCRLFIPGFAELAAPLYALTKPSTPFTWQTEHQLAFEALKKALLSAPALGLPDTSKPFTLFLDERQGIAKGVLTQKLGPWKRPVAYLSKKLDPVAAGWPPCLRIMAATAMLVKDSAKLTLGQPLTVITPHTLEAIVRQPPDRWITNARLTHYQALLLDTDRVQFGPPVTLNPATLLPVPENQPSPHDCRQVLAETHGTREDLKDQELPDADHTWYTDGSSYLDSGTRRAGAAVVDGHNTIWAQSLPPGTSAQKAELIALTKALELSKGKKANIYTDSRYAFATAHTHGSIYERRGWLTSEGKEIKNKAEIIALLKALFLPQEVAIIHCPGHQKGQDPVAVGNRQADRVARQAAMAEVLTLATEPDNTSHITAGKRTADGSEFEKRTADGSEFESPKKKAKVE

SEQ ID NO: 2039 - protein, 2102 aa, synthetic construct
MPAAKRVKLDGGDKKYSIGLDIGTNSVGWAVITDEYKVPSKKFKVLGNTDRHSIKKNLIGALLFDSGETAEATRLKRTARRRYTRRKNRICYLQEIFSNEMAKVDDSFFHRLEESFLVEEDKKHERHPIFGNIVDEVAYHEKYPTIYHLRKKLVDSTDKADLRLIYLALAHMIKFRGHFLIEGDLNPDNSDVDKLFIQLVQTYNQLFEENPINASGVDAKAILSARLSKSRRLENLIAQLPGEKKNGLFGNLIALSLGLTPNFKSNFDLAEDAKLQLSKDTYDDDLDNLLAQIGDQYADLFLAAKNLSDAILLSDILRVNTEITKAPLSASMIKRYDEHHQDLTLLKALVRQQLPEKYKEIFFDQSKNGYAGYIDGGASQEEFYKFIKPILEKMDGTEELLVKLNREDLLRKQRTFDNGSIPHQIHLGELHAILRRQEDFYPFLKDNREKIEKILTFRIPYYVGPLARGNSRFAWMTRKSEETITPWNFEEVVDKGASAQSFIERMTNFDKNLPNEKVLPKHSLLYEYFTVYNELTKVKYVTEGMRKPAFLSGEQKKAIVDLLFKTNRKVTVKQLKEDYFKKIECFDSVEISGVEDRFNASLGTYHDLLKIIKDKDFLDNEENEDILEDIVLTLTLFEDREMIEERLKTYAHLFDDKVMKQLKRRRYTGWGRLSRKLINGIRDKQSGKTILDFLKSDGFANRNFMQLIHDDSLTFKEDIQKAQVSGQGDSLHEHIANLAGSPAIKKGILQTVKVVDELVKVMGRHKPENIVIEMARENQTTQKGQKNSRERMKRIEEGIKELGSQILKEHPVENTQLQNEKLYLYYLQNGRDMYVDQELDINRLSDYDVDHIVPQSFLKDDSIDNKVLTRSDKARGKSDNVPSEEVVKKMKNYWRQLLNAKLITQRKFDNLTKAERGGLSELDKAGFIKRQLVETRQITKHVAQILDSRMNTKYDENDKLIREVKVITLKSKLVSDFRKDFQFYKVREINNYHHAHDAYLNAVVGTALIKKYPKLESEFVYGDYKVYDVRKMIAKSEQEIGKATAKYFFYSNIMNFFKTEITLANGEIRKRPLIETNGETGEIVWDKGRDFATVRKVLSMPQVNIVKKTEVQTGGFSKESILPKRNSDKLIARKKDWDPKKYGGFDSPTVAYSVLVVAKVEKGKSKKLKSVKELLGITIMERSSFEKNPIDFLEAKGYKEVKKDLIIKLPKYSLFELENGRKRMLASAGELQKGNELALPSKYVNFLYLASHYEKLKGSPEDNEQKQLFVEQHKHYLDEIIEQISEFSKRVILADANLDKVLSAYNKHRDKPIREQAENIIHLFTLTNLGAPAAFKYFDTTIDRKRYTSTKEVLDATLIHQSITGLYETRIDLSQLGGDGGEAAAKGSSPAPGGTVSLQDEHRLFDIPVTTSLPDVWLQDFPQAWAETGGLGRAKCQAPIIIDLKPTAVPVSIKQYPMSLEAHMGIRQHIIKFLELGVLRPCRSPWNTPLLPVKKPGTQDYRPVQDLREINKRTVDIHPTVPNPYNLLSTLKPDYSWYTVLDLKDAFFCLPLAPQSQELFAFEWKDPERGISGQLTWTRLPQGFKNSPTLFNEALHRDLTDFRTQHPEVTLLQYVDDLLLAAPTKKACTQGTRHLLQELGEKGYRASAKKAQICQTKVTYLGYILSEGKRWLTPGRIETVARIPPPRNPREVREFLGKAGFCRLFIPGFAELAAPLYALTKPSTPFTWQTEHQLAFEALKKALLSAPALGLPDTSKPFTLFLDERQGIAKGVLTQKLGPWKRPVAYLSKKLDPVAAGWPPCLRIMAATAMLVKDSAKLTLGQPLTVITPHTLEAIVRQPPDRWITNARLTHYQALLLDTDRVQFGPPVTLNPATLLPVPENQPSPHDCRQVLAETHGTREDLKDQELPDADHTWYTDGSSYLDSGTRRAGAAVVDGHNTIWAQSLPPGTSAQKAELIALTKALELSKGKKANIYTDSRYAFATAHTHGSIYERRGWLTSEGKEIKNKAEIIALLKALFLPQEVAIIHCPGHQKGQDPVAVGNRQADRVARQAAMAEVLTLATEPDNTSHITAGKRTADGSEFEKRTADGSEFESPKKKAKVE

SEQ ID NO: 2040 - protein, 2102 aa, synthetic construct
MPAAKRVKLDGGDKKYSIGLDIGTNSVGWAVITDEYKVPSKKFKVLGNTDRHSIKKNLIGALLFDSGETAEATRLKRTARRRYTRRKNRICYLQEIFSNEMAKVDDSFFHRLEESFLVEEDKKHERHPIFGNIVDEVAYHEKYPTIYHLRKKLVDSTDKADLRLIYLALAHMIKFRGHFLIEGDLNPDNSDVDKLFIQLVQTYNQLFEENPINASGVDAKAILSARLSKSRRLENLIAQLPGEKKNGLFGNLIALSLGLTPNFKSNFDLAEDAKLQLSKDTYDDDLDNLLAQIGDQYADLFLAAKNLSDAILLSDILRVNTEITKAPLSASMIKRYDEHHQDLTLLKALVRQQLPEKYKEIFFDQSKNGYAGYIDGGASQEEFYKFIKPILEKMDGTEELLVKLNREDLLRKQRTFDNGSIPHQIHLGELHAILRRQEDFYPFLKDNREKIEKILTFRIPYYVGPLARGNSRFAWMTRKSEETITPWNFEEVVDKGASAQSFIERMTNFDKNLPNEKVLPKHSLLYEYFTVYNELTKVKYVTEGMRKPAFLSGEQKKAIVDLLFKTNRKVTVKQLKEDYFKKIECFDSVEISGVEDRFNASLGTYHDLLKIIKDKDFLDNEENEDILEDIVLTLTLFEDREMIEERLKTYAHLFDDKVMKQLKRRRYTGWGRLSRKLINGIRDKQSGKTILDFLKSDGFANRNFMQLIHDDSLTFKEDIQKAQVSGQGDSLHEHIANLAGSPAIKKGILQTVKVVDELVKVMGRHKPENIVIEMARENQTTQKGQKNSRERMKRIEEGIKELGSQILKEHPVENTQLQNEKLYLYYLQNGRDMYVDQELDINRLSDYDVDHIVPQSFLKDDSIDNKVLTRSDKARGKSDNVPSEEVVKKMKNYWRQLLNAKLITQRKFDNLTKAERGGLSELDKAGFIKRQLVETRQITKHVAQILDSRMNTKYDENDKLIREVKVITLKSKLVSDFRKDFQFYKVREINNYHHAHDAYLNAVVGTALIKKYPKLESEFVYGDYKVYDVRKMIAKSEQEIGKATAKYFFYSNIMNFFKTEITLANGEIRKRPLIETNGETGEIVWDKGRDFATVRKVLSMPQVNIVKKTEVQTGGFSKESILPKRNSDKLIARKKDWDPKKYGGFDSPTVAYSVLVVAKVEKGKSKKLKSVKELLGITIMERSSFEKNPIDFLEAKGYKEVKKDLIIKLPKYSLFELENGRKRMLASAGELQKGNELALPSKYVNFLYLASHYEKLKGSPEDNEQKQLFVEQHKHYLDEIIEQISEFSKRVILADANLDKVLSAYNKHRDKPIREQAENIIHLFTLTNLGAPAAFKYFDTTIDRKRYTSTKEVLDATLIHQSITGLYETRIDLSQLGGDGGPAPEAAAKGSSGGTVSLQDEHRLFDIPVTTSLPDVWLQDFPQAWAETGGLGRAKCQAPIIIDLKPTAVPVSIKQYPMSLEAHMGIRQHIIKFLELGVLRPCRSPWNTPLLPVKKPGTQDYRPVQDLREINKRTVDIHPTVPNPYNLLSTLKPDYSWYTVLDLKDAFFCLPLAPQSQELFAFEWKDPERGISGQLTWTRLPQGFKNSPTLFNEALHRDLTDFRTQHPEVTLLQYVDDLLLAAPTKKACTQGTRHLLQELGEKGYRASAKKAQICQTKVTYLGYILSEGKRWLTPGRIETVARIPPPRNPREVREFLGKAGFCRLFIPGFAELAAPLYALTKPSTPFTWQTEHQLAFEALKKALLSAPALGLPDTSKPFTLFLDERQGIAKGVLTQKLGPWKRPVAYLSKKLDPVAAGWPPCLRIMAATAMLVKDSAKLTLGQPLTVITPHTLEAIVRQPPDRWITNARLTHYQALLLDTDRVQFGPPVTLNPATLLPVPENQPSPHDCRQVLAETHGTREDLKDQELPDADHTWYTDGSSYLDSGTRRAGAAVVDGHNTIWAQSLPPGTSAQKAELIALTKALELSKGKKANIYTDSRYAFATAHTHGSIYERRGWLTSEGKEIKNKAEIIALLKALFLPQEVAIIHCPGHQKGQDPVAVGNRQADRVARQAAMAEVLTLATEPDNTSHITAGKRTADGSEFEKRTADGSEFESPKKKAKVE

SEQ ID NO: 2041 - protein, 2102 aa, synthetic construct
MPAAKRVKLDGGDKKYSIGLDIGTNSVGWAVITDEYKVPSKKFKVLGNTDRHSIKKNLIGALLFDSGETAEATRLKRTARRRYTRRKNRICYLQEIFSNEMAKVDDSFFHRLEESFLVEEDKKHERHPIFGNIVDEVAYHEKYPTIYHLRKKLVDSTDKADLRLIYLALAHMIKFRGHFLIEGDLNPDNSDVDKLFIQLVQTYNQLFEENPINASGVDAKAILSARLSKSRRLENLIAQLPGEKKNGLFGNLIALSLGLTPNFKSNFDLAEDAKLQLSKDTYDDDLDNLLAQIGDQYADLFLAAKNLSDAILLSDILRVNTEITKAPLSASMIKRYDEHHQDLTLLKALVRQQLPEKYKEIFFDQSKNGYAGYIDGGASQEEFYKFIKPILEKMDGTEELLVKLNREDLLRKQRTFDNGSIPHQIHLGELHAILRRQEDFYPFLKDNREKIEKILTFRIPYYVGPLARGNSRFAWMTRKSEETITPWNFEEVVDKGASAQSFIERMTNFDKNLPNEKVLPKHSLLYEYFTVYNELTKVKYVTEGMRKPAFLSGEQKKAIVDLLFKTNRKVTVKQLKEDYFKKIECFDSVEISGVEDRFNASLGTYHDLLKIIKDKDFLDNEENEDILEDIVLTLTLFEDREMIEERLKTYAHLFDDKVMKQLKRRRYTGWGRLSRKLINGIRDKQSGKTILDFLKSDGFANRNFMQLIHDDSLTFKEDIQKAQVSGQGDSLHEHIANLAGSPAIKKGILQTVKVVDELVKVMGRHKPENIVIEMARENQTTQKGQKNSRERMKRIEEGIKELGSQILKEHPVENTQLQNEKLYLYYLQNGRDMYVDQELDINRLSDYDVDHIVPQSFLKDDSIDNKVLTRSDKARGKSDNVPSEEVVKKMKNYWRQLLNAKLITQRKFDNLTKAERGGLSELDKAGFIKRQLVETRQITKHVAQILDSRMNTKYDENDKLIREVKVITLKSKLVSDFRKDFQFYKVREINNYHHAHDAYLNAVVGTALIKKYPKLESEFVYGDYKVYDVRKMIAKSEQEIGKATAKYFFYSNIMNFFKTEITLANGEIRKRPLIETNGETGEIVWDKGRDFATVRKVLSMPQVNIVKKTEVQTGGFSKESILPKRNSDKLIARKKDWDPKKYGGFDSPTVAYSVLVVAKVEKGKSKKLKSVKELLGITIMERSSFEKNPIDFLEAKGYKEVKKDLIIKLPKYSLFELENGRKRMLASAGELQKGNELALPSKYVNFLYLASHYEKLKGSPEDNEQKQLFVEQHKHYLDEIIEQISEFSKRVILADANLDKVLSAYNKHRDKPIREQAENIIHLFTLTNLGAPAAFKYFDTTIDRKRYTSTKEVLDATLIHQSITGLYETRIDLSQLGGDGGEAAAKGGGPAPGGTVSLQDEHRLFDIPVTTSLPDVWLQDFPQAWAETGGLGRAKCQAPIIIDLKPTAVPVSIKQYPMSLEAHMGIRQHIIKFLELGVLRPCRSPWNTPLLPVKKPGTQDYRPVQDLREINKRTVDIHPTVPNPYNLLSTLKPDYSWYTVLDLKDAFFCLPLAPQSQELFAFEWKDPERGISGQLTWTRLPQGFKNSPTLFNEALHRDLTDFRTQHPEVTLLQYVDDLLLAAPTKKACTQGTRHLLQELGEKGYRASAKKAQICQTKVTYLGYILSEGKRWLTPGRIETVARIPPPRNPREVREFLGKAGFCRLFIPGFAELAAPLYALTKPSTPFTWQTEHQLAFEALKKALLSAPALGLPDTSKPFTLFLDERQGIAKGVLTQKLGPWKRPVAYLSKKLDPVAAGWPPCLRIMAATAMLVKDSAKLTLGQPLTVITPHTLEAIVRQPPDRWITNARLTHYQALLLDTDRVQFGPPVTLNPATLLPVPENQPSPHDCRQVLAETHGTREDLKDQELPDADHTWYTDGSSYLDSGTRRAGAAVVDGHNTIWAQSLPPGTSAQKAELIALTKALELSKGKKANIYTDSRYAFATAHTHGSIYERRGWLTSEGKEIKNKAEIIALLKALFLPQEVAIIHCPGHQKGQDPVAVGNRQADRVARQAAMAEVLTLATEPDNTSHITAGKRTADGSEFEKRTADGSEFESPKKKAKVE

SEQ ID NO: 2042 - protein, 2100 aa, synthetic construct
MPAAKRVKLDGGDKKYSIGLDIGTNSVGWAVITDEYKVPSKKFKVLGNTDRHSIKKNLIGALLFDSGETAEATRLKRTARRRYTRRKNRICYLQEIFSNEMAKVDDSFFHRLEESFLVEEDKKHERHPIFGNIVDEVAYHEKYPTIYHLRKKLVDSTDKADLRLIYLALAHMIKFRGHFLIEGDLNPDNSDVDKLFIQLVQTYNQLFEENPINASGVDAKAILSARLSKSRRLENLIAQLPGEKKNGLFGNLIALSLGLTPNFKSNFDLAEDAKLQLSKDTYDDDLDNLLAQIGDQYADLFLAAKNLSDAILLSDILRVNTEITKAPLSASMIKRYDEHHQDLTLLKALVRQQLPEKYKEIFFDQSKNGYAGYIDGGASQEEFYKFIKPILEKMDGTEELLVKLNREDLLRKQRTFDNGSIPHQIHLGELHAILRRQEDFYPFLKDNREKIEKILTFRIPYYVGPLARGNSRFAWMTRKSEETITPWNFEEVVDKGASAQSFIERMTNFDKNLPNEKVLPKHSLLYEYFTVYNELTKVKYVTEGMRKPAFLSGEQKKAIVDLLFKTNRKVTVKQLKEDYFKKIECFDSVEISGVEDRFNASLGTYHDLLKIIKDKDFLDNEENEDILEDIVLTLTLFEDREMIEERLKTYAHLFDDKVMKQLKRRRYTGWGRLSRKLINGIRDKQSGKTILDFLKSDGFANRNFMQLIHDDSLTFKEDIQKAQVSGQGDSLHEHIANLAGSPAIKKGILQTVKVVDELVKVMGRHKPENIVIEMARENQTTQKGQKNSRERMKRIEEGIKELGSQILKEHPVENTQLQNEKLYLYYLQNGRDMYVDQELDINRLSDYDVDHIVPQSFLKDDSIDNKVLTRSDKARGKSDNVPSEEVVKKMKNYWRQLLNAKLITQRKFDNLTKAERGGLSELDKAGFIKRQLVETRQITKHVAQILDSRMNTKYDENDKLIREVKVITLKSKLVSDFRKDFQFYKVREINNYHHAHDAYLNAVVGTALIKKYPKLESEFVYGDYKVYDVRKMIAKSEQEIGKATAKYFFYSNIMNFFKTEITLANGEIRKRPLIETNGETGEIVWDKGRDFATVRKVLSMPQVNIVKKTEVQTGGFSKESILPKRNSDKLIARKKDWDPKKYGGFDSPTVAYSVLVVAKVEKGKSKKLKSVKELLGITIMERSSFEKNPIDFLEAKGYKEVKKDLIIKLPKYSLFELENGRKRMLASAGELQKGNELALPSKYVNFLYLASHYEKLKGSPEDNEQKQLFVEQHKHYLDEIIEQISEFSKRVILADANLDKVLSAYNKHRDKPIREQAENIIHLFTLTNLGAPAAFKYFDTTIDRKRYTSTKEVLDATLIHQSITGLYETRIDLSQLGGDGGGSSGSSGSSGGTVSLQDEHRLFDIPVTTSLPDVWLQDFPQAWAETGGLGRAKCQAPIIIDLKPTAVPVSIKQYPMSLEAHMGIRQHIIKFLELGVLRPCRSPWNTPLLPVKKPGTQDYRPVQDLREINKRTVDIHPTVPNPYNLLSTLKPDYSWYTVLDLKDAFFCLPLAPQSQELFAFEWKDPERGISGQLTWTRLPQGFKNSPTLFNEALHRDLTDFRTQHPEVTLLQYVDDLLLAAPTKKACTQGTRHLLQELGEKGYRASAKKAQICQTKVTYLGYILSEGKRWLTPGRIETVARIPPPRNPREVREFLGKAGFCRLFIPGFAELAAPLYALTKPSTPFTWQTEHQLAFEALKKALLSAPALGLPDTSKPFTLFLDERQGIAKGVLTQKLGPWKRPVAYLSKKLDPVAAGWPPCLRIMAATAMLVKDSAKLTLGQPLTVITPHTLEAIVRQPPDRWITNARLTHYQALLLDTDRVQFGPPVTLNPATLLPVPENQPSPHDCRQVLAETHGTREDLKDQELPDADHTWYTDGSSYLDSGTRRAGAAVVDGHNTIWAQSLPPGTSAQKAELIALTKALELSKGKKANIYTDSRYAFATAHTHGSIYERRGWLTSEGKEIKNKAEIIALLKALFLPQEVAIIHCPGHQKGQDPVAVGNRQADRVARQAAMAEVLTLATEPDNTSHITAGKRTADGSEFEKRTADGSEFESPKKKAKVE

SEQ ID NO: 2043 - protein, 2106 aa, synthetic construct
MPAAKRVKLDGGDKKYSIGLDIGTNSVGWAVITDEYKVPSKKFKVLGNTDRHSIKKNLIGALLFDSGETAEATRLKRTARRRYTRRKNRICYLQEIFSNEMAKVDDSFFHRLEESFLVEEDKKHERHPIFGNIVDEVAYHEKYPTIYHLRKKLVDSTDKADLRLIYLALAHMIKFRGHFLIEGDLNPDNSDVDKLFIQLVQTYNQLFEENPINASGVDAKAILSARLSKSRRLENLIAQLPGEKKNGLFGNLIALSLGLTPNFKSNFDLAEDAKLQLSKDTYDDDLDNLLAQIGDQYADLFLAAKNLSDAILLSDILRVNTEITKAPLSASMIKRYDEHHQDLTLLKALVRQQLPEKYKEIFFDQSKNGYAGYIDGGASQEEFYKFIKPILEKMDGTEELLVKLNREDLLRKQRTFDNGSIPHQIHLGELHAILRRQEDFYPFLKDNREKIEKILTFRIPYYVGPLARGNSRFAWMTRKSEETITPWNFEEVVDKGASAQSFIERMTNFDKNLPNEKVLPKHSLLYEYFTVYNELTKVKYVTEGMRKPAFLSGEQKKAIVDLLFKTNRKVTVKQLKEDYFKKIECFDSVEISGVEDRFNASLGTYHDLLKIIKDKDFLDNEENEDILEDIVLTLTLFEDREMIEERLKTYAHLFDDKVMKQLKRRRYTGWGRLSRKLINGIRDKQSGKTILDFLKSDGFANRNFMQLIHDDSLTFKEDIQKAQVSGQGDSLHEHIANLAGSPAIKKGILQTVKVVDELVKVMGRHKPENIVIEMARENQTTQKGQKNSRERMKRIEEGIKELGSQILKEHPVENTQLQNEKLYLYYLQNGRDMYVDQELDINRLSDYDVDHIVPQSFLKDDSIDNKVLTRSDKARGKSDNVPSEEVVKKMKNYWRQLLNAKLITQRKFDNLTKAERGGLSELDKAGFIKRQLVETRQITKHVAQILDSRMNTKYDENDKLIREVKVITLKSKLVSDFRKDFQFYKVREINNYHHAHDAYLNAVVGTALIKKYPKLESEFVYGDYKVYDVRKMIAKSEQEIGKATAKYFFYSNIMNFFKTEITLANGEIRKRPLIETNGETGEIVWDKGRDFATVRKVLSMPQVNIVKKTEVQTGGFSKESILPKRNSDKLIARKKDWDPKKYGGFDSPTVAYSVLVVAKVEKGKSKKLKSVKELLGITIMERSSFEKNPIDFLEAKGYKEVKKDLIIKLPKYSLFELENGRKRMLASAGELQKGNELALPSKYVNFLYLASHYEKLKGSPEDNEQKQLFVEQHKHYLDEIIEQISEFSKRVILADANLDKVLSAYNKHRDKPIREQAENIIHLFTLTNLGAPAAFKYFDTTIDRKRYTSTKEVLDATLIHQSITGLYETRIDLSQLGGDGGEAAAKEAAAKEAAAKGGTVSLQDEHRLFDIPVTTSLPDVWLQDFPQAWAETGGLGRAKCQAPIIIDLKPTAVPVSIKQYPMSLEAHMGIRQHIIKFLELGVLRPCRSPWNTPLLPVKKPGTQDYRPVQDLREINKRTVDIHPTVPNPYNLLSTLKPDYSWYTVLDLKDAFFCLPLAPQSQELFAFEWKDPERGISGQLTWTRLPQGFKNSPTLFNEALHRDLTDFRTQHPEVTLLQYVDDLLLAAPTKKACTQGTRHLLQELGEKGYRASAKKAQICQTKVTYLGYILSEGKRWLTPGRIETVARIPPPRNPREVREFLGKAGFCRLFIPGFAELAAPLYALTKPSTPFTWQTEHQLAFEALKKALLSAPALGLPDTSKPFTLFLDERQGIAKGVLTQKLGPWKRPVAYLSKKLDPVAAGWPPCLRIMAATAMLVKDSAKLTLGQPLTVITPHTLEAIVRQPPDRWITNARLTHYQALLLDTDRVQFGPPVTLNPATLLPVPENQPSPHDCRQVLAETHGTREDLKDQELPDADHTWYTDGSSYLDSGTRRAGAAVVDGHNTIWAQSLPPGTSAQKAELIALTKALELSKGKKANIYTDSRYAFATAHTHGSIYERRGWLTSEGKEIKNKAEIIALLKALFLPQEVAIIHCPGHQKGQDPVAVGNRQADRVARQAAMAEVLTLATEPDNTSHITAGKRTADGSEFEKRTADGSEFESPKKKAKVE

SEQ ID NO: 2044 - protein, 2102 aa, synthetic construct
MPAAKRVKLDGGDKKYSIGLDIGTNSVGWAVITDEYKVPSKKFKVLGNTDRHSIKKNLIGALLFDSGETAEATRLKRTARRRYTRRKNRICYLQEIFSNEMAKVDDSFFHRLEESFLVEEDKKHERHPIFGNIVDEVAYHEKYPTIYHLRKKLVDSTDKADLRLIYLALAHMIKFRGHFLIEGDLNPDNSDVDKLFIQLVQTYNQLFEENPINASGVDAKAILSARLSKSRRLENLIAQLPGEKKNGLFGNLIALSLGLTPNFKSNFDLAEDAKLQLSKDTYDDDLDNLLAQIGDQYADLFLAAKNLSDAILLSDILRVNTEITKAPLSASMIKRYDEHHQDLTLLKALVRQQLPEKYKEIFFDQSKNGYAGYIDGGASQEEFYKFIKPILEKMDGTEELLVKLNREDLLRKQRTFDNGSIPHQIHLGELHAILRRQEDFYPFLKDNREKIEKILTFRIPYYVGPLARGNSRFAWMTRKSEETITPWNFEEVVDKGASAQSFIERMTNFDKNLPNEKVLPKHSLLYEYFTVYNELTKVKYVTEGMRKPAFLSGEQKKAIVDLLFKTNRKVTVKQLKEDYFKKIECFDSVEISGVEDRFNASLGTYHDLLKIIKDKDFLDNEENEDILEDIVLTLTLFEDREMIEERLKTYAHLFDDKVMKQLKRRRYTGWGRLSRKLINGIRDKQSGKTILDFLKSDGFANRNFMQLIHDDSLTFKEDIQKAQVSGQGDSLHEHIANLAGSPAIKKGILQTVKVVDELVKVMGRHKPENIVIEMARENQTTQKGQKNSRERMKRIEEGIKELGSQILKEHPVENTQLQNEKLYLYYLQNGRDMYVDQELDINRLSDYDVDHIVPQSFLKDDSIDNKVLTRSDKARGKSDNVPSEEVVKKMKNYWRQLLNAKLITQRKFDNLTKAERGGLSELDKAGFIKRQLVETRQITKHVAQILDSRMNTKYDENDKLIREVKVITLKSKLVSDFRKDFQFYKVREINNYHHAHDAYLNAVVGTALIKKYPKLESEFVYGDYKVYDVRKMIAKSEQEIGKATAKYFFYSNIMNFFKTEITLANGEIRKRPLIETNGETGEIVWDKGRDFATVRKVLSMPQVNIVKKTEVQTGGFSKESILPKRNSDKLIARKKDWDPKKYGGFDSPTVAYSVLVVAKVEKGKSKKLKSVKELLGITIMERSSFEKNPIDFLEAKGYKEVKKDLIIKLPKYSLFELENGRKRMLASAGELQKGNELALPSKYVNFLYLASHYEKLKGSPEDNEQKQLFVEQHKHYLDEIIEQISEFSKRVILADANLDKVLSAYNKHRDKPIREQAENIIHLFTLTNLGAPAAFKYFDTTIDRKRYTSTKEVLDATLIHQSITGLYETRIDLSQLGGDGGPAPEAAAKGGSGGTVSLQDEHRLFDIPVTTSLPDVWLQDFPQAWAETGGLGRAKCQAPIIIDLKPTAVPVSIKQYPMSLEAHMGIRQHIIKFLELGVLRPCRSPWNTPLLPVKKPGTQDYRPVQDLREINKRTVDIHPTVPNPYNLLSTLKPDYSWYTVLDLKDAFFCLPLAPQSQELFAFEWKDPERGISGQLTWTRLPQGFKNSPTLFNEALHRDLTDFRTQHPEVTLLQYVDDLLLAAPTKKACTQGTRHLLQELGEKGYRASAKKAQICQTKVTYLGYILSEGKRWLTPGRIETVARIPPPRNPREVREFLGKAGFCRLFIPGFAELAAPLYALTKPSTPFTWQTEHQLAFEALKKALLSAPALGLPDTSKPFTLFLDERQGIAKGVLTQKLGPWKRPVAYLSKKLDPVAAGWPPCLRIMAATAMLVKDSAKLTLGQPLTVITPHTLEAIVRQPPDRWITNARLTHYQALLLDTDRVQFGPPVTLNPATLLPVPENQPSPHDCRQVLAETHGTREDLKDQELPDADHTWYTDGSSYLDSGTRRAGAAVVDGHNTIWAQSLPPGTSAQKAELIALTKALELSKGKKANIYTDSRYAFATAHTHGSIYERRGWLTSEGKEIKNKAEIIALLKALFLPQEVAIIHCPGHQKGQDPVAVGNRQADRVARQAAMAEVLTLATEPDNTSHITAGKRTADGSEFEKRTADGSEFESPKKKAKVE

SEQ ID NO: 2045 - protein, 2124 aa, synthetic construct
MPAAKRVKLDGGDKKYSIGLDIGTNSVGWAVITDEYKVPSKKFKVLGNTDRHSIKKNLIGALLFDSGETAEATRLKRTARRRYTRRKNRICYLQEIFSNEMAKVDDSFFHRLEESFLVEEDKKHERHPIFGNIVDEVAYHEKYPTIYHLRKKLVDSTDKADLRLIYLALAHMIKFRGHFLIEGDLNPDNSDVDKLFIQLVQTYNQLFEENPINASGVDAKAILSARLSKSRRLENLIAQLPGEKKNGLFGNLIALSLGLTPNFKSNFDLAEDAKLQLSKDTYDDDLDNLLAQIGDQYADLFLAAKNLSDAILLSDILRVNTEITKAPLSASMIKRYDEHHQDLTLLKALVRQQLPEKYKEIFFDQSKNGYAGYIDGGASQEEFYKFIKPILEKMDGTEELLVKLNREDLLRKQRTFDNGSIPHQIHLGELHAILRRQEDFYPFLKDNREKIEKILTFRIPYYVGPLARGNSRFAWMTRKSEETITPWNFEEVVDKGASAQSFIERMTNFDKNLPNEKVLPKHSLLYEYFTVYNELTKVKYVTEGMRKPAFLSGEQKKAIVDLLFKTNRKVTVKQLKEDYFKKIECFDSVEISGVEDRFNASLGTYHDLLKIIKDKDFLDNEENEDILEDIVLTLTLFEDREMIEERLKTYAHLFDDKVMKQLKRRRYTGWGRLSRKLINGIRDKQSGKTILDFLKSDGFANRNFMQLIHDDSLTFKEDIQKAQVSGQGDSLHEHIANLAGSPAIKKGILQTVKVVDELVKVMGRHKPENIVIEMARENQTTQKGQKNSRERMKRIEEGIKELGSQILKEHPVENTQLQNEKLYLYYLQNGRDMYVDQELDINRLSDYDVDHIVPQSFLKDDSIDNKVLTRSDKARGKSDNVPSEEVVKKMKNYWRQLLNAKLITQRKFDNLTKAERGGLSELDKAGFIKRQLVETRQITKHVAQILDSRMNTKYDENDKLIREVKVITLKSKLVSDFRKDFQFYKVREINNYHHAHDAYLNAVVGTALIKKYPKLESEFVYGDYKVYDVRKMIAKSEQEIGKATAKYFFYSNIMNFFKTEITLANGEIRKRPLIETNGETGEIVWDKGRDFATVRKVLSMPQVNIVKKTEVQTGGFSKESILPKRNSDKLIARKKDWDPKKYGGFDSPTVAYSVLVVAKVEKGKSKKLKSVKELLGITIMERSSFEKNPIDFLEAKGYKEVKKDLIIKLPKYSLFELENGRKRMLASAGELQKGNELALPSKYVNFLYLASHYEKLKGSPEDNEQKQLFVEQHKHYLDEIIEQISEFSKRVILADANLDKVLSAYNKHRDKPIREQAENIIHLFTLTNLGAPAAFKYFDTTIDRKRYTSTKEVLDATLIHQSITGLYETRIDLSQLGGDGGSGGSSGGSSGSETPGTSESATPESSGGSSGGSSGGTVSLQDEHRLFDIPVTTSLPDVWLQDFPQAWAETGGLGRAKCQAPIIIDLKPTAVPVSIKQYPMSLEAHMGIRQHIIKFLELGVLRPCRSPWNTPLLPVKKPGTQDYRPVQDLREINKRTVDIHPTVPNPYNLLSTLKPDYSWYTVLDLKDAFFCLPLAPQSQELFAFEWKDPERGISGQLTWTRLPQGFKNSPTLFNEALHRDLTDFRTQHPEVTLLQYVDDLLLAAPTKKACTQGTRHLLQELGEKGYRASAKKAQICQTKVTYLGYILSEGKRWLTPGRIETVARIPPPRNPREVREFLGKAGFCRLFIPGFAELAAPLYALTKPSTPFTWQTEHQLAFEALKKALLSAPALGLPDTSKPFTLFLDERQGIAKGVLTQKLGPWKRPVAYLSKKLDPVAAGWPPCLRIMAATAMLVKDSAKLTLGQPLTVITPHTLEAIVRQPPDRWITNARLTHYQALLLDTDRVQFGPPVTLNPATLLPVPENQPSPHDCRQVLAETHGTREDLKDQELPDADHTWYTDGSSYLDSGTRRAGAAVVDGHNTIWAQSLPPGTSAQKAELIALTKALELSKGKKANIYTDSRYAFATAHTHGSIYERRGWLTSEGKEIKNKAEIIALLKALFLPQEVAIIHCPGHQKGQDPVAVGNRQADRVARQAAMAEVLTLATEPDNTSHITAGKRTADGSEFEKRTADGSEFESPKKKAKVE

SEQ ID NO: 2046 - protein, 2102 aa, synthetic construct
MPAAKRVKLDGGDKKYSIGLDIGTNSVGWAVITDEYKVPSKKFKVLGNTDRHSIKKNLIGALLFDSGETAEATRLKRTARRRYTRRKNRICYLQEIFSNEMAKVDDSFFHRLEESFLVEEDKKHERHPIFGNIVDEVAYHEKYPTIYHLRKKLVDSTDKADLRLIYLALAHMIKFRGHFLIEGDLNPDNSDVDKLFIQLVQTYNQLFEENPINASGVDAKAILSARLSKSRRLENLIAQLPGEKKNGLFGNLIALSLGLTPNFKSNFDLAEDAKLQLSKDTYDDDLDNLLAQIGDQYADLFLAAKNLSDAILLSDILRVNTEITKAPLSASMIKRYDEHHQDLTLLKALVRQQLPEKYKEIFFDQSKNGYAGYIDGGASQEEFYKFIKPILEKMDGTEELLVKLNREDLLRKQRTFDNGSIPHQIHLGELHAILRRQEDFYPFLKDNREKIEKILTFRIPYYVGPLARGNSRFAWMTRKSEETITPWNFEEVVDKGASAQSFIERMTNFDKNLPNEKVLPKHSLLYEYFTVYNELTKVKYVTEGMRKPAFLSGEQKKAIVDLLFKTNRKVTVKQLKEDYFKKIECFDSVEISGVEDRFNASLGTYHDLLKIIKDKDFLDNEENEDILEDIVLTLTLFEDREMIEERLKTYAHLFDDKVMKQLKRRRYTGWGRLSRKLINGIRDKQSGKTILDFLKSDGFANRNFMQLIHDDSLTFKEDIQKAQVSGQGDSLHEHIANLAGSPAIKKGILQTVKVVDELVKVMGRHKPENIVIEMARENQTTQKGQKNSRERMKRIEEGIKELGSQILKEHPVENTQLQNEKLYLYYLQNGRDMYVDQELDINRLSDYDVDHIVPQSFLKDDSIDNKVLTRSDKARGKSDNVPSEEVVKKMKNYWRQLLNAKLITQRKFDNLTKAERGGLSELDKAGFIKRQLVETRQITKHVAQILDSRMNTKYDENDKLIREVKVITLKSKLVSDFRKDFQFYKVREINNYHHAHDAYLNAVVGTALIKKYPKLESEFVYGDYKVYDVRKMIAKSEQEIGKATAKYFFYSNIMNFFKTEITLANGEIRKRPLIETNGETGEIVWDKGRDFATVRKVLSMPQVNIVKKTEVQTGGFSKESILPKRNSDKLIARKKDWDPKKYGGFDSPTVAYSVLVVAKVEKGKSKKLKSVKELLGITIMERSSFEKNPIDFLEAKGYKEVKKDLIIKLPKYSLFELENGRKRMLASAGELQKGNELALPSKYVNFLYLASHYEKLKGSPEDNEQKQLFVEQHKHYLDEIIEQISEFSKRVILADANLDKVLSAYNKHRDKPIREQAENIIHLFTLTNLGAPAAFKYFDTTIDRKRYTSTKEVLDATLIHQSITGLYETRIDLSQLGGDGGGGSEAAAKGSSGGTVSLQDEHRLFDIPVTTSLPDVWLQDFPQAWAETGGLGRAKCQAPIIIDLKPTAVPVSIKQYPMSLEAHMGIRQHIIKFLELGVLRPCRSPWNTPLLPVKKPGTQDYRPVQDLREINKRTVDIHPTVPNPYNLLSTLKPDYSWYTVLDLKDAFFCLPLAPQSQELFAFEWKDPERGISGQLTWTRLPQGFKNSPTLFNEALHRDLTDFRTQHPEVTLLQYVDDLLLAAPTKKACTQGTRHLLQELGEKGYRASAKKAQICQTKVTYLGYILSEGKRWLTPGRIETVARIPPPRNPREVREFLGKAGFCRLFIPGFAELAAPLYALTKPSTPFTWQTEHQLAFEALKKALLSAPALGLPDTSKPFTLFLDERQGIAKGVLTQKLGPWKRPVAYLSKKLDPVAAGWPPCLRIMAATAMLVKDSAKLTLGQPLTVITPHTLEAIVRQPPDRWITNARLTHYQALLLDTDRVQFGPPVTLNPATLLPVPENQPSPHDCRQVLAETHGTREDLKDQELPDADHTWYTDGSSYLDSGTRRAGAAVVDGHNTIWAQSLPPGTSAQKAELIALTKALELSKGKKANIYTDSRYAFATAHTHGSIYERRGWLTSEGKEIKNKAEIIALLKALFLPQEVAIIHCPGHQKGQDPVAVGNRQADRVARQAAMAEVLTLATEPDNTSHITAGKRTADGSEFEKRTADGSEFESPKKKAKVE

SEQ ID NO: 2047 - protein, 2097 aa, synthetic construct
MPAAKRVKLDGGDKKYSIGLDIGTNSVGWAVITDEYKVPSKKFKVLGNTDRHSIKKNLIGALLFDSGETAEATRLKRTARRRYTRRKNRICYLQEIFSNEMAKVDDSFFHRLEESFLVEEDKKHERHPIFGNIVDEVAYHEKYPTIYHLRKKLVDSTDKADLRLIYLALAHMIKFRGHFLIEGDLNPDNSDVDKLFIQLVQTYNQLFEENPINASGVDAKAILSARLSKSRRLENLIAQLPGEKKNGLFGNLIALSLGLTPNFKSNFDLAEDAKLQLSKDTYDDDLDNLLAQIGDQYADLFLAAKNLSDAILLSDILRVNTEITKAPLSASMIKRYDEHHQDLTLLKALVRQQLPEKYKEIFFDQSKNGYAGYIDGGASQEEFYKFIKPILEKMDGTEELLVKLNREDLLRKQRTFDNGSIPHQIHLGELHAILRRQEDFYPFLKDNREKIEKILTFRIPYYVGPLARGNSRFAWMTRKSEETITPWNFEEVVDKGASAQSFIERMTNFDKNLPNEKVLPKHSLLYEYFTVYNELTKVKYVTEGMRKPAFLSGEQKKAIVDLLFKTNRKVTVKQLKEDYFKKIECFDSVEISGVEDRFNASLGTYHDLLKIIKDKDFLDNEENEDILEDIVLTLTLFEDREMIEERLKTYAHLFDDKVMKQLKRRRYTGWGRLSRKLINGIRDKQSGKTILDFLKSDGFANRNFMQLIHDDSLTFKEDIQKAQVSGQGDSLHEHIANLAGSPAIKKGILQTVKVVDELVKVMGRHKPENIVIEMARENQTTQKGQKNSRERMKRIEEGIKELGSQILKEHPVENTQLQNEKLYLYYLQNGRDMYVDQELDINRLSDYDVDHIVPQSFLKDDSIDNKVLTRSDKARGKSDNVPSEEVVKKMKNYWRQLLNAKLITQRKFDNLTKAERGGLSELDKAGFIKRQLVETRQITKHVAQILDSRMNTKYDENDKLIREVKVITLKSKLVSDFRKDFQFYKVREINNYHHAHDAYLNAVVGTALIKKYPKLESEFVYGDYKVYDVRKMIAKSEQEIGKATAKYFFYSNIMNFFKTEITLANGEIRKRPLIETNGETGEIVWDKGRDFATVRKVLSMPQVNIVKKTEVQTGGFSKESILPKRNSDKLIARKKDWDPKKYGGFDSPTVAYSVLVVAKVEKGKSKKLKSVKELLGITIMERSSFEKNPIDFLEAKGYKEVKKDLIIKLPKYSLFELENGRKRMLASAGELQKGNELALPSKYVNFLYLASHYEKLKGSPEDNEQKQLFVEQHKHYLDEIIEQISEFSKRVILADANLDKVLSAYNKHRDKPIREQAENIIHLFTLTNLGAPAAFKYFDTTIDRKRYTSTKEVLDATLIHQSITGLYETRIDLSQLGGDGGGSSGGSGGTVSLQDEHRLFDIPVTTSLPDVWLQDFPQAWAETGGLGRAKCQAPIIIDLKPTAVPVSIKQYPMSLEAHMGIRQHIIKFLELGVLRPCRSPWNTPLLPVKKPGTQDYRPVQDLREINKRTVDIHPTVPNPYNLLSTLKPDYSWYTVLDLKDAFFCLPLAPQSQELFAFEWKDPERGISGQLTWTRLPQGFKNSPTLFNEALHRDLTDFRTQHPEVTLLQYVDDLLLAAPTKKACTQGTRHLLQELGEKGYRASAKKAQICQTKVTYLGYILSEGKRWLTPGRIETVARIPPPRNPREVREFLGKAGFCRLFIPGFAELAAPLYALTKPSTPFTWQTEHQLAFEALKKALLSAPALGLPDTSKPFTLFLDERQGIAKGVLTQKLGPWKRPVAYLSKKLDPVAAGWPPCLRIMAATAMLVKDSAKLTLGQPLTVITPHTLEAIVRQPPDRWITNARLTHYQALLLDTDRVQFGPPVTLNPATLLPVPENQPSPHDCRQVLAETHGTREDLKDQELPDADHTWYTDGSSYLDSGTRRAGAAVVDGHNTIWAQSLPPGTSAQKAELIALTKALELSKGKKANIYTDSRYAFATAHTHGSIYERRGWLTSEGKEIKNKAEIIALLKALFLPQEVAIIHCPGHQKGQDPVAVGNRQADRVARQAAMAEVLTLATEPDNTSHITAGKRTADGSEFEKRTADGSEFESPKKKAKVE
